United States Patent Application Publication US 2017/0114356 A1 - sequence listing, part 29

SEQ ID NO: 38454 - DNA, 1659 bp, Zea Mays
gaaaaagtggtatcccactgcattatccagaaccgaaaaaaaaaactctgcggagattgaccgaccaccaccaccgcctgcgttcccgcgccgccaccgccatggctgccgctgccccccatgcatactcctccctcgtgcctgtttcggctgcgcggcctctctccggaagcacagtttctttcggtgcttcgtgccacaagtggaggaaggttccggcatggcgactccactgtgttgctgaagacgaagcagaggaagtcaaagattttggagtcaatatggcactatccatgctaaaattttacaaacgagaaatatcacctttactaccttcaagctgccgatatgtaccaacttgcagtgagtactctatgcaggcgtacaaacgatatggtgttgtaaagggttccatcttgactgcttggcgcctttgccgttgtaatcctcttggtggatatgggtatgatcctccaaaatggtttggcgaggaagatgtacctctgcaatagtaatgcctagtaattgaaagtacaggcattgtaattcttcagatccagacttgcagcagtttttatgtaatttactgaaactaaacccagaaacacaaggataaaattctgcaatatctatgcacctctgaaggagcatgtattttttttgtgtatgcctgtatggttattttatctagttctcgtgcaattcctccaaggtgattgtatgagcgaaattcatttattacctacaattaacatccataattcaccatattcgcctgtgtattctagtccgaggatccaactattttttctccaaagatactgatgacccaactgtcttttgctgcttctaaaatccataagggcttgttcggttagtaatggattgaaggggattggtgaggatatttcgagaaaaaaggggattggtgaggattaaatccctttctagtcaaaattgagtagaaggggatttaatccccctcaattctctccgatccagatgcaaccgaacaaggcctaaagaatttttcagtgaaacagatagatgtatggttgtagcttgtaacacttgttaggacagctaaaggactagcatcgacatatttgttattgaacatgatgatcatttcaaaattcaaaactaccacttcgttaaaaaattcaatgcattgtaggaacaattgtagttaaggagttcaagggaagactgtattcttgcagagtttgtaccatgttgtaatctttggctcacgggttctggtcactgtcagaaacaatgcacaactgtatgtggtagtttcaagggaaagcctccccatcgactatactgccaaggaacttgattggatttctgagatttctatgctgaagatacataaatggtaatggattttcttctatacaaacatggcccaaaacaaagcatcttctataaactactaagctacttggtgaccagtctatcagtatagttgaggatttgtattctaggaatcctattggtataacatgaggactgtgtagtttagtttagttaaaaaagtatactatctatgatctggaagaaaactgatcagaaaattcttttgatgcacgattttaacatgatcatcatgctaaatttataatctggtaaagtttattatcatattcagaa

SEQ ID NO: 38455 - DNA, 1099 bp, Zea Mays
gaaaaagtggtatcccactgcattatccagaaccgaaaaaaaaaactctgcggagattgaccgaccaccaccaccgcctgcgttcccgcgccgccaccgccatggctgccgctgccccccatgcatactcctccctcgtgcctgtttcggctgcgcggcctctctccggaagcacagtttctttcggtgcttcgtgccacaagtggaggaaggttccggcatggcgactccactgtgttgctgaagacgaaggcctgcttgactacattatgtgcatattgtgattctcagcagaggaagtcaaagattttggagtcaatatggcactatccatgctaaaattttacaaacgagaaatatcacctttactaccttcaagctgccgatatgtaccaacttgcagtgagtactctatgcaggcgtacaaacgatatggtgttgtaaagggttccatcttgactgcttggcgcctttgccgttgtaatcctcttggtggatatgggtatgatcctccaaaatggtttggcgaggaagatgtacctctgcaatagtaatgcctagtaattgaaagtacaggcattgtaattcttcagatccagacttgcagcagtttttatgaacaattgtagttaaggagttcaagggaagactgtattcttgcagagtttgtaccatgttgtaatctttggctcacgggttctggtcactgtcagaaacaatgcacaactgtatgtggtagtttcaagggaaagcctccccatcgactatactgccaaggaacttgattggatttctgagatttctatgctgaagatacataaatggtaatggattttcttctatacaaacatggcccaaaacaaagcatcttctataaactactaagctacttggtgaccagtctatcagtatagttgaggatttgtattctaggaatcctattggtataacatgaggactgtgtagtttagtttagttaaaaaagtatactatctatgatctggaagaaaactgatcagaaaattcttttgatgcacgattttaacatgatcatcatgctaaatttataatctggtaaagtttattatcatattcagaa

SEQ ID NO: 38456 - DNA, 2004 bp, Zea Mays
gaaaaagtggtatcccactgcattatccagaaccgaaaaaaaaaactctgcggagattgaccgaccaccaccaccgcctgcgttcccgcgccgccaccgccatggctgccgctgccccccatgcatactcctccctcgtgcctgtttcggctgcgcggcctctctccggaagcacagtttctttcggtgcttcgtgccacaagtggaggaaggttccggcatggcgactccactgtgttgctgaagacgaagcagaggaagtcaaagattttggagtcaatatggcactatccatgctaaaattttacaaacgagaaatatcacctttactaccttcaagctgccgatatgtaccaacttgcagtgagtactctatgcaggcgtacaaacgatatggtgttgtaaagggttccatcttgactgcttggcgcctttgccgttgtaatcctcttggtggatatgggtatgatcctccaaaatggtttggcgaggaagatgtacctctgcaatagtaatgcctagtaattgaaagtacaggcattgtaattcttcagatccagacttgcagcagtttttatgtaatttactgaaactaaacccagaaacacaaggataaaattctgcaatatctatgcacctctgaaggagcatgtattttttttgtgtatgcctgtatggttattttatctagttctcgtgcaattcctccaaggtgattgtatgagcgaaattcatttattacctacaattaacatccataattcaccatattcgcctgtgtattctagtccgaggatccaactattttttctccaaagatactgatgacccaactgtcttttgctgcttctaaaatccataagggcttgttcggttagtaatggattgaaggggattggtgaggatatttcgagaaaaaaggggattggtgaggattaaatccctttctagtcaaaattgagtagaaggggatttaatccccctcaattctctccgatccagatgcaaccgaacaaggcctaaagaatttttcagtgaaacagatagatgtatggttgtagcttgtaacacttgttaggacagctaaaggactagcatcgacatatttgttattgaacatgatgatcatttcaaaattcaaaactaccacttcgttaaaaaattcaatgcattgtaggaacaattgtagttaaggagttcaagggaagactgtattcttgcagagtttgtaccatgttgtaatctttggctcacgggtatgtgctacacctgccgtacatttaaatatcttccttaggtatgctcatctgaacttcaggtcaccatggccccatatccttgtatgtggtgcttatttaattgtttcttctcggggtatcatatctgttcttgtccctgtccaatattttatacggtacatgctgtgtagatttggatacgtcgtcacatcgattcatatatcccagtggacctatcactggtcaaacttttttgtttttcagattgattatttggtgtccattttgatgttttgtttacccattccccatttccttttttcaggttctggtcactgtcagaaacaatgcacaactgtatgtggtagtttcaagggaaagcctccccatcgactatactgccaaggaacttgattggatttctgagatttctatgctgaagatacataaatggcaaggggaagaggtgacgcactcatgcttggcattagagtcaggtgctcggtggttccaacatgcatggcctcgtatgtttgttggctttgtgcgtcatctgtgatttgtgtccctttcagtactttggcagtaccaccatgctgatcgatgatcccgtccaattttgttgcttgctccgtttgtccttaataattatcattgagtgcctaatgtgaaggctatgccatcctttgttatgaatgcccatcaatgtaaaagtctaaggtgaggctccccggttggataatataaacactgtcatgcatggttg

SEQ ID NO: 38457 - DNA, 1016 bp, Zea Mays
gaaaaagtggtatcccactgcattatccagaaccgaaaaaaaaaactctgcggagattgaccgaccaccaccaccgcctgcgttcccgcgccgccaccgccatggctgccgctgccccccatgcatactcctccctcgtgcctgtttcggctgcgcggcctctctccggaagcacagtttctttcggtgcttcgtgccacaagtggaggaaggttccggcatggcgactccactgtgttgctgaagacgaagaggaagtcaaagattttggagtcaatatggcactatccatgctaaaattttacaaacgagaaatatcacctttactaccttcaagctgccgatatgtaccaacttgcagtgagtactctatgcaggcgtacaaacgatatggtgttgtaaagggttccatcttgactgcttggcgcctttgccgttgtaatcctcttggtggatatgggtatgatcctccaaaatggtttggcgaggaagatgtacctctgcaatagtaatgcctagtaattgaaagtacaggcattgtaattcttcagatccagacttgcagcagtttttatgttctggtcactgtcagaaacaatgcacaactgtatgtggtagtttcaagggaaagcctccccatcgactatactgccaaggaacttgattggatttctgagatttctatgctgaagatacataaatggcaaggggaagaggtgacgcactcatgcttggcattagagtcaggtgctcggtggttccaacatgcatggcctcgtatgtttgttggctttgtgcgtcatctgtgatttgtgtccctttcagtactttggcagtaccaccatgctgatcgatgatcccgtccaattttgttgcttgctccgtttgtccttaataattatcattgagtgcctaatgtgaaggctatgccatcctttgttatgaatgcccatcaatgtaaaagtctaaggtgaggctccccggttggataatataaacactgtcatgcatggttg

SEQ ID NO: 38458 - DNA, 1799 bp, Zea Mays
gaaaaagtggtatcccactgcattatccagaaccgaaaaaaaaaactctgcggagattgaccgaccaccaccaccgcctgcgttcccgcgccgccaccgccatggctgccgctgccccccatgcatactcctccctcgtgcctgtttcggctgcgcggcctctctccggaagcacagtttctttcggtgcttcgtgccacaagtggaggaaggttccggcatggcgactccactgtgttgctgaagacgaaggcctgcttgactacattatgtgcatattgtgattctcagcagaggaagtcaaagattttggagtcaatatggcactatccatgctaaaattttacaaacgagaaatatcacctttactaccttcaagctgccgatatgtaccaacttgcagtgagtactctatgcaggcgtacaaacgatatggtgttgtaaagggttccatcttgactgcttggcgcctttgccgttgtaatcctcttggtggatatgggtatgatcctccaaaatggtttggcgaggaagatgtacctctgcaatagtaatgcctagtaattgaaagtacaggcattgtaattcttcagatccagacttgcagcagtttttatgtaatttactgaaactaaacccagaaacacaaggataaaattctgcaatatctatgcacctctgaaggagcatgtattttttttgtgtatgcctgtatggttattttatctagttctcgtgcaattcctccaaggtgattgtatgagcgaaattcatttattacctacaattaacatccataattcaccatattcgcctgtgtattctagtccgaggatccaactattttttctccaaagatactgatgacccaactgtcttttgctgcttctaaaatccataagggcttgttcggttagtaatggattgaaggggattggtgaggatatttcgagaaaaaaggggattggtgaggattaaatccctttctagtcaaaattgagtagaaggggatttaatccccctcaattctctccgatccagatgcaaccgaacaaggcctaaagaatttttcagtgaaacagatagatgtatggttgtagcttgtaacacttgttaggacagctaaaggactagcatcgacatatttgttattgaacatgatgatcatttcaaaattcaaaactaccacttcgttaaaaaattcaatgcattgtaggaacaattgtagttaaggagttcaagggaagactgtattcttgcagagtttgtaccatgttgtaatctttggctcacgggtatgtgctacacctgccgtacatttaaatatcttccttaggtatgctcatctgaacttcaggtcaccatggccccatatccttgtatgtggtgcttatttaattgtttcttctcggggtatcatatctgttcttgtccctgtccaatattttatacggtacatgctgtgtagatttggatacgtcgtcacatcgattcatatatcccagtggacctatcactggtcaaacttttttgtttttcagattgattatttggtgtccattttgatgttttgtttacccattccccatttccttttttcaggttctggtcactgtcagaaacaatgcacaactgtatgtggtagtttcaagggaaagcctccccatcgactatactgccaaggaacttgattggatttctgagatttctatgctgaagatacataaatgcgcaaggcgacgatcactctgacatgacatggatcggccggaaagacttttgggcgcacgagcgttgac

SEQ ID NO: 38459 - DNA, 1642 bp, Zea Mays
tcctcctcctcctcctcctcctccttcctgccgtcgccgacgactgccccacctgtactctcccctgcgtcctcctcctcggctctgctacacgccttccttgcttcctccctccaggcaggccagctccttcctcctcacgctagctcggtgtcttccttttcccttttccagcgcgcgccggccggccggccggccaaattccaatcccatccaccatcttgttcttgtcttctccgacaattaaccatcaatcccaaaacgtcatattcatcttgtcgaggccataaagtcacaacaaacacgtcgtccatgcatccaccaccgcatccatccatgaagcccggcggcgaggaggaggaggatgtgcaggtgctggtggtgcggtcccaccaccactcggaccagagcagcacgaggagccaccaccaccagcaggtcgtcatcagggcgcggccctactaccggcggtggtcgccgtggctcgtctccggcgccaccgtggcctgcgtcgccatcttcctcgtcaccatgtacgtgaacgactgcccgacgcacaactccaactgcgccgccgcagggttcctcggccgcttcgccttccagccgctccgcgagaacccgctcctcggaccctcctccgccactgaagatgggggctctcgatgtggctaaggtcgtccatggccggcaaggatggcgtctgatcacctgcatgtggctccacgccggagttgttcacctgctcatcaacatgctgtgcctcctagtcgtgggcatacgcctggagcaagaatttgggttcgtgaggatcggtctggtgtacctcatctctggttttggcgggagcctcatgtctgctctcttcatacagtccagcagcgtctccgtgggggcctccggcgctctcttcggcctcatcggatccatgctctctgagctcatcaccaactggtcactctacgcaaacaaggtggcggcgctgctaactctgcttctggtgatcctctccaacctggcgctgggcctcctcccccgggtggacaacttcgcccacatcggcggcctcgtctccggcttcctcctcggcttcgtcgtcttcgtccgcccgcacttggactggctcacccagcagcagagaagcggcggcggcgggcaagggcaacagcaagctcctccgccggtggcagcggcgaggaaacgcaagcacaggacgtaccagtatgtgctgtggctggccgccgccgcgctgctcgtggccgggctcacggcggccaccgtgctgcttttccgcgggtacgacgccaaccagcactgcccgtggtgccactacctcagctgcgtgcccaccaggaggtggaggtgcgacgggtcgccgaccacgtgcacggccacgacgcaggagaacaacacgctcagcgtcgtctgcgagggcggcagcaaccgcacgtacgtcgtggcggcggcgtcgcaggacaggatcaaggacctctgcaatcagctctgcacctagcactgcatattcttcgtgtacatcgatccatttttactcaccgtcagagtgaggtcctagctttacagcaagagaaagaatttgttcgatttacaggcaaatatgatatttttgaaatgcagcaaacaa

SEQ ID NO: 38460 - DNA, 1646 bp, Zea Mays
cctcctcctcctcctcctcctccttcctgccgtcgccgacgactgccccacctgtactctcccctgcgtcctcctcctcggctctgctacacgccttccttgcttcctccctccaggcaggccagctccttcctcctcacgctagctcggtgtcttccttttcccttttccagcgcgcgccggccggccggccggccaaattccaatcccatccaccatcttgttcttgtcttctccgacaattaaccatcaatcccaaaacgtcatattcatcttgtcgaggccataaagtcacaacaaacacgtcgtccatgcatccaccaccgcatccatccatgaagcccggcggcgaggaggaggaggatgtgcaggtgctggtggtgcggtcccaccaccactcggaccagagcagcacgaggagccaccaccaccagcaggtcgtcatcagggcgcggccctactaccggcggtggtcgccgtggctcgtctccggcgccaccgtggcctgcgtcgccatcttcctcgtcaccatgtacgtgaacgactgcccgacgcacaactccaactgcgccgccgcagggttcctcggccgcttcgccttccagccgctccgcgagaacccgctcctcggaccctcctccgccacgttagtgaagatgggggctctcgatgtggctaaggtcgtccatggccggcaaggatggcgtctgatcacctgcatgtggctccacgccggagttgttcacctgctcatcaacatgctgtgcctcctagtcgtgggcatacgcctggagcaagaatttgggttcgtgaggatcggtctggtgtacctcatctctggttttggcgggagcctcatgtctgctctcttcatacagtccagcagcgtctccgtgggggcctccggcgctctcttcggcctcatcggatccatgctctctgagctcatcaccaactggtcactctacgcaaacaaggtggcggcgctgctaactctgcttctggtgatcctctccaacctggcgctgggcctcctcccccgggtggacaacttcgcccacatcggcggcctcgtctccggcttcctcctcggcttcgtcgtcttcgtccgcccgcacttggactggctcacccagcagcagagaagcggcggcggcgggcaagggcaacagcaagctcctccgccggtggcagcggcgaggaaacgcaagcacaggacgtaccagtatgtgctgtggctggccgccgccgcgctgctcgtggccgggctcacggcggccaccgtgctgcttttccgcgggtacgacgccaaccagcactgcccgtggtgccactacctcagctgcgtgcccaccaggaggtggaggtgcgacgggtcgccgaccacgtgcacggccacgacgcaggagaacaacacgctcagcgtcgtctgcgagggcggcagcaaccgcacgtacgtcgtggcggcggcgtcgcaggacaggatcaaggacctctgcaatcagctctgcacctagcactgcatattcttcgtgtacatcgatccatttttactcaccgtcagagtgaggtcctagctttacagcaagagaaagaatttgttcgatttacaggcaaatatgatatttttgaaatgcagcaaacaa

SEQ ID NO: 38461 - DNA, 1641 bp, Zea Mays
cctcctcctcctcctcctcctccttcctgccgtcgccgacgactgccccacctgtactctcccctgcgtcctcctcctcggctctgctacacgccttccttgcttcctccctccaggcaggccagctccttcctcctcacgctagctcggtgtcttccttttcccttttccagcgcgcgccggccggccggccggccaaattccaatcccatccaccatcttgttcttgtcttctccgacaattaaccatcaatcccaaaacgtcatattcatcttgtcgaggccataaagtcacaacaaacacgtcgtccatgcatccaccaccgcatccatccatgaagcccggcggcgaggaggaggaggatgtgcaggtgctggtggtgcggtcccaccaccactcggaccagagcagcacgaggagccaccaccaccagcaggtcgtcatcagggcgcggccctactaccggcggtggtcgccgtggctcgtctccggcgccaccgtggcctgcgtcgccatcttcctcgtcaccatgtacgtgaacgactgcccgacgcacaactccaactgcgccgccgcagggttcctcggccgcttcgccttccagccgctccgcgagaacccgctcctcggaccctcctccgccacgttagtgaagatgggggctctcgatgtggctaaggtcgtccatggccggcaaggatggcgtctgatcacctgcatgtggctccacgccggagttgttcacctgctcatcaacatgctgtgcctcctagtcgtgggcatacgcctggagcaagaatttggtgaggatcggtctggtgtacctcatctctggttttggcgggagcctcatgtctgctctcttcatacagtccagcagcgtctccgtgggggcctccggcgctctcttcggcctcatcggatccatgctctctgagctcatcaccaactggtcactctacgcaaacaaggtggcggcgctgctaactctgcttctggtgatcctctccaacctggcgctgggcctcctcccccgggtggacaacttcgcccacatcggcggcctcgtctccggcttcctcctcggcttcgtcgtcttcgtccgcccgcacttggactggctcacccagcagcagagaagcggcggcggcgggcaagggcaacagcaagctcctccgccggtggcagcggcgaggaaacgcaagcacaggacgtaccagtatgtgctgtggctggccgccgccgcgctgctcgtggccgggctcacggcggccaccgtgctgcttttccgcgggtacgacgccaaccagcactgcccgtggtgccactacctcagctgcgtgcccaccaggaggtggaggtgcgacgggtcgccgaccacgtgcacggccacgacgcaggagaacaacacgctcagcgtcgtctgcgagggcggcagcaaccgcacgtacgtcgtggcggcggcgtcgcaggacaggatcaaggacctctgcaatcagctctgcacctagcactgcatattcttcgtgtacatcgatccatttttactcaccgtcagagtgaggtcctagctttacagcaagagaaagaatttgttcgatttacaggcaaatatgatatttttgaaatgcagcaaacaa

SEQ ID NO: 38462 - DNA, 4023 bp, Zea Mays
cagaaactgactcttgcttcagcccggccgcacagactcgatgccgcgcggtgctacggtggccctcttcgccggtccatcgaggaggcctgccgtggtgctctcggcggtctttgattccacgcaggaagagccccgggcggtgcgcgcggcgcggatttggcggcggcctcatggcatgaacggtgagcagagatgagtatccctcaaatcgcttataggtatttggtttgaagaataagctagtctattatattatcacttctcatttgtttggtttgtggaatggaatgagttaattcatcacaacatcactcctcatagttattagttattactaacataagaaataaaattattccaccaaatttaagaaatgtacttatgatgatggagcgactctcttagttctttgcagctctttggttattgagaattggtaacatcttttggacgcgggggatgactttgcagtttgcagcggcactcaaggcccctactttttctcgaatcccaactcatttcttcctcctcttctggattatcatctgggaggcaaaggggtgacttgtcgtagagcattttatgtcaaagatgccctgctttaccgacggagacagaaaattagtgaagacagagatatacaccatacaaccaccttcgatggacgcgggggatgacattgcttgacatggactgcgtggctgaggcaatcggcatacagtacttgcagcctgtactactatacatagacagttctgttttcctccaaagtgctttatccttagaccattctcttctgtcatatccactcccgctccactccatactgagcgtgcgttcttgatccatactgagctctgccgagtgctcgctccaatggctgaacttgcagccagcctggtggttgccccactgctgtccatgttgaaggagaaggtgtccagctctctcctcaaccagtacaacgtgatggagggcatggagaagcaccacaagaccctcatgcgctggctgcctgccatccaagaagttatcgctgacgccgagaggcagacgtctcgccgcggcgtggagaaatggctcgagcagctcaagacgacagcgtacgaggcgaatgaggtctttgacgacttcgagtacgaggcgctccgccgtcgagccaagaaaaatgggcacatcgccaagcttgccattatggcaagggtaaaacttttccctacccacaaccgtgttgcattccatatcaggatgagctacaggcttcgcaggattgttgacaccttcaaggaccttgtggaagaaatgaacacctttggattcaacaagcttgagcccgaggcaacaacgacatggaaggagtggcgtgagacagattctattatcgttgatcctgaaaatattgttgccaggtctagacatgatgagaggaagaaaattgttaacttattggtcaatggtcatgttaccgatggtgatcttatggtcgttcccattgttggaatgggaggactaggcaagaccacactcgctcagctcatctacaacgaccctcaggtcaaggagcacttccatctactaaagtgggattatcagattgatatggacaagcttatccaactatggatggccaatggttttatctcagatcaaaaaaaggtacctgctgaaaccgtaggtaaaaggattgtcaatgagctggtctcgaggtcatttttccagtatgaggagcgaagttggatggggtacaattctacaacttttttgaagattcatgacctcatgcatgatcttgcactgtctgtttcggaaaaggaatgtgtctgtataacaagggaattgattaaaaatagtgagttgcttccaagtgctgcccgccacatacttattcaaaattggataggtaaagagattcatggttatttatatggttctatgaggaaaatgtctcggcctatccaaacatttatgtttgatgggtctagtgaagctgccggtgtgcaacatttatcaagatatagttctttgcgagtactttctgtgccaggaattgggtttcatttaacaataaaaccaaagcatcagtgccaccttaggtttcttgatatcaaggacagtgtcatcaaagaacttccagatgacattagcgtcctttataatcttcagacacttttcgtcatctgtacacagatgggtgcacaagggaggaggagtgcaggagcagccaaccttaagaataagaaggaactgagacaactgtcactagagtggacaagtggtaaggaggagggactacagtgtcatgaggtgctagagggccttgaagctcatgatggactcctggctctaggaatacattactaccaaggcaccagttttccatcttggatgggtatgttgaaaaacatactcgatcgaccttcggttgtccgattgtagtaaagtagaccggcttccaccaatgtgtcagctagcagaactgcaagtccttcatttgaaaagattggaaaatttgcagttcctatgtagcaggtgtacatcctccacgtttggaaaactgaaggatcttaagctacttgatcttgacgtttttgaaggattttgtgaggcagtgcatggatgtgcagtagcatttcctcagcttgagttattggaaattgacagctgtaaaaatctagcagctctaccagaagcatcgatgctgggagaagcatattgtggtggagatcatacagtggcgcgctctgcatttccagaactgaatattctcgtattgcaaggtttgcgtagctttgagagatgggaggctgctgccctttaaactgaagaaagacatgcaatattccctcgggttaagaatggtcctgagcaggcaacatgaggaatgagccagccagttgcttttgccccatctagagtctctagagatatcggggtgtgaaagtctggtagaggaggtattcaactcctcccctgctatgctcttaagagtatggatgtgataggatgtcacgggttgttgtcatctctagaatctctaaggatacaacactgtcacgggttgtcaatcttccctcgtccctcagggtaatagatactacggttcatgtcagggcagctggatgcactcaatacctgtcatcactggaaatcctccgtctgtctcgttgcaaaaacctgtcgtgcttgcccagtgcgcgggcaggaggacgacaggaatactcatctcttcgtgagcttacaattacggtagcagggagacagagccgaacatcaaagcagaaagaaaaatgatccttattaattggttgtacaatacaatatgttatgtgatttggaatacctgctgccgacgacagttgcctccaattcctgcagcttctggcacctagagatgtctagctttccacagcttttcaaggttggtaactatttgcagtttctgtttcgggcgacccattgctttaggttttggagacatttttcggagggttcaagaccaggaaacggatcgacgccgcgtctatgcaaatttttttttcttcttattttcattggagttttatgaacaggattgcgttttgaggtttatagcctgtctattgggtgtcgtgtttatttttatgcactctatgttgtgagtgctagtccatgcagttatgtggagcgagcccaacaacgataccagcctagcaagttggtctcgttgtacccccggaacaacgacaacgtgatggtggtggcgatgcgcaacgccgcggagccggcgtggcgacagcggcatcgtttcatggggaccccgatgccagtgacagaaggaggtggatacagggtcagggagaaaatgtcacttgctcctctctatctttttgagggattgattgataggagctttcgagggattaagaaaaaatgtaggacaaatggttgagaaaaaaaaagtatatgtttggtttgtaaccatagattgtggcaaaatctttcgcttgctgtgctagggtctactgcccaacaagtctgtca

SEQ ID NO: 38463 - DNA, 3715 bp, Zea Mays
agcccggccgcacagactcgatgccgcgcggtgctacggtggccctcttcgccggtccatcgaggaggcctgccgtggtgctctcggcggtctttgattccacgcaggaagagccccgggcggtgcgcgcggcgcggatttggcggcggcctcatggcatgaacggtttgcagcggcactcaaggcccctactttttctcgaatcccaactcatttcttcctcctcttctggattatcatctgggaggcaaaggggtgacttgtcgtagagcattttatgtcaaagatgccctgctttaccgacggagacagaaaattagtgaagacagagatatacaccatacaaccaccttcgatggacgcgggggatgacattgcttgacatggactgcgtggctgaggcaatcggcatacagtacttgcagcctgtactactatacatagacagttctgttttcctccaaagtgctttatccttagaccattctcttctgtcatatccactcccgctccactccatactgagcgtgcgttcttgatccatactgagctctgccgagtgctcgctccaatggctgaacttgcagccagcctggtggttgccccactgctgtccatgttgaaggagaaggtgtccagctctctcctcaaccagtacaacgtgatggagggcatggagaagcaccacaagaccctcatgcgctggctgcctgccatccaagaagttatcgctgacgccgagaggcagacgtctcgccgcggcgtggagaaatggctcgagcagctcaagacgacagcgtacgaggcgaatgaggtctttgacgacttcgagtacgaggcgctccgccgtcgagccaagaaaaatgggcacatcgccaagcttgccattatggcaagggtaaaacttttccctacccacaaccgtgttgcattccatatcaggatgagctacaggcttcgcaggattgttgacaccttcaaggaccttgtggaagaaatgaacacctttggattcaacaagcttgagcccgaggcaacaacgacatggaaggagtggcgtgagacagattctattatcgttgatcctgaaaatattgttgccaggtctagacatgatgagaggaagaaaattgttaacttattggtcaatggtcatgttaccgatggtgatcttatggtcgttcccattgttggaatgggaggactaggcaagaccacactcgctcagctcatctacaacgaccctcaggtcaaggagcacttccatctactaaagtgggattatcagattgatatggacaagcttatccaactatggatggccaatggttttatctcagatcaaaaaaaggtacctgctgaaaccgtaggtaaaaggattgtcaatgagctggtctcgaggtcatttttccagtatgaggagcgaagttggatggggtacaattctacaacttttttgaagattcatgacctcatgcatgatcttgcactgtctgtttcggaaaaggaatgtgtctgtataacaagggaattgattaaaaatagtgagttgcttccaagtgctgcccgccacatacttattcaaaattggataggtaaagagattcatggttatttatatggttctatgaggaaaatgtctcggcctatccaaacatttatgtttgatgggtctagtgaagctgccggtgtgcaacatttatcaagatatagttctttgcgagtactttctgtgccaggaattgggtttcatttaacaataaaaccaaagcatcagtgccaccttaggtttcttgatatcaaggacagtgtcatcaaagaacttccagatgacattagcgtcctttataatcttcagacacttttcgtcatctgtacacagatgggtgcacaagggaggaggagtgcaggagcagccaaccttaagaataagaaggaactgagacaactgtcactagagtggacaagtggtaaggaggagggactacagtgtcatgaggtgctagagggccttgaagctcatgatggactcctggctctaggaatacattactaccaaggcaccagttttccatcttggatgggtatgttgaaaaacatactcgatcgaccttcggttgtccgattgtagtaaagtagaccggcttccaccaatgtgtcagctagcagaactgcaagtccttcatttgaaaagattggaaaatttgcagttcctatgtagcaggtgtacatcctccacgtttggaaaactgaaggatcttaagctacttgatcttgacgtttttgaaggattttgtgaggcagtgcatggatgtgcagtagcatttcctcagcttgagttattggaaattgacagctgtaaaaatctagcagctctaccagaagcatcgatgctgggagaagcatattgtggtggagatcatacagtggcgcgctctgcatttccagaactgaatattctcgtattgcaaggtttgcgtagctttgagagatgggaggctgctgccctttaaactgaagaaagacatgcaatattccctcgggttaagaatggtcctgagcaggcaacatgaggaatgagccagccagttgcttttgccccatctagagtctctagagatatcggggtgtgaaagtctggtagaggaggtattcaactcctcccctgctatgctcttaagagtatggatgtgataggatgtcacgggttgttgtcatctctagaatctctaaggatacaacactgtcacgggttgtcaatcttccctcgtccctcagggtaatagatactacggttcatgtcagggcagctggatgcactcaatacctgtcatcactggaaatcctccgtctgtctcgttgcaaaaacctgtcgtgcttgcccagtgcgcgggcaggaggacgacaggaatactcatctcttcgtgagcttacaattacggtagcagggagacagagccgaacatcaaagcagaaagaaaaatgatccttattaattggttgtacaatacaatatgttatgtgatttggaatacctgctgccgacgacagttgcctccaattcctgcagcttctggcacctagagatgtctagctttccacagcttttcaaggttggtaactatttgcagtttctgtttcgggcgacccattgctttaggttttggagacatttttcggagggttcaagaccaggaaacggatcgacgccgcgtctatgcaaatttttttttcttcttattttcattggagttttatgaacaggattgcgttttgaggtttatagcctgtctattgggtgtcgtgtttatttttatgcactctatgttgtgagtgctagtccatgcagttatgtggagcgagcccaacaacgataccagcctagcaagttggtctcgttgtacccccggaacaacgacaacgtgatggtggtggcgatgcgcaacgccgcggagccggcgtggcgacagcggcatcgtttcatggggaccccgatgccagtgacagaaggaggtggatacagggtcagggagaaaatgtcacttgctcctctctatctttttgagggattgattgataggagctttcgagggattaagaaaaaatgtaggacaaatggttgagaaaaaaaaagtatatgtttggtttgtaaccatagattgtggcaaaatctttcgcttgctgtgctagggtctactgcccaacaagtctgtca

SEQ ID NO: 38464 - DNA, 3704 bp, Zea Mays
cacagactcgatgccgcgcggtgctacggtggccctcttcgccggtccatcgaggaggcctgccgtggtgctctcggcggtctttgattccacgcaggaagagccccgggcggtgcgcgcggcgcggatttggcggcggcctcatggcatgaacgtttgcagcggcactcaaggcccctactttttctcgaatcccaactcatttcttcctcctcttctggattatcatctgggaggcaaaggggtgacttgtcgtagagcattttatgtcaaagatgccctgctttaccgacggagacagaaaattagtgaagacagagatatacaccatacaaccaccttcgatggacgcgggggatgacattgcttgacatggactgcgtggctgaggcaatcggcatacagtacttgcagcctgtactactatacatagacagttctgttttcctccaaagtgctttatccttagaccattctcttctgtcatatccactcccgctccactccatactgagcgtgcgttcttgatccatactgagctctgccgagtgctcgctccaatggctgaacttgcagccagcctggtggttgccccactgctgtccatgttgaaggagaaggtgtccagctctctcctcaaccagtacaacgtgatggagggcatggagaagcaccacaagaccctcatgcgctggctgcctgccatccaagaagttatcgctgacgccgagaggcagacgtctcgccgcggcgtggagaaatggctcgagcagctcaagacgacagcgtacgaggcgaatgaggtctttgacgacttcgagtacgaggcgctccgccgtcgagccaagaaaaatgggcacatcgccaagcttgccattatggcaagggtaaaacttttccctacccacaaccgtgttgcattccatatcaggatgagctacaggcttcgcaggattgttgacaccttcaaggaccttgtggaagaaatgaacacctttggattcaacaagcttgagcccgaggcaacaacgacatggaaggagtggcgtgagacagattctattatcgttgatcctgaaaatattgttgccaggtctagacatgatgagaggaagaaaattgttaacttattggtcaatggtcatgttaccgatggtgatcttatggtcgttcccattgttggaatgggaggactaggcaagaccacactcgctcagctcatctacaacgaccctcaggtcaaggagcacttccatctactaaagtgggattatcagattgatatggacaagcttatccaactatggatggccaatggttttatctcagatcaaaaaaaggtacctgctgaaaccgtaggtaaaaggattgtcaatgagctggtctcgaggtcatttttccagtatgaggagcgaagttggatggggtacaattctacaacttttttgaagattcatgacctcatgcatgatcttgcactgtctgtttcggaaaaggaatgtgtctgtataacaagggaattgattaaaaatagtgagttgcttccaagtgctgcccgccacatacttattcaaaattggataggtaaagagattcatggttatttatatggttctatgaggaaaatgtctcggcctatccaaacatttatgtttgatgggtctagtgaagctgccggtgtgcaacatttatcaagatatagttctttgcgagtactttctgtgccaggaattgggtttcatttaacaataaaaccaaagcatcagtgccaccttaggtttcttgatatcaaggacagtgtcatcaaagaacttccagatgacattagcgtcctttataatcttcagacacttttcgtcatctgtacacagatgggtgcacaagggaggaggagtgcaggagcagccaaccttaagaataagaaggaactgagacaactgtcactagagtggacaagtggtaaggaggagggactacagtgtcatgaggtgctagagggccttgaagctcatgatggactcctggctctaggaatacattactaccaaggcaccagttttccatcttggatgggtatgttgaaaaacatactcgatcgaccttcggttgtccgattgtagtaaagtagaccggcttccaccaatgtgtcagctagcagaactgcaagtccttcatttgaaaagattggaaaatttgcagttcctatgtagcaggtgtacatcctccacgtttggaaaactgaaggatcttaagctacttgatcttgacgtttttgaaggattttgtgaggcagtgcatggatgtgcagtagcatttcctcagcttgagttattggaaattgacagctgtaaaaatctagcagctctaccagaagcatcgatgctgggagaagcatattgtggtggagatcatacagtggcgcgctctgcatttccagaactgaatattctcgtattgcaaggtttgcgtagctttgagagatgggaggctgctgccctttaaactgaagaaagacatgcaatattccctcgggttaagaatggtcctgagcaggcaacatgaggaatgagccagccagttgcttttgccccatctagagtctctagagatatcggggtgtgaaagtctggtagaggaggtattcaactcctcccctgctatgctcttaagagtatggatgtgataggatgtcacgggttgttgtcatctctagaatctctaaggatacaacactgtcacgggttgtcaatcttccctcgtccctcagggtaatagatactacggttcatgtcagggcagctggatgcactcaatacctgtcatcactggaaatcctccgtctgtctcgttgcaaaaacctgtcgtgcttgcccagtgcgcgggcaggaggacgacaggaatactcatctcttcgtgagcttacaattacggtagcagggagacagagccgaacatcaaagcagaaagaaaaatgatccttattaattggttgtacaatacaatatgttatgtgatttggaatacctgctgccgacgacagttgcctccaattcctgcagcttctggcacctagagatgtctagctttccacagcttttcaaggttggtaactatttgcagtttctgtttcgggcgacccattgctttaggttttggagacatttttcggagggttcaagaccaggaaacggatcgacgccgcgtctatgcaaatttttttttcttcttattttcattggagttttatgaacaggattgcgttttgaggtttatagcctgtctattgggtgtcgtgtttatttttatgcactctatgttgtgagtgctagtccatgcagttatgtggagcgagcccaacaacgataccagcctagcaagttggtctcgttgtacccccggaacaacgacaacgtgatggtggtggcgatgcgcaacgccgcggagccggcgtggcgacagcggcatcgtttcatggggaccccgatgccagtgacagaaggaggtggatacagggtcagggagaaaatgtcacttgctcctctctatctttttgagggattgattgataggagctttcgagggattaagaaaaaatgtaggacaaatggttgagaaaaaaaaagtatatgtttggtttgtaaccatagattgtggcaaaatctttcgcttgctgtgctagggtctactgcccaacaagtctgtca

SEQ ID NO: 38465 - DNA, 3760 bp, Zea Mays
cacagactcgatgccgcgcggtgctacggtggccctcttcgccggtccatcgaggaggcctgccgtggtgctctcggcggtctttgattccacgcaggaagagccccgggcggtgcgcgcggcgcggatttggcggcggcctcatggcatgaacgctctttggttattgagaattggtaacatcttttggacgcgggggatgactttgcagtttgcagcggcactcaaggcccctactttttctcgaatcccaactcatttcttcctcctcttctggattatcatctgggaggcaaaggggtgacttgtcgtagagcattttatgtcaaagatgccctgctttaccgacggagacagaaaattagtgaagacagagatatacaccatacaaccaccttcgatggacgcgggggatgacattgcttgacatggactgcgtggctgaggcaatcggcatacagtacttgcagcctgtactactatacatagacagttctgttttcctccaaagtgctttatccttagaccattctcttctgtcatatccactcccgctccactccatactgagcgtgcgttcttgatccatactgagctctgccgagtgctcgctccaatggctgaacttgcagccagcctggtggttgccccactgctgtccatgttgaaggagaaggtgtccagctctctcctcaaccagtacaacgtgatggagggcatggagaagcaccacaagaccctcatgcgctggctgcctgccatccaagaagttatcgctgacgccgagaggcagacgtctcgccgcggcgtggagaaatggctcgagcagctcaagacgacagcgtacgaggcgaatgaggtctttgacgacttcgagtacgaggcgctccgccgtcgagccaagaaaaatgggcacatcgccaagcttgccattatggcaagggtaaaacttttccctacccacaaccgtgttgcattccatatcaggatgagctacaggcttcgcaggattgttgacaccttcaaggaccttgtggaagaaatgaacacctttggattcaacaagcttgagcccgaggcaacaacgacatggaaggagtggcgtgagacagattctattatcgttgatcctgaaaatattgttgccaggtctagacatgatgagaggaagaaaattgttaacttattggtcaatggtcatgttaccgatggtgatcttatggtcgttcccattgttggaatgggaggactaggcaagaccacactcgctcagctcatctacaacgaccctcaggtcaaggagcacttccatctactaaagtgggattatcagattgatatggacaagcttatccaactatggatggccaatggttttatctcagatcaaaaaaaggtacctgctgaaaccgtaggtaaaaggattgtcaatgagctggtctcgaggtcatttttccagtatgaggagcgaagttggatggggtacaattctacaacttttttgaagattcatgacctcatgcatgatcttgcactgtctgtttcggaaaaggaatgtgtctgtataacaagggaattgattaaaaatagtgagttgcttccaagtgctgcccgccacatacttattcaaaattggataggtaaagagattcatggttatttatatggttctatgaggaaaatgtctcggcctatccaaacatttatgtttgatgggtctagtgaagctgccggtgtgcaacatttatcaagatatagttctttgcgagtactttctgtgccaggaattgggtttcatttaacaataaaaccaaagcatcagtgccaccttaggtttcttgatatcaaggacagtgtcatcaaagaacttccagatgacattagcgtcctttataatcttcagacacttttcgtcatctgtacacagatgggtgcacaagggaggaggagtgcaggagcagccaaccttaagaataagaaggaactgagacaactgtcactagagtggacaagtggtaaggaggagggactacagtgtcatgaggtgctagagggccttgaagctcatgatggactcctggctctaggaatacattactaccaaggcaccagttttccatcttggatgggtatgttgaaaaacatactcgatcgaccttcggttgtccgattgtagtaaagtagaccggcttccaccaatgtgtcagctagcagaactgcaagtccttcatttgaaaagattggaaaatttgcagttcctatgtagcaggtgtacatcctccacgtttggaaaactgaaggatcttaagctacttgatcttgacgtttttgaaggattttgtgaggcagtgcatggatgtgcagtagcatttcctcagcttgagttattggaaattgacagctgtaaaaatctagcagctctaccagaagcatcgatgctgggagaagcatattgtggtggagatcatacagtggcgcgctctgcatttccagaactgaatattctcgtattgcaaggtttgcgtagctttgagagatgggaggctgctgccctttaaactgaagaaagacatgcaatattccctcgggttaagaatggtcctgagcaggcaacatgaggaatgagccagccagttgcttttgccccatctagagtctctagagatatcggggtgtgaaagtctggtagaggaggtattcaactcctcccctgctatgctcttaagagtatggatgtgataggatgtcacgggttgttgtcatctctagaatctctaaggatacaacactgtcacgggttgtcaatcttccctcgtccctcagggtaatagatactacggttcatgtcagggcagctggatgcactcaatacctgtcatcactggaaatcctccgtctgtctcgttgcaaaaacctgtcgtgcttgcccagtgcgcgggcaggaggacgacaggaatactcatctcttcgtgagcttacaattacggtagcagggagacagagccgaacatcaaagcagaaagaaaaatgatccttattaattggttgtacaatacaatatgttatgtgatttggaatacctgctgccgacgacagttgcctccaattcctgcagcttctggcacctagagatgtctagctttccacagcttttcaaggttggtaactatttgcagtttctgtttcgggcgacccattgctttaggttttggagacatttttcggagggttcaagaccaggaaacggatcgacgccgcgtctatgcaaatttttttttcttcttattttcattggagttttatgaacaggattgcgttttgaggtttatagcctgtctattgggtgtcgtgtttatttttatgcactctatgttgtgagtgctagtccatgcagttatgtggagcgagcccaacaacgataccagcctagcaagttggtctcgttgtacccccggaacaacgacaacgtgatggtggtggcgatgcgcaacgccgcggagccggcgtggcgacagcggcatcgtttcatggggaccccgatgccagtgacagaaggaggtggatacagggtcagggagaaaatgtcacttgctcctctctatctttttgagggattgattgataggagctttcgagggattaagaaaaaatgtaggacaaatggttgagaaaaaaaaagtatatgtttggtttgtaaccatagattgtggcaaaatctttcgcttgctgtgctagggtctactgcccaacaagtctgtca

SEQ ID NO: 38466 - DNA, 3272 bp, Zea Mays
cacagactcgatgccgcgcggtgctacggtggccctcttcgccggtccatcgaggaggcctgccgtggtgctctcggcggtctttgattccacgcaggaagagccccgggcggtgcgcgcggcgcggatttggcggcggcctcatggcatgaacgtttgcagcggcactcaaggcccctactttttctcgaatcccaactcatttcttcctcctcttctggattatcatctgggaggcaaaggggtgacttgtcgtagagcattttatgtcaaagatgccctgctttaccgacggagacagaaaattagtgaagacagagatatacaccatacaaccaccttcgatggacgcgggggatgacattgcttgacatggactgcgtggctgaggcaatcggcatacagtacttgcagcctgtactactatacatagacagttctgttttcctccaaagtgctttatccttagaccattctcttctgtcatatccactcccgctccactccatactgagcgtgcgttcttgatccatactgagctctgccgagtgctcgctccaatggctgaacttgcagccagcctggtggttgccccactgctgtccatgttgaaggagaaggtgtccagctctctcctcaaccagtacaacgtgatggagggcatggagaagcaccacaagaccctcatgcgctggctgcctgccatccaagaagttatcgctgacgccgagaggcagacgtctcgccgcggcgtggagaaatggctcgagcagctcaagacgacagcgtacgaggcgaatgaggtctttgacgacttcgagtacgaggcgctccgccgtcgagccaagaaaaatgggcacatcgccaagcttgccattatggcaagggtaaaacttttccctacccacaaccgtgttgcattccatatcaggatgagctacaggcttcgcaggattgttgacaccttcaaggaccttgtggaagaaatgaacacctttggattcaacaagcttgagcccgaggcaacaacgacatggaaggagtggcgtgagacagattctattatcgttgatcctgaaaatattgttgccaggtctagacatgatgagaggaagaaaattgttaacttattggtcaatggtcatgttaccgatggtgatcttatggtcgttcccattgttggaatgggaggactaggcaagaccacactcgctcagctcatctacaacgaccctcaggtcaaggagcacttccatctactaaagtgggattatcagattgatatggacaagcttatccaactatggatggccaatggttttatctcagatcaaaaaaaggtacctgctgaaaccgtaggtaaaaggattgtcaatgagctggtctcgaggtcatttttccagtatgaggagcgaagttggatggggtacaattctacaacttttttgaagattcatgacctcatgcatgatcttgcactgtctgtttcggaaaaggaatgtgtctgtataacaagggaattgattaaaaatagtgagttgcttccaagtgctgcccgccacatacttattcaaaattggataggtaaagagattcatggttatttatatggttctatgaggaaaatgtctcggcctatccaaacatttatgtttgatgggtctagtgaagctgccggtgtgcaacatttatcaagatatagttctttgcgagtactttctgtgccaggaattgggtttcatttaacaataaaaccaaagcatcagtgccaccttaggtttcttgatatcaaggacagtgtcatcaaagaacttccagatgacattagcgtcctttataatcttcagacacttttcgtcatctgtacacagatgggtgcacaagggaggaggagtgcaggagcagccaaccttaagaataagaaggaactgagacaactgtcactagagtggacaagtggtaaggaggagggactacagtgtcatgaggtgctagagggccttgaagctcatgatggactcctggctctaggaatacattactaccaaggcaccagttttccatcttggatgggattttgtgaggcagtgcatggatgtgcagtagcatttcctcagcttgagttattggaaattgacagctgtaaaaatctagcagctctaccagaagcatcgatgctgggagaagcatattgtggtggagatcatacagtggcgcgctctgcatttccagaactgaatattctcgtattgcaaggtttgcgtagctttgagagatgggaggctgctgccctttaaactgaagaaagacatgcaatattccctcgggttaagaatggtcctgagcaggcaacatgaggaatgagccagccagttgcttttgccccatctagagtctctagagatatcggggtgtgaaagtctggtagaggaggtattcaactcctcccctgctatgctcttaagagtatggatgtgataggatgtcacgggttgttgtcatctctagaatctctaaggatacaacactgtcacgggttgtcaatcttccctcgtccctcagggtaatagatactacggttcatgtcagggcagctggatgcactcaatacctgtcatcactggaaatcctccgtctgtctcgttgcaaaaacctgtcgtgcttgcccagtgcgcgggcaggaggacgacaggaatactcatctcttcgtgagcttacaattacggtagcagggagacagagccgaacatcaaagcagaaagaaaaatgatccttattaattggttgtacaatacaatatgttatgtgatttggaatacctgctgccgacgacagttgcctccaattcctgcagcttctggcacctagagatgtctagctttccacagcttttcaagtccatgcagttatgtggagcgagcccaacaacgataccagcctagcaagttggtctcgttgtacccccggaacaacgacaacgtgatggtggtggcgatgcgcaacgccgcggagccggcgtggcgacagcggcatcgtttcatggggaccccgatgccagtgacagaaggaggtggatacagggtcagggagaaaatgtcacttgctcctctctatctttttgagggattgattgataggagctttcgagggattaagaaaaaatgtaggacaaatggttgagaaaaaaaaagtatatgtttggtttgtaaccatagattgtggcaaaatctttcgcttgctgtgctagggtctactgcccaacaagtctgtca

SEQ ID NO: 38467 - DNA, 3782 bp, Zea Mays
ctcgatgccgcgcggtgctacggtggccctcttcgccggtccatcgaggaggcctgccgtggtgctctcggcggtctttgattccacgcaggaagagccccgggcggtgcgcgcggcgcggatttggcggcggcctcatggcatgaacggtgagcagagatgagtatccctcaaatcgcttataggtatttggtttgaagaataagctagtctattatattatcacttctcatttgtttggtttgtggaatggaatgagttaattcatcacaacatcactcctcatagttattagttattactaacataagaaataaaattattccaccaaatttaagaaatgtacttatgatgatggagcgactctcttagttctttgcagctctttggttattgagaattggtaacatcttttggacgcgggggatgactttgcagtttgcagcggcactcaaggcccctactttttctcgaatcccaactcatttcttcctcctcttctggattatcatctgggaggcaaaggggtgacttgtcgtagagcattttatgtcaaagatgccctgctttaccgacggagacagaaaattagtgaagacagagatatacaccatacaaccaccttcgatggacgcgggggatgacattgcttgacatggactgcgtggctgaggcaatcggcatacagtacttgcagcctgtactactatacatagacagttctgttttcctccaaagtgctttatccttagaccattctcttctgtcatatccactcccgctccactccatactgagcgtgcgttcttgatccatactgagctctgccgagtgctcgctccaatggctgaacttgcagccagcctggtggttgccccactgctgtccatgttgaaggagaaggtgtccagctctctcctcaaccagtacaacgtgatggagggcatggagaagcaccacaagaccctcatgcgctggctgcctgccatccaagaagttatcgctgacgccgagaggcagacgtctcgccgcggcgtggagaaatggctcgagcagctcaagacgacagcgtacgaggcgaatgaggtctttgacgacttcgagtacgaggcgctccgccgtcgagccaagaaaaatgggcacatcgccaagcttgccattatggcaagggtaaaacttttccctacccacaaccgtgttgcattccatatcaggatgagctacaggcttcgcaggattgttgacaccttcaaggaccttgtggaagaaatgaacacctttggattcaacaagcttgagcccgaggcaacaacgacatggaaggagtggcgtgagacagattctattatcgttgatcctgaaaatattgttgccaggtctagacatgatgagaggaagaaaattgttaacttattggtcaatggtcatgttaccgatggtgatcttatggtcgttcccattgttggaatgggaggactaggcaagaccacactcgctcagctcatctacaacgaccctcaggtcaaggagcacttccatctactaaagtgggattatcagattgatatggacaagcttatccaactatggatggccaatggttttatctcagatcaaaaaaaggtacctgctgaaaccgtaggtaaaaggattgtcaatgagctggtctcgaggtcatttttccagtatgaggagcgaagttggatggggtacaattctacaacttttttgaagattcatgacctcatgcatgatcttgcactgtctgtttcggaaaaggaatgtgtctgtataacaagggaattgattaaaaatagtgagttgcttccaagtgctgcccgccacatacttattcaaaattggataggtaaagagattcatggttatttatatggttctatgaggaaaatgtctcggcctatccaaacatttatgtttgatgggtctagtgaagctgccggtgtgcaacatttatcaagatatagttctttgcgagtactttctgtgccaggaattgggtttcatttaacaataaaaccaaagcatcagtgccaccttaggtttcttgatatcaaggacagtgtcatcaaagaacttccagatgacattagcgtcctttataatcttcagacacttttcgtcatctgtacacagatgggtgcacaagggaggaggagtgcaggagcagccaaccttaagaataagaaggaactgagacaactgtcactagagtggacaagtggtaaggaggagggactacagtgtcatgaggtgctagagggccttgaagctcatgatggactcctggctctaggaatacattactaccaaggcaccagttttccatcttggatgggattttgtgaggcagtgcatggatgtgcagtagcatttcctcagcttgagttattggaaattgacagctgtaaaaatctagcagctctaccagaagcatcgatgctgggagaagcatattgtggtggagatcatacagtggcgcgctctgcatttccagaactgaatattctcgtattgcaaggtttgcgtagctttgagagatgggaggctgctgccctttaaactgaagaaagacatgcaatattccctcgggttaagaatggtcctgagcaggcaacatgaggaatgagccagccagttgcttttgccccatctagagtctctagagatatcggggtgtgaaagtctggtagaggaggtattcaactcctcccctgctatgctcttaagagtatggatgtgataggatgtcacgggttgttgtcatctctagaatctctaaggatacaacactgtcacgggttgtcaatcttccctcgtccctcagggtaatagatactacggttcatgtcagggcagctggatgcactcaatacctgtcatcactggaaatcctccgtctgtctcgttgcaaaaacctgtcgtgcttgcccagtgcgcgggcaggaggacgacaggaatactcatctcttcgtgagcttacaattacggtagcagggagacagagccgaacatcaaagcagaaagaaaaatgatccttattaattggttgtacaatacaatatgttatgtgatttggaatacctgctgccgacgacagttgcctccaattcctgcagcttctggcacctagagatgtctagctttccacagcttttcaaggttggtaactatttgcagtttctgtttcgggcgacccattgctttaggttttggagacatttttcggagggttcaagaccaggaaacggatcgacgccgcgtctatgcaaatttttttttcttcttattttcattggagttttatgaacaggattgcgttttgaggtttatagcctgtctattgggtgtcgtgtttatttttatgcactctatgttgtgagtgctagtccatgcagttatgtggagcgagcccaacaacgataccagcctagcaagttggtctcgttgtacccccggaacaacgacaacgtgatggtggtggcgatgcgcaacgccgcggagccggcgtggcgacagcggcatcgtttcatggggaccccgatgccagtgacagaaggaggtggatacagggtcagggagaaaatgtcacttgctcctctctatctttttgagggattgattgataggagctttcgagggattaagaaaaaatgtaggacaaatggttgagaaaaaaaaagtatatgtttggtttgtaaccatagattgtggcaaaatctttcgcttgctgtgctagggtctactgcccaacaagtctgtca

SEQ ID NO: 38468 - DNA, 630 bp, Zea Mays
actaagccacggcgcgggcaatggactcaatgagcttcggcaatggcctgtgcagatacaggagaatggggagtacagtcccgcgtacagccccccgagagaggacatggcggcaggggaaggagcccacctcccaggagaggatatggcggtggccgtggtgaccatggctctgtcagcctcctggtccgcaacattccattgagatgcaggcctgaggaactacgtgtccctttcgaacggttcggccctgttcgggatgtttacctgccaagagattatcacactggggagcccatcgtccctcgtctcccacatgaggccggccggaggtcgagatcgaagaggcgccgggagcattctccactcccttgttgatgtggagtggatatgtggcggccggctcccgccgctgagggcggggacgcaggctccggcatcctgggcggccgaccggctgggatcctactgctgcggttttgcgccggaggtgaggaagggaaatgcagtgcatagacgatggcaatacataacggaaacccgaataaccgacggttttacccccatacaaagacggatacgggatgatatctccagccgccacgggtatgttaatgggcaagaacctac

SEQ ID NO: 38469 - DNA, 2767 bp, Zea Mays
aaatggattgtcaatgagatggtctcaaggtcatttttccagtatgaggagcaaagaaggatcgggtacaattccacaacatttttgaaggttcatgacctcatgcatgatgttgcactgtctgtttcgaaaaaggagtgtgtctgtataacagatgaattcatcacaaatatggagttgcttccaagtgctgcccgccacatacttattgaaacatcgatagagaaagaggtacatggttatttgtatggttctatgagggaaatgtctcgacccatccaaacattgatgtttgacaggtcttgtgatgatgtcgttgtgcaacatttatcaagaattagttctttgcgagtactttctatgccattatggtgtcatttgccaataaaactaaagcatcagtgccaccttaggttccttcatattacaaatagtagcatcaaagaacttccagatgacataaccatcctttataatcttcagacacttaaactttctggatgtttcaatcttattagacttcctaagagaatgaagcacatgagtgcccttcgtcatctgtacacagatgggtgcacgaggttggagtgcatgcctccagagcttggacaaatcacttcgcttcgaacaattacatggttcgtagtgggaagtggcttgagttgtagtagtcttgcggagctaaaggatttaaatattggtggttcgttaaagctaaagcaactcgaaaatgtgccagcggggagaagaaatgcagaagcagccaaccttgtgaataagaaggaactgagacaactgacactagagtggacaagtggtaaggcggaggaaaagcagtgtcatgaggtgctagagagccttgaagctcatgatggactgctggctcttgaaatatattcctaccaaggcaccagctttccatcttggatgggtatgttgaaaaacatactcgagcttcggttgtctgattgtagtaaagcagagcagcttccaccactgtgtcagctagcagaattgcaactccttcatttggaaggattgggaaatttgcggttcctgtgtagcaggtgtacatccttgacatttggaaagcttaaggatcttaagatagttggtcttgacgtttttgaaggattttgtgagacggtggatggaggtgcagtagcatttcctaagcttgagatattgcacattgagcgctgtggaaatctagcagctctaccaaaagcatcggtgctgggagaagcatattgcggtagagattatacagtggcccgctcagcatttccagaactgaagtggctcacattggaagatttgtgtagctttgagagatgggaggctgcccttgaaattgaagaaggacatgcgttattccctgtggttgaggttgttgttatcaggaaatgtccaaagttaacaactctacttagggcgccaaaggtcaaagaactaagtatacatgaagaaaacgaacatatctctgtaggagggattagatgtatgacgtcattgtccactttgcatttgatcggcgtcaagccggatggtatggagaggtgggaccatccgtcatctgtggtagatatgaaactgtggaggtgcaatttgttcttccaagttccaaccacgtgcactgccactatgggtttgctttgggcagctgcaagatctgtcagttacaggatgcaaagagcttgtctactggccagagaaagtattccaaagcttgatttcattgcggatgctatgcattaggtattgcaacaatctaattggatacgcagtggcaaatggtcctgaccaggcaacttcaggaaggaaccagcttttgccccatctagagtctctagagatagacacgtgtgaaagtctggtagaggtattcaacctctcccctgctctcaagaggatggaagttgaaggatgttgtaagcttgagtccctatatggaaagcaagagttggatgaagaggctagtagaagcgatgacatgacggcatctgcacctgttgaggagaagttgtcaccttcggtggccccagataagccccttccatcatctctagaatatctatcaatatgggattgccacgggttgtcagaggttgtcaatcttccttcgtctctgagggtaataaatattaaacgttgctccagactacgagccatgtcagggcagctgggtgcactcaagagcttactaattgtcaactgcccggagttgcgatcactagaaacatgcatcgtagatctcccatcactggaaatcctctttctgtctgtatggttgtgaaagcttggtatccttgcccagggcgcgggcaggaggaccacaagaatactcatctcttcgtgaacttacaattaggaggtgcccaggtgtaaaatggctgccttcagctctgcagcagcgactggacaacggcctcatggataaaacggatctagatttccgtctttgtcaaggggcattgggcaagcaacagacgaagcagaacatcatagcagaacgaatcgagaacagccgaacatcataaaaatttaagcataaaaatcttatctagtaaactagttaagctcaaatttgaacggtctacgtattcccaagaaagcgggtgatcttatatctagaagtagggacgtatgatccgatacgcctctatccaaagcctgtacagagacaagtgggttggttgtcatgagaaccctatctagcttctcatgggagctatcttacaaatttgaaaggagcttgtcgcacttt

SEQ ID NO: 38470 - DNA, 2639 bp, Zea Mays
aaagccctcccagtggtggtggagccgcagctagcacctagatagctagccatggcggccacgccgtcgccgttgccgcggtgggcgccgacgccgagcccctcgcggccgctatggcgctggggcgctcgccatcatcagcctggcggcggcggcggcgcgggcaccagctggtggtctcgtattgcgagcggcgtcttcgcgtggggtggccgcgggcgtcaccgtggcgcggcgccgtcggacgaagcagcagcagcggtcgccggacgacgatcggggtgcgagctgcaggtggtggtgccatcgtcggcgccagcggccgtggctgcggaggacgccgccggcgacggcgacccccgggcgttcctgacgtgggaggacgtgcgcgtgacggtggccggcggcccgcgcggggcgccggacgtgaggatcctggacgggatcaccgggcacgcgcgccccggtgaggtgctggccatcatgggcccgtccggcggcggcaagacgacgctgctggacaccctcgcaggaaggttaggacccggcatgaataaaacaggtctgattttgatcaatggccggcaggagaagcttgcctatggaacctcggcatacgtgacccaagacaacgtgctgatgtcgacgctgtcggtgcgggaggccgtgtactactcagcgcagctgcagctgcccgacacgacgccggcggcggagaagcgggcgcacgcggagcgggtgatccgggagatggggctcgcggacgccatggacacgcgcatcggcggccgcgtcaccaagggcatcagcggcgggcagcggaagcggctcagcatctgcatcgagatgctgacgcggccgcgcctgctcttcctggacgagcccaccagcggcctcgacagcgccgcgtcctaccacgtcatgagccacatcgcgcgcgtcgccgcccgcgacggcatgaccgtcgtagccgccgtgcaccagcccagcggcgacgtcttggagctcttccacggcctatgcctgctcgcagccggaaggacggtgttcttcgggaccatctctgacgccaccgagctcgatcgatcgttcctccttgcatatatatatatgcatgcagttcttctctctgaacggcttcccatgcccacgcctgagaagcccgtcagaccacttcctcagaacaatcaacaaagactttgacgaggaaaccgtggtggagagctctgacaaagctaaaaggaaaacagcagctgatgaggcaatagaaatcctggcgactgcatacagatcatccatttacttggacaaaaccacagaccaaattgtcgaaatgaaaagcatggtaataaacctgagttttatttacctggatagagctgtgcatggtaattgtggaaatgaaattccctactggctgcaggatggagcttcatttcggcggagagaacacgcaagctttggcaccaagctccttgtgctgacgaggagatcgttcctgaacatgcacagggacgtagggtactactggatgcgtctggccatctacatgggcattggcgtgtgcctaggcactatcttctaccaacttggctacagcacctacagctctatccagagtcgatgtgaagtaatcatgtacaccatcgcactcctaactttcatgtccatcggaggatttccatccttcgtagaagacgtcaaggtgttcagaaaggagaggctgagcggccactacggcgtgtcggagttcgtcatctccaacaccatctccgccactccgtacctgtccgtcgtttccctactgcccggcgcgatgctgtactacctcacgggcctgtccaaaggcgccgaccacttcgtctacttcgtcatggtgctctgcgtctgctgcctcctggtcgagagcatgatgatggtcatcgccgccgtcgtcccggacttcctgatggggatcatcgtcggcgccggggtgcagggggtcatgatgctcaacggcggcttcttccgcctccccaacgagctgcccaagcccgtctggaagtacccctgctactacctgtccttccacaagtacgccgtgcaggggctctacaagaacgagttcgtggggctgtcgttcccgagcgaccagctcgtcgactccaatgtcaccgtcagtggcctccaggtcctcgagtacaagctgcaggtggagatggggtactccaagtgggtcaaccttgccatcctctgcgggatgatgctggtgtacaggatgattttcttcgctatcgtcaagatctccgaggaagttcggcagaaaaggggtggcaaaagaggatgtgttagatagtacgtagccggctcttcttcatatatgtatgtgtgtatctctttcctctcccccattattcttccaaattgtataagctgctgacaccatgggtcggatagacaaccgaccacaattctccacctcaacgacaattaaactataagccaacagaagttcaatcttcaaactcttcatcttcaaatcagcatgtaacaatctcaccgcctccaaacctccactagggagctacctcgggcaagcacgaacacccaccaaactcaaacaatgctcgaacttggctcttgggaccaccttggttaac

SEQ ID NO: 38471 - DNA, 3433 bp, Zea Mays
gagtgtgttacatgataatatctatatccggatatatatcttgaggatacatatataacatgcaccagtgtgaggttagctagaccttgcctgtatataaacgcacgcgcacacacatggagacacaaggggtcttcctcatttttctcgtctgaaaaagaagagagcacaacaggcatccctcttctaacctcctgatgatggcactcaacggcggttggagaaagaccttcgtgtccatcctgacgacatgctttcttgtggtggttgtaattgtttccctatcctgcgaagcaaaaggcggcgtcgtccccaggttgcggccaccattctgctttccatacgatcgtgaatactgcacgccatttcactgcggcaaagtttgccaagagtacaacttccctgctaagaatggcggctactgcgataaacgtggtgacccatggaagtgctgctgtccatattgaaacgtacaaaatgcatgcatccatccgtgctgctacctgatcgatatacatgtcaatcatcatcaatatatataatgaatgaataaaatgcatgtgttggaaaatactgcagtgcaggagcttatgatcccacgatctcgcgtccgagactcaatagatttgttgggcctaatcaatatcattgcccagatcgcacttgcatgtgtagatttgttaggccaaggcccaaatttttcggatctttatctcaacttgcacagacgacctttagatattactaatttaagaatttggactgttaaaaaccggttagtctctatttcaaacttgatcagatttgtagaaaagattgtcaacttctgtacgtgacaccaaataaatatactatgaaaacatgtttcataataaatctgattatatatacctcagtgacaccagctgagctatgagcaaaaacaggccgtaatgacagaacagggaaaaggacgatacaccacctagcttatcacaaacctcaggcaagcttaagaaaatgcttggtgtcagggtcgaggccgatcaccaagataccgtacctacaaaacaaaccaagtaaaattcagcatcccaaacaaacgcacagagacatacagtagtagtttactgttccccagcatcgacacctcagaactgcggccaaaagccgaacaccgtcatgatccatgaaccgttaatggcccagcacgtacgtcaacaatagatagggggtgcatgaactgacctccactgagacccacggcaggacaagtgttatcatcagctcaccgtgtgcttgctaacctcacctcacaggccaaagcaaagcagcctttagttttctatccatccatccactgcccggtggacgctgcttttgatacctcacctttttatttttatttggctcctcttggaccagcgttagtgtgtggtggtggtgagaccaaatcatgtgagactcagactgggtggtgcttgtcgctcataacgttcatctgcatctccgttggccaccgctggccaggtcccagatgatcacctcggcgttccttatcaccaccatatgcttttgggagaatcggttggctcgtcggcatgcaggcatccacatctcggctaagaaaactggctggctcatcggcttgtgctggtctccatcaccaattcaccatgcgatgaaaaccatgttcagattgttgatgtttaggctgattgacagctgctgattctgcacatatgcataaaacaaaccctttcagtaaaaaaatacattttttcagtaaaactgatactgccatacttgcacatgaaaatatgaaatcaagcataaatactgtacacatttgttgaacttctgttgctcttaaactactaactcttgcattatggagagtcggaaagaacaaattcacgcatgtgagatgagaaaaggacctgacttaggtcatgcattccatggaataataaggtttcatcacgatgatgatgactgatcagtccctaaagtcagtactagtacatcctactaaagccagggaagcgaggacgacgagctcttggtaccggtcagaggctacagcagcaaccgacatatagacagattaaagaagcgcaaaagacaaacaagcaaacaaacagagcaatggcagcaggtcgattgggctctccattagtggaatatggagcagtgttcagtgcacaggggggcttccaaaagcaggatagatgccaagataacaagttgatgaggccgtccccgccacaatgtggactgcagcacaggttgcaggctggagttcatcaaggatttgaacctggaactggagcccacaagcacacagaggaggaagaacaccaagactggttcccaacctatccaaggtagaagcgagcaacgttagtgtggtagtaacatggtgactgtgagagaggagatgcgtaaggggccatggacagagcaggaggacattcagctggtatgcactgtccgcctgtttggtgaccatcgttgggacttcattgctcaagtctcaggtttgaggggttggagaactacaacttaggcctcaacaggacaggaaagagctgccgcctgcgctgggtgaactatcttcaccctggcctcaagcatggccgcatgtcaccacaagaagagcgcattatcattgagctccatgctcggtgggggaacaggtggtctaggatagcaaggaggctgccagggcgcacagacaatgagatcaagaactactggagaacacacatgagaaagaaggcacaggagaggaagatgggcatgccatcaccttcatcctcatcctcctcactgacataccaaacctgccttcttgacaccattccagtcattgggatgggcagtggtgacactcacaatggtagctgtgtcaccagcaccctcgagaacacacagagtgtcatggatggatatcccatggatcagatatggaaggagattgaggcaccacatgcacctaacttgctgagtattgctgaagggaaagagaagacgtgcagcagtagcccctgtcatctaccatcacctgtaatgtgggactacaaatgccctgagatattctggaagatgggagatcaagaaatcatgatgtgatggaaaatgaaatcaagatgttggctgcacgatttggttatgggcttatggtaaataaggccatcgctattgaaggctgaaggaatacatctatattggtcaggccactcagctatctgcctagcagatttgcagtatttgtacttcctaactatgcttgcattagtatgcagtatttttaaatctagtgtaacactggtggtatgctcataatgtatgtatctatgtagtttgaaaaatagtttgtatcagtttgtgcaatagtgtggacgctctatatgcatgatatatctatttatctctgttcttgttgtgctga

SEQ ID NO: 38472 - DNA, 1298 bp, Zea Mays
cacaatgtggactgcagcacaggttgcagagggaagagcttgtcctgttgcctataaaagagtggctaaagacagcaattcagcacaaagcataagacatagtggcttcttctccctatagctaccttcttcctatcaggctggagttcatcaaggatttgaacctggaactggagcccacaagcacacagaggaggaagaacaccaagactggttcccaacctatccaaggtagaagcgagcaacgttagtgtggtagtaacatggtgactgtgagagaggagatgcgtaaggggccatggacagagcaggaggacattcagctggtatgcactgtccgcctgtttggtgaccatcgttgggacttcattgctcaagtctcaggtttgaggggttggagaactacaacttaggcctcaacaggacaggaaagagctgccgcctgcgctgggtgaactatcttcaccctggcctcaagcatggccgcatgtcaccacaagaagagcgcattatcattgagctccatgctcggtgggggaacaggtggtctaggatagcaaggaggctgccagggcgcacagacaatgagatcaagaactactggagaacacacatgagaaagaaggcacaggagaggaagatgggcatgccatcaccttcatcctcatcctcctcactgacataccaaacctgccttcttgacaccattccagtcattgggatgggcagtggtgacactcacaatggtagctgtgtcaccagcaccctcgagaacacacagagtgtcatggatggatatcccatggatcagatatggaaggagattgaggcaccacatgcacctaacttgctgagtattgctgaagggaaagagaagacgtgcagcagtagcccctgtcatctaccatcacctgtaatgtgggactacaaatgccctgagatattctggaagatgggagatcaagaaatcatgatgtgatggaaaatgaaatcaagatgttggctgcacgatttggttatgggcttatggtaaataaggccatcgctattgaaggctgaaggaatacatctatattggtcaggccactcagctatctgcctagcagatttgcagtatttgtacttcctaactatgcttgcattagtatgcagtatttttaaatctagtgtaacactggtggtatgctcataatgtatgtatctatgtagtttgaaaaatagtttgtatcagtttgtgcaatagtgtggacgctctatatgcatgatatatctatttatctctgttcttgttgtgctga

SEQ ID NO: 38473 - DNA, 909 bp, Zea Mays
tgtggactgcagcacaggttgcaggcctcaacaggacaggaaagagctgccgcctgcgctgggtgaactatcttcaccctggcctcaagcatggccgcatgtcaccacaagaagagcgcattatcattgagctccatgctcggtgggggaacaggtggtctaggatagcaaggaggctgccagggcgcacagacaatgagatcaagaactactggagaacacacatgagaaagaaggcacaggagaggaagatgggcatgccatcaccttcatcctcatcctcctcactgacataccaaacctgccttcttgacaccattccagtcattgggatgggcagtggtgacactcacaatggtagctgtgtcaccagcaccctcgagaacacacagagtgtcatggatggatatcccatggatcagatatggaaggagattgaggcaccacatgcacctaacttgctgagtattgctgaagggaaagagaagacgtgcagcagtagcccctgtcatctaccatcacctgtaatgtgggactacaaatgccctgagatattctggaagatgggagatcaagaaatcatgatgtgatggaaaatgaaatcaagatgttggctgcacgatttggttatgggcttatggtaaataaggccatcgctattgaaggctgaaggaatacatctatattggtcaggccactcagctatctgcctagcagatttgcagtatttgtacttcctaactatgcttgcattagtatgcagtatttttaaatctagtgtaacactggtggtatgctcataatgtatgtatctatgtagtttgaaaaatagtttgtatcagtttgtgcaatagtgtggacgctctatatgcatgatatatctatttatctctgttcttgttgtgctga

SEQ ID NO: 38474 - DNA, 3829 bp, Zea Mays
aaacaatcccacaacattaaaatcctaatgccttcctaatcattgttcccgctttgcaactaacatttccatttcccgccacactctcccgcgcaggcgcagcaccccttcttctttccctccacttgccgctccagttgcagttggtcgaaaaaaaaagtggaaaggaaaggggcaaaatatcctagggttctgcctccatggacatcgagacccacgccgccgccctggcccgcgacgagctgcggcggctcctggccgccaccctcagccccgacaaggcgtcggttgacgctgccgcggcggggctcgacgcgctctcttccgacccacgcttccccctcgccatcctcgccgtcgctgcaggggacggtgatcaggggatgagagtcgctgcagcgacatactttgaaaaattttacccgccgcaatttggaaacccgtctgtgttcatctgaggtttacaaggagttccgtgaccaacttgcccaggctttgcttcgagtggagcctgcaattcttcgagtgctgattgaagttttccgccaagttgttgaaaaagattttgtcaaggataacttgtggcctgagcttatccctcagttgaaactagtgatccagagcagcaatctaattagtccaggccagcatcctgagtgcaatactattaatgcactcacagtacttcaatctgttgtaaggcccttccagtatttcttgaatccaaaagttgtgaaagagcctgttccacaacagttggagcaaattgcagcagagattcttgtaccattgcaagtgacattccatcacttctctgacaaggttcttttgtcacctgatgggactaacttggaatatgagcagctcctactcatcacatgcaaatgcatgtatttcactgtgaggtcatacatgccatctagggtgaaacaaattttgccttccttttgcaaagacatgttccgtatactagattctttgaactttaatagtcttattgaagatggatctaccatgaagctcaagattgcaaagagatgtctcattatattttgtgcacttgttacacgtcaccggaaacatacagataaccagatgccacatattgtcaactgtgcaatcaaaatatcaaaacaaagcatccatttaagtaaactcgactctctccccaatcggattgtttcattggcatttgatgtgatttctcgagttttggaaacaggaccgggatggcgactagtttcaccacatttttcttcacttcttgattcagcaatttttccagcattagcattgaatgagaaggatatagaagaatgggaggaggatactgatgagtatatgcaaaagaatcttccttctgaacttgatgacatttctggatggactgaggatttgttcactgccagaaaaagtgcaatcaatttacttggtgttatagcgctatcaaagttgcatctgcagcatcgaagcgtaagaaaggtgataaaaataaagggaaatctgaaatgagctcaattggggagttattggtcaccccattcctttcaaagtttcctataccttcccatggtgaagatgcatcatcagtagcagtgcggaattatttcggtgttttgatggcatatggaggcctccaagattttctgactgaaaagaaagatttgacaattacattgatcaggaaccggattctcccattatattctttggatccttgcagcccatatttgatttcaacggctaattgggttattggtcagcttgcgatatgcctaccagaggacatgagttctagtatttatgagtccttaatgaaggcgttgaccatggagtatgtggaggacataacttgttatccggtttgtgcctctgcttctggtgctattgcagaactcattgagaatagttatgttccacctgactggctcattcttctgcaagtggttctgaaaagaataagtactggagatgaaaatgagtctgctcttctgttcaagcttctgggcacaatagttgagggtggacaggaaaaagttctgtctcatattcctgaaattgtatccaacattgccagtactgtaatggagctcctaccccctgtcccagatccttggcctcaggttgttgaacagggtttcgcagccctcgtagcaatggtgcaagcttgggagagctctgcaccagatgaaaacaagacacctgaaaagaggttctggcagtcaggccagtctgcaattgcccaaacaatttcattactgttacaaaaagcttggttgttgcaagctgacaatatggagggctctgcattaccacctccgtcatgcgtaaacgatgcttctgtgctacttgagtttgtcatgagttctgtcacttgcatggaagaaacggcaaatctgaaggtctttgaactggtagctacatgggctgacgctattgccaactgggactcctgggaggagatggaggatcagggtgttttcaacacaattaaagaagctgtcaatttccaccagagatttgacctcgacggtctcttcctgaaaacgcttccgtcgcagtctgaaaatggttcacagagttcagtcatcggccgtgtctctaattttgtgactagggcaattgcagcttacccatccgcaacgtggagggcatgctcgtgcgtccatacactgctgcacgctccaaaattctcccttggagcacaagacactagaaagactatttccgaatcctttgcacaagcagcgttttcccgcttcaaatctgtatccgacagtcctgctgggctatggaaaccactgctgttggcgatatcctcgtgctacatctgctatcccgatgccatcgaacaagtcctgaacaacgttgatggtaacggttttgcgatctgggcgtctgcattggcacaagtctcaagcagcttgttcaatcctggcctgtcatctgaatccgagatcaagttagctgtgctgacgctatctactgtgatcaaccatctcgtgtccctttccacgggtggcaccaaatttgttgcaagactgctatgcatcactgatggagtcttgcattcagctgaaggaagttcaggacgatggggacaatgacgatgatgatgatggtgctgaagatgttgatgacaacgatgaagaggaagacaccgaagatgatgatgaggattcggacgacgacgacgatgcgagagaagaaacagaagaggaatttctggaaagatatgcactagcggcggctgcgggcgagtcagtcgaggaaggagacattgatgaagagacccaagacatcgaattgggctctctggatgacgtggacatacagcaggtggttattcccctgatgcagaaacttcctgctctgcagcccgccggagcgtttccggacagcctggttgaaagaattgcagaaacattcccggaatacgaacagtttttgcaagcccttcgacgagcttagagtataggaaacatgtgcagatttttctctttttgttatatgtttatatttttttgtgtcatttttggtttgcttctaccttgagcgttgttccgagatgtgtttctttttgtcagatatggtgtttattttcccttgatgtgggtggcaagatatgggtgatgatgtacgtacgatggttacaagtatgttgtgagcataattgttatggcaacactatcctccgttcggctattttgcctatttttgtttgtttttactctctcttttgccgtcgctccacttgatatatgtttgtttgtttgggtcaaaactaaggcctcctttggaacttagaaaaaaaatgaaggaattttat

SEQ ID NO: 38475 - DNA, 3737 bp, Zea Mays
caccccttcttctttccctccacttgccgctccagttgcagttggtcgaaaaaaaaagtggaaaggaaaggggcaaaatatcctagggttctgcctccatggacatcgagacccacgccgccgccctggcccgcgacgagctgcggcggctcctggccgccaccctcagccccgacaaggcgtcggttgacgctgccgcggcggggctcgacgcgctctcttccgacccacgcttccccctcgccatcctcgccgtcgctgcaggggacggtgatcaggggatgagagtcgctgcagcgacatactttgaaaaattttacccgccgcaatttggaaacccgtctgtgttcatctgaggtttacaaggagttccgtgaccaacttgcccaggctttgcttcgagtggagcctgcaattcttcgagtgctgattgaagttttccgccaagttgttgaaaaagattttgtcaaggataacttgtggcctgagcttatccctcagttgaaactagtgatccagagcagcaatctaattagtccaggccagcatcctgagtgcaatactattaatgcactcacagtacttcaatctgttgtaaggcccttccagtatttcttgaatccaaaagttgtgaaagagcctgttccacaacagttggagcaaattgcagcagagattcttgtaccattgcaagtgacattccatcacttctctgacaaggttcttttgtcacctgatgggactaacttggaatatgagcagctcctactcatcacatgcaaatgcatgtatttcactgtgaggtcatacatgccatctagggtgaaacaaattttgccttccttttgcaaagacatgttccgtatactagattctttgaactttaatagtcttattgaagatggatctaccatgaagctcaagattgcaaagagatgtctcattatattttgtgcacttgttacacgtcaccggaaacatacagataaccagatgccacatattgtcaactgtgcaatcaaaatatcaaaacaaagcatccatttaagtaaactcgactctctccccaatcggattgtttcattggcatttgatgtgatttctcgagttttggaaacaggaccgggatggcgactagtttcaccacatttttcttcacttcttgattcagcaatttttccagcattagcattgaatgagaaggatatagaagaatgggaggaggatactgatgagtatatgcaaaagaatcttccttctgaacttgatgacatttctggatggactgaggatttgttcactgccagaaaaagtgcaatcaatttacttggtgttatagcgctatcaaagggtccaccagttgcatctgcagcatcgaagcgtaagaaaggtgataaaaataaagggaaatctgaaatgagctcaattggggagttattggtcaccccattcctttcaaagtttcctataccttcccatggtgaagatgcatcatcagtagcagtgcggaattatttcggtgttttgatggcatatggaggcctccaagattttctgactgaaaagaaagatttgacaattacattgatcaggaaccggattctcccattatattctttggatccttgcagcccatatttgatttcaacggctaattgggttattggtcagcttgcgatatgcctaccagaggacatgagttctagtatttatgagtccttaatgaaggcgttgaccatggagtatgtggaggacataacttgttatccggtttgtgcctctgcttctggtgctattgcagaactcattgagaatagttatgttccacctgactggctcattcttctgcaagtggttctgaaaagaataagtactggagatgaaaatgagtctgctcttctgttcaagcttctgggcacaatagttgagggtggacaggaaaaagttctgtctcatattcctgaaattgtatccaacattgccagtactgtaatggagctcctaccccctgtcccagatccttggcctcaggttgttgaacagggtttcgcagccctcgtagcaatggtgcaagcttgggagagctctgcaccagatgaaaacaagacacctgaaaagaggttctggcagtcaggccagtctgcaattgcccaaacaatttcattactgttacaaaaagcttggttgttgcaagctgacaatatggagggctctgcattaccacctccgtcatgcgtaaacgatgcttctgtgctacttgagtttgtcatgagttctgtcacttgcatggaagaaacggcaaatctgaaggtctttgaactggtagctacatgggctgacgctattgccaactgggactcctgggaggagatggaggatcagggtgttttcaacacaattaaagaagctgtcaatttccaccagagatttgacctcgacggtctcttcctgaaaacgcttccgtcgcagtctgaaaatggttcacagagttcagtcatcggccgtgtctctaattttgtgactagggcaattgcagcttacccatccgcaacgtggagggcatgctcgtgcgtccatacactgctgcacgctccaaaattctcccttggagcacaagacactagaaagactatttccgaatcctttgcacaagcagcgttttcccgcttcaaatctgtatccgacagtcctgctgggctatggaaaccactgctgttggcgatatcctcgtgctacatctgctatcccgatgccatcgaacaagtcctgaacaacgttgatggtaacggttttgcgatctgggcgtctgcattggcacaagtctcaagcagcttgttcaatcctggcctgtcatctgaatccgagatcaagttagctgtgctgacgctatctactgtgatcaaccatctcgtgtccctttccacgggtggcaccaaatttgttgcaagactgctatgcatcactgatggagtcttgcattcagctgaaggaagttcaggacgatggggacaatgacgatgatgatgatggtgctgaagatgttgatgacaacgatgaagaggaagacaccgaagatgatgatgaggattcggacgacgacgacgatgcgagagaagaaacagaagaggaatttctggaaagatatgcactagcggcggctgcgggcgagtcagtcgaggaaggagacattgatgaagagacccaagacatcgaattgggctctctggatgacgtggacatacagcaggtggttattcccctgatgcagaaacttcctgctctgcagcccgccggagcgtttccggacagcctggttgaaagaattgcagaaacattcccggaatacgaacagtttttgcaagcccttcgacgagcttagagtataggaaacatgtgcagatttttctctttttgttatatgtttatatttttttgtgtcatttttggtttgcttctaccttgagcgttgttccgagatgtgtttctttttgtcagatatggtgtttattttcccttgatgtgggtggcaagatatgggtgatgatgtacgtacgatggttacaagtatgttgtgagcataattgttatggcaacactatcctccgttcggctattttgcctatttttgtttgtttttactctctcttttgccgtcgctccacttgatatatgtttgtttgtttgggtcaaaactaaggcctcctttggaacttagaaaaaaaatgaaggaattttat

SEQ ID NO: 38476 - DNA, 133 bp, Zea Mays
tggggagttattggtcaccccattcctttcaaagtttcctataccttcccatggtgaagatgcatcatcagtagcagtgcggaattatttcggtgttttgatggcatatggaggcctccaagattatccatct

SEQ ID NO: 38477 - DNA, 1532 bp, Zea Mays
caagacacctgaaaagaggttctggcagtcaggccagtctgcaattgcccaaacaatttcattactgttacaaaaagcttggttgttgcaagctgacaatatgggctctgcattaccacctccgtcatgcgtaaacgatgcttctgtgctacttgagtttgtcatgagttctgtcacttgcatggaagaaacggcaaatctgaaggtctttgaactggtagctacatgggctgacgctattgccaactgggactcctgggaggagatggaggatcagggtgttttcaacacaattaaagaagctgtcaatttccaccagagatttgacctcgacggtctcttcctgaaaacgcttccgtcgcagtctgaaaatggttcacagagttcagtcatcggccgtgtctctaattttgtgactagggcaattgcagcttacccatccgcaacgtggagggcatgctcgtgcgtccatacactgctgcacgctccaaaattctcccttggagcacaagacactagaaagactatttccgaatcctttgcacaagcagcgttttcccgcttcaaatctgtatccgacagtcctgctgggctatggaaaccactgctgttggcgatatcctcgtgctacatctgctatcccgatgccatcgaacaagtcctgaacaacgttgatggtaacggttttgcgatctgggcgtctgcattggcacaagtctcaagcagcttgttcaatcctggcctgtcatctgaatccgagatcaagttagctgtgctgacgctatctactgtgatcaaccatctcgtgtccctttccacgggtggcaccaaatttgttgcaagactgctatgcatcactgatggagtcttgcattcagctgaaggaagttcaggacgatggggacaatgacgatgatgatgatggtgctgaagatgttgatgacaacgatgaagaggaagacaccgaagatgatgatgaggattcggacgacgacgacgatgcgagagaagaaacagaagaggaatttctggaaagatatgcactagcggcggctgcgggcgagtcagtcgaggaaggagacattgatgaagagacccaagacatcgaattgggctctctggatgacgtggacatacagcaggtggttattcccctgatgcagaaacttcctgctctgcagcccgccggagcgtttccggacagcctggttgaaagaattgcagaaacattcccggaatacgaacagtttttgcaagcccttcgacgagcttagagtataggaaacatagatatggtgtttattttcccttgatgtgggtggcaagatatgggtgatgatgtacgtacgatggttacaagtatgttgtgagcataattgttatggcaacactatcctccgttcggctattttgcctatttttgtttgtttttactctctcttttgccgtcgctccacttgatatatgtttgtttgtttgggtcaaaactaaggcctcctttggaacttagaaaaaaaatgaaggaattttat

SEQ ID NO: 38478 - DNA, 391 bp, Zea Mays
cccgttaccaacaaaattccgagcttatctcgatattctcgccaacaaacatagtaagaaactcgaaaccataatctgttctgcgcttgagcggaccgtccggcccacaggcgcggaccgtcaggaccacggaccgtccggcctcagggccagaccgttcgtgctatttttagtgctcaacagcttgaaaaattacctcaacggatacaaaaccgcagtatacaaaaagaatacaatcaaacattatttgaatgaaggtggaggcaagtataatatataaggagacgaatcaatcttgaagaagcaggagcactgcgtggagaaagtgacagatcgaacttggaggtttcaaacgaagaacatgtacgggttatcccgcacggtgagggtg

SEQ ID NO: 38479 - DNA, 859 bp, Zea Mays
cgacgtccgcgcccggaagccgcgccaggagatcgacgccctgcccctgcagcgccccgcgccgctgcatcctgcagctcgccccatcccctgacttgtcgagtcttgggccatcgcggcactctcatcttgcatcgtcgccttattgctgttctggtggagaagaaaggaactctagtgcatcacacaccttgtgcttgacgaaatgtttgaatcagaatttatcatcgcatccgcagtttggtttaatcatggtgagactcgttgttccttctccattcattccccactcagcacctatagcttgaagctgttattgtgtgtctggtgctgagtgccgactgccgttggtctgtaactctgtatgagttaagtggtgccaaaaagtggtcgttttttccttcctttgatctgtacagagatccatggtagccgccggggtgctggtaacgttgaggtcatctttcctgagtctcatgtggttggtggagcccctgcatcctctgttgctgacagcatcgagcctgtgtcgacatcgttggccgctgcagattcttcgacacttgctgagaaggacattgcagcgctgtctcctgagcttcgtgcacaagcaactgatccgaagagcaggcaaggtcacaggaccctggatggaagtttgggaggtggccagacactgtcacactgcaaaggactttgttcagtgtattttctgtttgaagattcttccttctagaattaaaagatttaaacagcacctgtagatcggtcctgtgcatttttattgtgatctagctagctatctgtaaatgatctagttgtgaatgatgttataattatgatgcttttgtgaatatat

SEQ ID NO: 38480 - DNA, 421 bp, Zea Mays
cttattgctgttctggtggagaagaaaggaactctagtgcatcacacaccttgtgcttgacgaaatgtttgaatcagaatttatcatcgcatccgcagtttggtttaatcatgattcttcgacacttgctgagaaggacattgcagcgctgtctcctgagcttcgtgcacaagcaactgatccgaagagcaggcaaggtcacaggaccctggatggaagtttgggaggtggccagacactgtcacactgcaaaggactttgttcagtgtattttctgtttgaagattcttccttctagaattaaaagatttaaacagcacctgtagatcggtcctgtgcatttttattgtgatctagctagctatctgtaaatgatctagttgtgaatgatgttataattatgatgcttttgtgaatatat

SEQ ID NO: 38481 - DNA, 1005 bp, Zea Mays
tctctctctcccacccgcctcctctctcctccccctcgctcctctctccgacgcgcagccgagcagacagtgccgaccgcgcgaccccgtggccgcgacaccgacgcgccagcgccctgccatgcgcgcctgcagccacccggagaccgatcgagctccctgcacccatcgagcccgctcgacgtccgcgcctggaagccgcgccaggagcccgctcgacgtccgcgcccggaagccgcgccaggagcccgctcgacgtccgtgccaggaagccacccggagccgcgccaggaaaccacccggagcccgctcgacgtccgcgcccggaagccgcgccaggagatcgacgccctgcccctgcagcgccccgcgccgctgcatcctgcagctcgccccatcccctgacttgtcgtgtcttgggccgtcgcggcactctcatcttgcatcgtcgccttattgctgttctggtggagaagaaaggaactctagtgcatcacacaccttgtgcttgacgaaatgtttgaatcagaatttatcatcgcatccgcagtttggtttaatcatgagatccatggtagccgccggggtgctggtaacgttgaggtcatctttcctgagtctcatgtggttggtggagcccctgcatcctctgttgctgacagcatcgagcctgtgtcgacatcgttggccgctgcagattcttcgacacttgctgagaaggacattgcagcgctgtctcctgagcttcgtgcacaagcaactgatccgaagagcaggcaaggtcacaggaccctggatggaagtttgggaggtggccagacactgtcacactgcaaaggactttgttcagtgtattttctgtttgaagattcttccttctagaattaaaagatttaaacagcacctgtagatcggtcctgtgcatttttattgtgatctagctagctatctgtaaatgatctagttgtgaatgatgttataattatgatgcttttgtgaatatat

SEQ ID NO: 38482 - DNA, 872 bp, Zea Mays
ctctctctcccacccgcctcctctctcctccccctcgctcctctctccgacgcgcagccgagcagacagtgccgaccgcgcgaccccgtggccgcgacaccgacgcgccagcgccctgccatgcgcgcctgcagccacccggagaccgatcgagctccctgcacccatcgagcccgctcgacgtccgcgcctggaagccgcgccaggagcccgctcgacgtccgcgcccggaagccgcgccaggagcccgctcgacgtccgtgccaggaagccacccggagccgcgccaggaaaccacccggagcccgctcgacgtccgcgcccggaagccgcgccaggagatcgacgccctgcccctgcagcgccccgcgccgctgcatcctgcagctcgccccatcccctgacttgtcgtgtcttgggccgtcgcggcactctcatcttgcatcgtcgccttattgctgttctggtggagaagaaaggaactctagtgcatcacacaccttgtgcttgacgaaatgtttgaatcagaatttatcatcgcatccgcagtttggtttaatcatgattcttcgacacttgctgagaaggacattgcagcgctgtctcctgagcttcgtgcacaagcaactgatccgaagagcaggcaaggtcacaggaccctggatggaagtttgggaggtggccagacactgtcacactgcaaaggactttgttcagtgtattttctgtttgaagattcttccttctagaattaaaagatttaaacagcacctgtagatcggtcctgtgcatttttattgtgatctagctagctatctgtaaatgatctagttgtgaatgatgttataattatgatgcttttgtgaatatat

SEQ ID NO: 38483 - DNA, 761 bp, Zea Mays
ctcgacgtccgtgccaggaagccacccggagccgcgccaggaaaccacccggagcccgctcgacgtccgcgcccggaagccgcgccaggagatcgacgccctgcccctgcagcgccccgcgccgctgcatcctgcagctcgccccatcccctgacttgtcgtgtcttgggccgtcgcggcactctcatcttgcatcgtcgccttattgctgttctgttgggaggtggagaagaaaggaactctagtgcatcacacaccttgtgcttgacgaaatgtttgaatcagaatttatcatcgcatccgcagtttggtttaatcatgagatccatggtagccgccggggtgctggtaacgttgaggtcatctttcctgagtctcatgtggttggtggagcccctgcatcctctgttgctgacagcatcgagcctgtgtcgacatcgttggccgctgcagattcttcgacacttgctgagaaggacattgcagcgctgtctcctgagcttcgtgcacaagcaactgatccgaagagcaggcaaggtcacaggaccctggatggaagtttgggaggtggccagacactgtcacactgcaaaggactttgttcagtgtattttctgtttgaagattcttccttctagaattaaaagatttaaacagcacctgtagatcggtcctgtgcatttttattgtgatctagctagctatctgtaaatgatctagttgtgaatgatgttataattatgatgcttttgtgaatatat

SEQ ID NO: 38484 - DNA, 566 bp, Zea Mays
ctcgacgtccgcgcccggaagccgcgccaggagatcgacgccctgcccctgcagcgccccgcgccgctgcatcctgcagctcgccccatcccctgacttgtcgtgtcttgggccgtcgcggcactctcatcttgcatcgtcgccttattgctgttctggtgtggagaagaaaggaactctagtgcatcacacaccttgtgcttgacgaaatgtttgaatcagaatttatcatcgcatccgcagtttggtttaatcatgattcttcgacacttgctgagaaggacattgcagcgctgtctcctgagcttcgtgcacaagcaactgatccgaagagcaggcaaggtcacaggaccctggatggaagtttgggaggtggccagacactgtcacactgcaaaggactttgttcagtgtattttctgtttgaagattcttccttctagaattaaaagatttaaacagcacctgtagatcggtcctgtgcatttttattgtgatctagctagctatctgtaaatgatctagttgtgaatgatgttataattatgatgcttttgtgaatatat

SEQ ID NO: 38485 - DNA, 3576 bp, Zea Mays
cggtggtcgatggctgaggttaaggtcatgcgggctcgtgctgatggaccggaagcggtgaagggcgagtgctgggtcttgactgatggatcagagcagccaggtgaccaaccgcagtggctgatgcgcctgggacacgcacttgtgcaaggatgtggtggagtggaccgtgttgtcggcgtggtcgaggactggcgggacacacgtctgatcgtggaggacgtgcacgaggtgcggtgctcacggcaggtttgctacggcggcggtggccacgaaacgatggaattaggtgcttctgtttccatgtctatcctggaaaagctcgtccagagctgttcctttccagattcatggcgggggccgccagacgctgaggtccaggctctcataggatatctcgaagagctacggtcctccgtcctggatctttccaaggaggatgaggacgaggatgactctgctacgtcgtcgtccacgctgaagatgagcctgacgagccagttgcaggaactttgttatgatgctgaggactatctggagatggcgcagcactcccgtggtggctgctcctggcagatcagttgggtccggagcaaggcgacgaggcagcgccccgctctaatcagcgcaaaagatctctccggcctcatctcccgtgtgaatccggcgaaagaaatagcccaagcgtacatcaagtctgctagttcaagaaccaccaccaaagagaatggccctaggccacaagaagagcctgcaaaaagcagtagtcgccgtgccgtctattctgatgatactctacagcctgacagccatgacgagcagctagtcaggttgctggctttggaaagtgatcagcagctcaagacggtggcaatccttggcctgcctggcgttgggaagacaacacttgccagaagactgtaccactgctatgaagggaggttccattgcggggctttccttcgggcgtcccgtaacctgcaggataccaccaggcttctcgccaccatgctatccaagattaagggccaacaagggtgccgctactgggggggctccggtgatgagcaagatctaatcgacagcatcaggcaacatctacaaggaaaatcatatttcattgtgatcgatgatttatgggctacatcagtgtgggatttcttgagccgtgcttttcccaaggataactgtggcagccgaatagtaataactactcaagttacagaagttgcatttgcttgctgtaacaaccacacagttgatatattcaatatgaaacctctggacgacgatcagtcactgcaattgttttacagtcgagtaaagcatataaatggttataatgctgaagaatgcaaggccatatcacatggaatcgtcagcaattgtggtaatctttcaccgctagctatcataaatatagctggcatgttagcaggctgggcggatttcaatatgaatgactgggagtacgtaagcaagtgttgtacatcaacagcaaatcttactaccgaggaggcgacggagagatttctgaaccttatgtacaacaagcttccagccaaattgaagacgtgcctgctctatctcagtatgtatccagagggctgtgtcatcggaaaggatgatttggtgagacaatgggcagctgaaggtattttcagtcaagtggtggaaccaaaaggtagagaacatgaagtgggttttatttattttgatgagctcctgaaaagaggattgatccagcctgtagatacagactacaatgatcaagtgttgtcatgtatagttcatcaagtggtactggaatttattacaaagaaatcaatgcaggaaaacttcatcactgtcgtggattatcgtgaaacagggacagtgcttgatgataataaggttcatcgactgtctgccaggtttgaaggtgccaaaagtgcacagataccgcggagcttcagagtacgccaagttcggtcctttatgttttctggattcattaaatctttaccttcccttctcaagtattgccttgtccgagttctgattcttcatgtttggagtgatgatcaaggcaagactgtggttctagacctttctccagttggtaatatgcttcatgtaaggtacctgaaggtggtaagcaacatgatagtcaaactcccactcattattcgaggcctgcgacacttagagacactcgaggtggatgcagaagaagtcgctgttccactggatgttttcatcttgaagagcctgttgcatctccgacttccgagcaaggcttatcagcctgattcagatattcaaaggattgatttaacaaatacatttcctttaagatttctgcccttcgtcagagcgttgtcaatgctagggcggtttctcctctcccatggccatcggattcgccatttgacatcacttcaaagtcttggctactttgacctaagcacttgctccagatatactgtgtggcaacttggcaagctgaccaatttgagggatcttcatctaacctgctctgcagttcgttccaggcatcgaattagcaacatccaatgccttgcctctgttctggggaaatgcaccagcctcgaatctctaactatccgtggcgaagcatcttcaaaccagagcatttcttttgatggcttaagcagcttgtcttctccaccgtacaacctcgtgagctttgtgctgtccccgaggattttcaaaatggcgaagctcccaaagtggattgggcaactcagcaggctcagtacgctaaagattgctgttggcgagctgtcaagtgaagatgttgacatcctcaaaggactctctgccctcactgctctttctctctacgttcggagaaaccctaagaaaggaagctggatcctattcagtaagggcttcgcagtgctcaagtattttaagttcacttgcactgcactgtgcgtgaaatttagtgaacaagctatgcctgctgtccaaaggctgattgtgtgcttcaatgctaacacaatgcagcagtacaggccggaagatgcaggaatttggtacctgtcaggccttcaagttatctctgccagaataggagctgccggtattgatcaagccagcagagaagccgcgaaatctaggttgctggacgccattcttagcaaccatccaaagcctcctcctatcagaaacgtgcaaatggtggactgggttattcatggcgacacagaggagtgttcaaccggtgtgatgatacgtaaagatgaaagcagccgtgagcatactaggtcatttttaagtcagttcccgttcagaagacgacccctgcttccctccatattcacaaggcgtggccaggatgatgagcaacataaaatcgaagaaaatgatgtgctacaagatagtattatcttaaggaaatcctcttcgctaatgcaaaaaccaggactcccctaccgctacaacggtgctccctaccgctgctacagtggtagcggccgatggtggggtataggggaaggatttagggggaaccgttgtacagggtggagatataggggggaagagaacactgacgtgacacgtgaatga

SEQ ID NO: 38486 - DNA, 3454 bp, Zea Mays
ctgagtttgggcctcaaaactcggcggtggcggtggcgattcgatccgcagtcacttccccacccggcgaccagaaactcccgcaccggctgctgatggagtcttgacaagtgattcttgtcgatcggccagctacggcggcggtggccacgaaacgatggaattaggtgcttctgtttccatgtctatcctggaaaagctcgtccagagctgttcctttccagattcatggcgggggccgccagacgctgaggtccaggctctcataggatatctcgaagagctacggtcctccgtcctggatctttccaaggaggatgaggacgaggatgactctgctacgtcgtcgtccacgctgaagatgagcctgacgagccagttgcaggaactttgttatgatgctgaggactatctggagatggcgcagcactcccgtggtggctgctcctggcagatcagttgggtccggagcaaggcgacgaggcagcgccccgctctaatcagcgcaaaagatctctccggcctcatctcccgtgtgaatccggcgaaagaaatagcccaagcgtacatcaagtctgctagttcaagaaccaccaccaaagagaatggccctaggccacaagaagagcctgcaaaaagcagtagtcgccgtgccgtctattctgatgatactctacagcctgacagccatgacgagcagctagtcaggttgctggctttggaaagtgatcagcagctcaagacggtggcaatccttggcctgcctggcgttgggaagacaacacttgccagaagactgtaccactgctatgaagggaggttccattgcggggctttccttcgggcgtcccgtaacctgcaggataccaccaggcttctcgccaccatgctatccaagattaagggccaacaagggtgccgctactgggggggctccggtgatgagcaagatctaatcgacagcatcaggcaacatctacaaggaaaatcatatttcattgtgatcgatgatttatgggctacatcagtgtgggatttcttgagccgtgcttttcccaaggataactgtggcagccgaatagtaataactactcaagttacagaagttgcatttgcttgctgtaacaaccacacagttgatatattcaatatgaaacctctggacgacgatcagtcactgcaattgttttacagtcgagtaaagcatataaatggttataatgctgaagaatgcaaggccatatcacatggaatcgtcagcaattgtggtaatctttcaccgctagctatcataaatatagctggcatgttagcaggctgggcggatttcaatatgaatgactgggagtacgtaagcaagtgttgtacatcaacagcaaatcttactaccgaggaggcgacggagagatttctgaaccttatgtacaacaagcttccagccaaattgaagacgtgcctgctctatctcagtatgtatccagagggctgtgtcatcggaaaggatgatttggtgagacaatgggcagctgaaggtattttcagtcaagtggtggaaccaaaaggtagagaacatgaagtgggttttatttattttgatgagctcctgaaaagaggattgatccagcctgtagatacagactacaatgatcaagtgttgtcatgtatagttcatcaagtggtactggaatttattacaaagaaatcaatgcaggaaaacttcatcactgtcgtggattatcgtgaaacagggacagtgcttgatgataataaggttcatcgactgtctgccaggtttgaaggtgccaaaagtgcacagataccgcggagcttcagagtacgccaagttcggtcctttatgttttctggattcattaaatctttaccttcccttctcaagtattgccttgtccgagttctgattcttcatgtttggagtgatgatcaaggcaagactgtggttctagacctttctccagttggtaatatgcttcatgtaaggtacctgaaggtggtaagcaacatgatagtcaaactcccactcattattcgaggcctgcgacacttagagacactcgaggtggatgcagaagaagtcgctgttccactggatgttttcatcttgaagagcctgttgcatctccgacttccgagcaaggcttatcagcctgattcagatattcaaaggattgatttaacaaatacatttcctttaagatttctgcccttcgtcagagcgttgtcaatgctagggcggtttctcctctcccatggccatcggattcgccatttgacatcacttcaaagtcttggctactttgacctaagcacttgctccagatatactgtgtggcaacttggcaagctgaccaatttgagggatcttcatctaacctgctctgcagttcgttccaggcatcgaattagcaacatccaatgccttgcctctgttctggggaaatgcaccagcctcgaatctctaactatccgtggcgaagcatcttcaaaccagagcatttcttttgatggcttaagcagcttgtcttctccaccgtacaacctcgtgagctttgtgctgtccccgaggattttcaaaatggcgaagctcccaaagtggattgggcaactcagcaggctcagtacgctaaagattgctgttggcgagctgtcaagtgaagatgttgacatcctcaaaggactctctgccctcactgctctttctctctacgttcggagaaaccctaagaaaggaagctggatcctattcagtaagggcttcgcagtgctcaagtattttaagttcacttgcactgcactgtgcgtgaaatttagtgaacaagctatgcctgctgtccaaaggctgattgtgtgcttcaatgctaacacaatgcagcagtacaggccggaagatgcaggaatttggtacctgtcaggccttcaagttatctctgccagaataggagctgccggtattgatcaagccagcagagaagccgcgaaatctaggttgctggacgccattcttagcaaccatccaaagcctcctcctatcagaaacgtgcaaatggtggactgggttattcatggcgacacagaggagtgttcaaccggtgtgatgatacgtaaagatgaaagcagccgtgagcatactaggtcatttttaagtcagttcccgttcagaagacgacccctgcttccctccatattcacaaggcgtggccaggatgatgagcaacataaaatcgaagaaaatgatgtgctacaagatagtattatcttaaggaaatcctcttcgctaatgcaaaaaccaggactcccctaccgctacaacggtgctccctaccgctgctacagtggtagcggccgatggtggggtataggggaaggatttagggggaaccgttgtacagggtggagatataggggggaagagaacactgacgtgacacgtgaatga

SEQ ID NO: 38487 - DNA, 3140 bp, Zea Mays
cgacgatttctctctatataaacggatcggagaagcgtcatgcatgtcaccgtgacttgcaaagcagctagcatagggaacatcgagagagagatgagggtagcgatggtgggttccggcctaagcgggctagtggcggcgcatgagctagcgagaagtggcggcgtgcgtgtcaccgtgtacgagaaggaggaccatctcggcggcgccaagaccgttgccgtggacggcggagcagaagaaggccgtgtcctcgtcgacctcggccccgtggtcttcaacccggtgacaagcccaaacttgatggaatggtttgaaaggctaggggtggagatgtgcacatcagacatgtcattctcagcaagtatgcggctaaacaaaagtagtgaaagcttcgaatggggtagccgcagtggtatgtctggtgttctggcgcagaagagcaatttgcttagccccagattctggctcgtggtccatgagatattcaagttcaagaatcacgccctcaagtacctggaggaccacagaagtggtcctaaccgcaatgaaactttggggcaattcattctatcacatagatattcgcagctcttccaggatgcctaccttattccaatgtgtgcatgcatttggcccagtccgtcacacgaaatcctgggcttccctgctctctttgttctttcatttttccgcgacaatcagctacttgagattttgagtggctcaaaatggcttacggtcaaaggtggctcggggtcctacgtgaacaagataagggaagaattggagagtaatggttgtcagatcaagattggctgtgaagtcaactctatttcaaagtcgaacgatggataccaaattttagaggttgatggttcggtggagacgtacgataggatcataataggtattaatgcacatgatgcactaaaagtattaggagctgaagcaacaaatgaggaactgaagaatctaggagctttccattttatccggagtatcgcgtacctccactctgatgaaagtctgatgccgcgtaattcctctgcatggagcgctaggaacttcttggggacaacaagcagtggtgtctgtgttacctcctggctaaatatacttgagaacattgaatctgccgggcctctacttgtgacacttaaccctcctcgtgttcccaatcatgtattgcttaaatgtcatattagccatccaattccttccattgctgctgcaaaggctaatcttcagctcaacagcattcaaggaaagaggggcatctggttctgtggctcatatcaaggctatggataccatgaggacagtgttaaggctgggaaagcagcagctttaggattgcttggaaggaaatgtgaccttttgtctaacccaaaaccgatggtctcatcgtggacagaggcgggcgcacgtcttcttgtagcaagaagcctagaccaatacataaccattggtaacttctgtatactcgaagaaggaggcactacattcagttttggtaaagcatgcgaaaaatgtcatgtaaaatctgcgatacgcgttcacgatccccagttctattggaaggctgcaacagaaggagaccttggctttgcatctgcctacatcaatggccaaatctcatttgttgatcaccgaaaaggccttgtgaaccttgtacggatcatactggctaatagaggtgagttcaagaggttgagcagcactgctagtggcaatacaaggaaagcctggtggtcgccgttgcttggaattactggagtctcatttgcaaaatactttttgcgtcatgccttgcggaagaatagtgtatccaaagctcgtaaaaatatatctgaacactacgatctgagtaatgatttcttcgctctttatctggatccatcaatgacgtactcttctggcatttttaaggtggcggaggagagcttagaaacagcccaactacgcaaacttgacagtctcattaacaaggctaaggtggagccagggcaccatgttcttgacattggttgtggttggggcactttagcaatacggttggtgaagcaaaccggttgcaagtacacaggaatcacattatctgaggagcaactgaaatacgcgaagagaaaggtgaaagaatctgggttagaggaccgcataactttgctcctttgcgattaccgtcaactaccggcaggcgataagtttgacaggattataagctgtgaaatgattgaacatgttgggcatgagtacatggatgatttcttcgggtgctgcgagtatcatttggcagagcatggcctacttgtcctccagtccatcgcgctcccagaagaattgtatgacaaaatgaggatgcggcccgagtttctcaagacatatatcttccccggtggctgcctaccttctctaggccggattgtgtctgccatgtctaatgcatcaaggctcaacattcagcaccttgagaatattggggaccactactacactaccctaatgaactggagggacaacttcgtggccaacagagagtaaatacaatatataccaccacaaactcaagctaacgcctcatctatatataaaagcttctgcgcttggatttgacgacaaattcatccgtacctgggagtattatttaagttacgctgcggctttgttcaaatcacgcacagctatagattaccagatagtgtttgctcggccaggcgattcaaagctaccaagctatgttgccattgcataaaataaatggataggatcgagatgatgctgtgttatgcgtgtgtgtgtgtgagagagagaaatttattcagtcatgtacgtgcatgtgtgttggagagcagcagcaggccagctgctgcatgctgtgtggcttggatagatgcatgcgtgtggtatatagtactactagaagtctgcatgcatatgtctgctagcggtgctttcatttgcactcgagtcgctccacgtaagaggtgaaataatagtggttaaggcatctgatcgagtgcttggcaaaaacatgatgttaagttgacaacttgtaataatattacttaaatatgtagagaattgttcttttaaataaaaaagaagaggcgctaatgtgaagagtgatgttgagcacc

SEQ ID NO: 38488 - DNA, 2974 bp, Zea Mays
cgacgatttctctctatataaacggatcggagaagcgtcatgcatgtcaccgtgacttgcaaagcagctagcatagggaacatcgagagagagatgagggtagcgatggtgggttccggcctaagcgggctagtggcggcgcatgagctagcgagaagtggcggcgtgcgtgtcaccgtgtacgagaaggaggaccatctcggcggcgccaagaccgttgccgtggacggcggagcagaagaaggccgtgtcctcgtcgacctcggccccgtggtcttcaacccggtgacaagcccaaacttgatggaatggtttgaaaggctaggggtggagatgtgcacatcagacatgtcattctcagcaagtatgcggctaaacaaaagtagtgaaagcttcgaatggggtagccgcagtggtatgtctggtgttctggcgcagaagagcaatttgcttagccccagattctggctcgtggtccatgagatattcaagttcaagaatcacgccctcaagtacctggaggaccacagaagtggtcctaaccgcaatgaaactttggggcaattcattctatcacatagatattcgcagctcttccaggatgcctaccttattccaatgtgtgcatgcatttggcccagtccgtcacacgaaatcctgggcttccctgctctctttgttctttcatttttccgcgacaatcagctacttgagattttgagtggctcaaaatggcttacggtcaaaggtggctcggggtcctacgtgaacaagataagggaagaattggagagtaatggttgtcagatcaagattggctgtgaagtcaactctatttcaaagtcgaacgatggataccaaattttagaggttgatggttcggtggagacgtacgataggatcataataggtattaatgcacatgatgcactaaaagtattaggagctgaagcaacaaatgaggaactgaagaatctaggagctttccattttatccggagtatcgcgtacctccactctgatgaaagtctgatgccgcgtaattcctctgcatggagcgctaggaacttcttggggacaacaagcagtggtgtctgtgttacctcctggctaaatatacttgagaacattgaatctgccgggcctctacttgtgacacttaaccctcctcgtgttcccaatcatgtattgcttaaatgtcatattagccatccaattccttccattgctgctgcaaaggctaatcttcagctcaacagcattcaaggaaagaggggcatctggttctgtggctcatatcaaggctatggataccatgaggacagtgttaaggctgggaaagcagcagctttaggattgcttggaaggaaatgtgaccttttgtctaacccaaaaccgatggtctcatcgtggacagaggcgggcgcacgtcttcttgtagcaagaagcctagaccaatacataaccattggtaacttctgtatactcgaagaaggaggcactacattcagttttggtaaagcatgcgaaaaatgtcatgtaaaatctgcgatacgcgttcacgatccccagttctattggaaggctgcaacagaaggagaccttggctttgcatctgcctacatcaatggccaaatctcatttgttgatcaccgaaaaggccttgtgaaccttgtacggatcatactggctaatagaggtgagttcaagaggttgagcagcactgctagtggcaatacaaggaaagcctggtggtcgccgttgcttggaattactggagtctcatttgcaaaatactttttgcgtcatgccttgcggaagaatagtgtatccaaagctcgtaaaaatatatctgaacactacgatctgagtaatgatttcttcgctctttatctggatccatcaatgacgtactcttctggcatttttaaggtggcggaggagagcttagaaacagcccaactacgcaaacttgacagtctcattaacaaggctaaggtggagccagggcaccatgttcttgacattggttgtggttggggcactttagcaatacggttggtgaagcaaaccggttgcaagtacacaggaatcacattatctgaggagcaactgaaatacgcgaagagaaaggtgaaagaatctgggttagaggaccgcataactttgctcctttgcgattaccgtcaactaccggcaggcgataagtttgacaggattataagctgtgaaatgattgaacatgttgggcatgagtacatggatgatttcttcgggtgctgcgagtatcatttggcagagcatggcctacttgtcctccagtccatcgcgctcccagaagaattgtatgacaaaatgaggatgcggcccgagtttctcaagacatatatcttccccggtggctgcctaccttctctaggccggattgtgtctgccatgtctaatgcatcaaggctcaacattcagcaccttgagaatattggggaccactactacactaccctaatgaactggagggacaacttcgtggccaacagagaaaaagcttctgcgcttggatttgacgacaaattcatccgtacctgggagtattatttaagttacgctgcggctttgttcaaatcacgcacagctatagattaccagatagtgtttgctcggccaggcgattcaaagctaccaagctatgttgccattgcataaaataaagctgtgtggcttggatagatgcatgcgtgtggtatatagtactactagaagtctgcatgcatatgtctgctagcggtgctttcatttgcactcgagtcgctccacgtaagaggtgaaataatagtggttaaggcatctgatcgagtgcttggcaaaaacatgatgttaagttgacaacttgtaataatattacttaaatatgtagagaattgttcttttaaataaaaaagaagaggcgctaatgtgaagagtgatgttgagcacc

SEQ ID NO: 38489 - DNA, 2962 bp, Zea Mays
cgacgatttctctctatataaacggatcggagaagcgtcatgcatgtcaccgtgacttgcaaagcagctagcatagggaacatcgagagagagatgagggtagcgatggtgggttccggcctaagcgggctagtggcggcgcatgagctagcgagaagtggcggcgtgcgtgtcaccgtgtacgagaaggaggaccatctcggcggcgccaagaccgttgccgtggacggcggagcagaagaaggccgtgtcctcgtcgacctcggccccgtggtcttcaacccggtgacaagcccaaacttgatggaatggtttgaaaggctaggggtggagatgtgcacatcagacatgtcattctcagcaagtatgcggctaaacaaaagtagtgaaagcttcgaatggggtagccgcagtggtatgtctggtgttctggcgcagaagagcaatttgcttagccccagattctggctcgtggtccatgagatattcaagttcaagaatcacgccctcaagtacctggaggaccacagaagtggtcctaaccgcaatgaaactttggggcaattcattctatcacatagatattcgcagctcttccaggatgcctaccttattccaatgtgtgcatgcatttggcccagtccgtcacacgaaatcctgggcttccctgctctctttgttctttcatttttccgcgacaatcagctacttgagattttgagtggctcaaaatggcttacggtcaaaggtggctcggggtcctacgtgaacaagataagggaagaattggagagtaatggttgtcagatcaagattggctgtgaagtcaactctatttcaaagtcgaacgatggataccaaattttagaggttgatggttcggtggagacgtacgataggatcataataggtattaatgcacatgatgcactaaaagtattaggagctgaagcaacaaatgaggaactgaagaatctaggagctttccattttatccggagtatcgcgtacctccactctgatgaaagtctgatgccgcgtaattcctctgcatggagcgctaggaacttcttggggacaacaagcagtggtgtctgtgttacctcctggctaaatatacttgagaacattgaatctgccgggcctctacttgtgacacttaaccctcctcgtgttcccaatcatgtattgcttaaatgtcatattagccatccaattccttccattgctgctgcaaaggctaatcttcagctcaacagcattcaaggaaagaggggcatctggttctgtggctcatatcaaggctatggataccatgaggacagtgttaaggctgggaaagcagcagctttaggattgcttggaaggaaatgtgaccttttgtctaacccaaaaccgatggtctcatcgtggacagaggcgggcgcacgtcttcttgtagcaagaagcctagaccaatacataaccattggtaacttctgtatactcgaagaaggaggcactacattcagttttggtaaagcatgcgaaaaatgtcatgtaaaatctgcgatacgcgttcacgatccccagttctattggaaggctgcaacagaaggagaccttggctttgcatctgcctacatcaatggccaaatctcatttgttgatcaccgaaaaggccttgtgaaccttgtacggatcatactggctaatagaggtgagttcaagaggttgagcagcactgctaggaaagcctggtggtcgccgttgcttggaattactggagtctcatttgcaaaatactttttgcgtcatgccttgcggaagaatagtgtatccaaagctcgtaaaaatatatctgaacactacgatctgagtaatgatttcttcgctctttatctggatccatcaatgacgtactcttctggcatttttaaggtggcggaggagagcttagaaacagcccaactacgcaaacttgacagtctcattaacaaggctaaggtggagccagggcaccatgttcttgacattggttgtggttggggcactttagcaatacggttggtgaagcaaaccggttgcaagtacacaggaatcacattatctgaggagcaactgaaatacgcgaagagaaaggtgaaagaatctgggttagaggaccgcataactttgctcctttgcgattaccgtcaactaccggcaggcgataagtttgacaggattataagctgtgaaatgattgaacatgttgggcatgagtacatggatgatttcttcgggtgctgcgagtatcatttggcagagcatggcctacttgtcctccagtccatcgcgctcccagaagaattgtatgacaaaatgaggatgcggcccgagtttctcaagacatatatcttccccggtggctgcctaccttctctaggccggattgtgtctgccatgtctaatgcatcaaggctcaacattcagcaccttgagaatattggggaccactactacactaccctaatgaactggagggacaacttcgtggccaacagagaaaaagcttctgcgcttggatttgacgacaaattcatccgtacctgggagtattatttaagttacgctgcggctttgttcaaatcacgcacagctatagattaccagatagtgtttgctcggccaggcgattcaaagctaccaagctatgttgccattgcataaaataaagctgtgtggcttggatagatgcatgcgtgtggtatatagtactactagaagtctgcatgcatatgtctgctagcggtgctttcatttgcactcgagtcgctccacgtaagaggtgaaataatagtggttaaggcatctgatcgagtgcttggcaaaaacatgatgttaagttgacaacttgtaataatattacttaaatatgtagagaattgttcttttaaataaaaaagaagaggcgctaatgtgaagagtgatgttgagcacc

SEQ ID NO: 38490 - DNA, 3057 bp, Zea Mays
gcgtcatgcatgtcaccgtgacttgcaaagcagctagcatagggaacatcgagagagagatgagggtagcgatggtgggttccggcctaagcgggctagtggcggcgcatgagctagcgagaagtggcggcgtgcgtgtcaccgtgtacgagaaggaggaccatctcggcggcgccaagaccgttgccgtggacggcggagcagaagaaggccgtgtcctcgtcgacctcggccccgtggtcttcaacccggtgacaagcccaaacttgatggaatggtttgaaaggctaggggtggagatgtgcacatcagacatgtcattctcagcaagtatgcggctaaacaaaagtagtgaaagcttcgaatggggtagccgcagtggtatgtctggtgttctggcgcagaagagcaatttgcttagccccagattctggctcgtggtccatgagatattcaagttcaagaatcacgccctcaagtacctggaggaccacagaagtggtcctaaccgcaatgaaactttggggcaattcattctatcacatagatattcgcagctcttccaggatgcctaccttattccaatgtgtgcatgcatttggcccagtccgtcacacgaaatcctgggcttccctgctctctttgttctttcatttttccgcgacaatcagctacttgagattttgagtggctcaaaatggcttacggtcaaaggtggctcggggtcctacgtgaacaagataagggaagaattggagagtaatggttgtcagatcaagattggctgtgaagtcaactctatttcaaagtcgaacgatgcaggataccaaattttagaggttgatggttcggtggagacgtacgataggatcataataggtattaatgcacatgatgcactaaaagtattaggagctgaagcaacaaatgaggaactgaagaatctaggagctttccattttatccggagtatcgcgtacctccactctgatgaaagtctgatgccgcgtaattcctctgcatggagcgctaggaacttcttggggacaacaagcagtggtgtctgtgttacctcctggctaaatatacttgagaacattgaatctgccgggcctctacttgtgacacttaaccctcctcgtgttcccaatcatgtattgcttaaatgtcatattagccatccaattccttccattgctgctgcaaaggctaatcttcagctcaacagcattcaaggaaagaggggcatctggttctgtggctcatatcaaggctatggataccatgaggacagtgttaaggctgggaaagcagcagctttaggattgcttggaaggaaatgtgaccttttgtctaacccaaaaccgatggtctcatcgtggacagaggcgggcgcacgtcttcttgtagcaagaagcctagaccaatacataaccattggtaacttctgtatactcgaagaaggaggcactacattcagttttggtaaagcatgcgaaaaatgtcatgtaaaatctgcgatacgcgttcacgatccccagttctattggaaggctgcaacagaaggagaccttggctttgcatctgcctacatcaatggccaaatctcatttgttgatcaccgaaaaggccttgtgaaccttgtacggatcatactggctaatagaggtgagttcaagaggttgagcagcactgctagtggcaatacaaggaaagcctggtggtcgccgttgcttggaattactggagtctcatttgcaaaatactttttgcgtcatgccttgcggaagaatagtgtatccaaagctcgtaaaaatatatctgaacactacgatctgagtaatgatttcttcgctctttatctggatccatcaatgacgtactcttctggcatttttaaggtggcggaggagagcttagaaacagcccaactacgcaaacttgacagtctcattaacaaggctaaggtggagccagggcaccatgttcttgacattggttgtggttggggcactttagcaatacggttggtgaagcaaaccggttgcaagtacacaggaatcacattatctgaggagcaactgaaatacgcgaagagaaaggtgaaagaatctgggttagaggaccgcataactttgctcctttgcgattaccgtcaactaccggcaggcgataagtttgacaggattataagctgtgaaatgattgaacatgttgggcatgagtacatggatgatttcttcgggtgctgcgagtatcatttggcagagcatggcctacttgtcctccagtccatcgcgctcccagaagaattgtatgacaaaatgaggatgcggcccgagtttctcaagacatatatcttccccggtggctgcctaccttctctaggccggattgtgtctgccatgtctaatgcatcaaggctcaacattcagcaccttgagaatattggggaccactactacactaccctaatgaactggagggacaacttcgtggccaacagagaaaaagcttctgcgcttggatttgacgacaaattcatccgtacctgggagtattatttaagttacgctgcggctttgttcaaatcacgcacagctatagattaccagatagtgtttgctcggccaggcgattcaaagctaccaagctatgttgccattgcataaaataaatggataggatcgagatgatgctgtgttatgcgtgtgtgtgtgtgagagagagaaatttattcagtcatgtacgtgcatgtgtgttggagagcagcagcaggccagctgctgcatgctgtgtggcttggatagatgcatgcgtgtggtatatagtactactagaagtctgcatgcatatgtctgctagcggtgctttcatttgcactcgagtcgctccacgtaagaggtgaaataatagtggttaaggcatctgatcgagtgcttggcaaaaacatgatgttaagttgacaacttgtaataatattacttaaatatgtagagaattgttcttttaaataaaaaagaagaggcgctaatgtgaagagtgatgttgagcacc

SEQ ID NO: 38491 - DNA, 3073 bp, Zea Mays
ctagcatagggaacatcgagagagagatgagggtagcgatggtgggttccggcctaagcgggctagtggcggcgcatgagctagcgagaagtggcggcgtgcgtgtcaccgtgtacgagaaggaggaccatctcggcggcgccaagaccgttgccgtggacggcggagcagaagaaggccgtgtcctcgtcgacctcggccccgtggtcttcaacccggtgacaagcccaaacttgatggaatggtttgaaaggctaggggtggagatgtgcacatcagacatgtcattctcagcaagtatgcggctaaacaaaagtagtgaaagcttcgaatggggtagccgcagtggtatgtctggtgttctggcgcagaagagcaatttgcttagccccagattctggctcgtggtccatgagatattcaagttcaagaatcacgccctcaagtacctggaggaccacagaagtggtcctaaccgcaatgaaactttggggcaattcattctatcacatagatattcgcagctcttccaggatgcctaccttattccaatgtgtgcatgcatttggcccagtccgtcacacgaaatcctgggcttccctgctctctttgttctttcatttttccgcgacaatcagctacttgagattttgagtggctcaaaatggcttacggtcaaaggtggctcggggtcctacgtgaacaagataagggaagaattggagagtaatggttgtcagatcaagattggctgtgaagtcaactctatttcaaagtcgaacgatggataccaaattttagaggttgatggttcggtggagacgtacgataggatcataataggtattaatgcacatgatgcactaaaagtattaggagctgaagcaacaaatgaggaactgaagaatctaggagctttccattttatccggagtatcgcgtacctccactctgatgaaagtctgatgccgcgtaattcctctgcatggagcgctaggaacttcttggggacaacaagcagtggtgtctgtgttacctcctggctaaatatacttgagaacattgaatctgccgggcctctacttgtgacacttaaccctcctcgtgttcccaatcatgtattgcttaaatgtcatattagccatccaattccttccattgctgctgcaaaggctaatcttcagctcaacagcattcaaggaaagaggggcatctggttctgtggctcatatcaaggctatggataccatgaggacagtgttaaggctgggaaagcagcagctttaggattgcttggaaggaaatgtgaccttttgtctaacccaaaaccgatggtctcatcgtggacagaggcgggcgcacgtcttcttgtagcaagaagcctagaccaatacataaccattggtaacttctgtatactcgaagaaggaggcactacattcagttttggtaaagcatgcgaaaaatgtcatgtaaaatctgcgatacgcgttcacgatccccagttctattggaaggctgcaacagaaggagaccttggctttgcatctgcctacatcaatggccaaatctcatttgttgatcaccgaaaaggccttgtgaaccttgtacggtggcaatacaaggaaagcctggtggtcgccgttgcttggaattactggagtctcatttgcaaaatactttttgcgtcatgccttgcggaagaatagtgtatccaaagctcgtaaaaatatatctgaacactacgatctgagtaatgatttcttcgctctttatctggatccatcaatgacgtactcttctggcatttttaaggtggcggaggagagcttagaaacagcccaactacgcaaacttgacagtctcattaacaaggctaaggtggagccagggcaccatgttcttgacattggttgtggttggggcactttagcaatacggttggtgaagcaaaccggttgcaagtacacaggaatcacattatctgaggagcaactgaaatacgcgaagagaaaggtgaaagaatctgggttagaggaccgcataactttgctcctttgcgattaccgtcaactaccggcaggcgataagtttgacaggattataagctgtgaaatgattgaacatgttgggcatgagtacatggatgatttcttcgggtgctgcgagtatcatttggcagagcatggcctacttgtcctccagtccatcgcgctcccagaagaattgtatgacaaaatgaggatgcggcccgagtttctcaagacatatatcttccccggtggctgcctaccttctctaggccggattgtgtctgccatgtctaatgcatcaaggctcaagtatgtgcttttcaatttgatgatatgatgaacaaaagccatccatgcatgcattcattcagcaccttctgtattgatgtgagtactctcactcctgtgcagcattcagcaccttgagaatattggggaccactactacactaccctaatgaactggagggacaacttcgtggccaacagagaaaaagcttctgcgcttggatttgacgacaaattcatccgtacctgggagtattatttaagttacgctgcggctttgttcaaatcacgcacagctatagattaccagatagtgtttgctcggccaggcgattcaaagctaccaagctatgttgccattgcataaaataaatggataggatcgagatgatgctgtgttatgcgtgtgtgtgtgtgagagagagaaatttattcagtcatgtacgtgcatgtgtgttggagagcagcagcaggccagctgctgcatgctgtgtggcttggatagatgcatgcgtgtggtatatagtactactagaagtctgcatgcatatgtctgctagcggtgctttcatttgcactcgagtcgctccacgtaagaggtgaaataatagtggttaaggcatctgatcgagtgcttggcaaaaacatgatgttaagttgacaacttgtaataatattacttaaatatgtagagaattgttcttttaaataaaaaagaagaggcgctaatgtgaagagtgatgttgagcacc

SEQ ID NO: 38492 - DNA, 3338 bp, Zea Mays
gagagatgagggtagcgatggtgggttccggcctaagcgggctagtggcggcgcatgagctagcgagaagtggcggcgtgcgtgtcaccgtgtacgagaaggaggaccatctcggcggcgccaagaccgttgccgtggacggcggagcagaagaaggccgtgtcctcgtcgacctcggccccgtggtcttcaacccggtgacaagcccaaacttgatggaatggtttgaaaggctaggggtggagatgtgcacatcagacatgtcattctcagcaagtatgcggctaaacaaaagtagtgaaagcttcgaatggggtagccgcagtggtatgtctggtgttctggcgcagaagagcaatttgcttagccccagattctggctcgtggtccatgagatattcaagttcaagaatcacgccctcaagtacctggaggaccacagaagtggtcctaaccgcaatgaaactttggggcaattcattctatcacatagatattcgcagctcttccaggatgcctaccttattccaatgtgtgcatgcatttggcccagtccgtcacacgaaatcctgggcttccctgctctctttgttctttcatttttccgcgacaatcagctacttgagattttgagtggctcaaaatggcttacggtcaaaggtggctcggggtcctacgtgaacaagataagggaagaattggagagtaatggttgtcagatcaagattggctgtgaagtcaactctatttcaaagtcgaacgatggataccaaattttagaggttgatggttcggtggagacgtacgataggatcataataggtattaatgcacatgatgcactaaaagtattaggagctgaagcaacaaatgaggaactgaagaatctaggagctttccattttatccggagtatcgcgtacctccactctgatgaaagtctgatgccgcgtaattcctctgcatggagcgctaggaacttcttggggacaacaagcagtggtgtctgtgttacctcctggctaaatatacttgagaacattgaatctgccgggcctctacttgtgacacttaaccctcctcgtgttcccaatcatgtattgcttaaatgtcatattagccatccaattccttccattgctgctgcaaaggctaatcttcagctcaacagcattcaaggaaagaggggcatctggttctgtggctcatatcaaggctatggataccatgaggacagtgttaaggctgggaaagcagcagctttaggattgcttggaaggaaatgtgaccttttgtctaacccaaaaccgatggtctcatcgtggacagaggcgggcgcacgtcttcttgtagcaagaagcctagaccaatacataaccattggtaacttctgtatactcgaagaaggaggcactacattcagttttggtaaagcatgcgaaaaatgtcatgtaaaatctgcgatacgcgttcacgatccccagttctattggaaggctgcaacagaaggagaccttggctttgcatctgcctacatcaatggccaaatctcatttgttgatcaccgaaaaggccttgtgaaccttgtacggatcatactggctaatagaggtgagttcaagaggttgagcagcactgctagtggcaatacaaggaaagcctggtggtcgccgttgcttggaattactggagtctcatttgcaaaatactttttgcgtcatgccttgcggaagaatagtgtatccaaagctcgtaaaaatatatctgaacactacgatctgagtaatgatttcttcgctctttatctggatccatcaatgacgtactcttctggcatttttaaggtggcggaggagagcttagaaacagcccaactacgcaaacttgacagtctcattaacaaggtaagaccgaggatcataaaatccatttgttgtaatttgctcaaatactattgcataataaataaccttacctagctaatctcgagacaaacctcactatgcattacctgattaattactaaaagcttaattgcatatagaaatcaagctagatgacctttcttttttatacgatgttgcaatgcaatgaatcatgcatatcgattgaactgaaggctaaggtggagccagggcaccatgttcttgacattggttgtggttggggcactttagcaatacggttggtgaagcaaaccggttgcaagtacacaggaatcacattatctgaggagcaactgaaatacgcgaagagaaaggtgaaagaatctgggttagaggtcagtggtgtaccttttttcttcgttgttgtagtgtgaaaaccaagatacaaccaccacttgtgtgctgtatttcacacacaaaaaaaaactgtatatattgttttatgtaggaccgcataactttgctcctttgcgattaccgtcaactaccggcaggcgataagtttgacaggattataagctgtgaaatgattgaacatgttgggcatgagtacatggatgatttcttcgggtgctgcgagtatcatttggcagagcatggcctacttgtcctccagtccatcgcgctcccagaagaattgtatgacaaaatgaggatgcggcccgagtttctcaagacatatatcttccccggtggctgcctaccttctctaggccggattgtgtctgccatgtctaatgcatcaaggctcaacattcagcaccttgagaatattggggaccactactacactaccctaatgaactggagggacaacttcgtggccaacagagagtaaatacaatatataccaccacaaactcaagctaacgcctcatctatatatgtaccaacatgcattactcagcactagacgattctcatggtttccttttgataatatatatattccgcgcagaaaagcttctgcgcttggatttgacgacaaattcatccgtacctgggagtattatttaagttacgctgcggctttgttcaaatcacgcacagctatagattaccagatagtgtttgctcggccaggcgattcaaagctaccaagctatgttgccattgcataaaataaagctgtgtggcttggatagatgcatgcgtgtggtatatagtactactagaagtctgcatgcatatgtctgctagcggtgctttcatttgcactcgagtcgctccacgtaagaggtgaaataatagtggttaaggcatctgatcgagtgcttggcaaaaacatgatgttaagttgacaacttgtaataatattacttaaatatgtagagaattgttcttttaaataaaaaagaagaggcgctaatgtgaagagtgatgttgagcacc

SEQ ID NO: 38493 - DNA, 2992 bp, Zea Mays
ggtagcgatggtgggttccggcctaagcgggctagtggcggcgcatgagctagcgagaagtggcggcgtgcgtgtcaccgtgtacgagaaggaggaccatctcggcggcgccaagaccgttgccgtggacggcggagcagaagaaggccgtgtcctcgtcgacctcggccccgtggtcttcaacccggtgacaagcccaaacttgatggaatggtttgaaaggctaggggtggagatgtgcacatcagacatgtcattctcagcaagtatgcggctaaacaaaagtagtgaaagcttcgaatggggtagccgcagtggtatgtctggtgttctggcgcagaagagcaatttgcttagccccagattctggctcgtggtccatgagatattcaagttcaagaatcacgccctcaagtacctggaggaccacagaagtggtcctaaccgcaatgaaactttggggcaattcattctatcacatagatattcgcagctcttccaggatgcctaccttattccaatgtgtgcatgcatttggcccagtccgtcacacgaaatcctgggcttccctgctctctttgttctttcatttttccgcgacaatcagctacttgagagattttgagtggctcaaaatggcttacggtcaaaggtggctcggggtcctacgtgaacaagataagggaagaattggagagtaatggttgtcagatcaagattggctgtgaagtcaactctatttcaaagtcgaacgatggataccaaattttagaggttgatggttcggtggagacgtacgataggatcataataggtattaatgcacatgatgcactaaaagtattaggagctgaagcaacaaatgaggaactgaagaatctaggagctttccattttatccggagtatcgcgtacctccactctgatgaaagtctgatgccgcgtaattcctctgcatggagcgctaggaacttcttggggacaacaagcagtggtgtctgtgttacctcctggctaaatatacttgagaacattgaatctgccgggcctctacttgtgacacttaaccctcctcgtgttcccaatcatgtattgcttaaatgtcatattagccatccaattccttccattgctgctgcaaaggctaatcttcagctcaacagcattcaaggaaagaggggcatctggttctgtggctcatatcaaggctatggataccatgaggacagtgttaaggctgggaaagcagcagctttaggattgcttggaaggaaatgtgaccttttgtctaacccaaaaccgatggtctcatcgtggacagaggcgggcgcacgtcttcttgtagcaagaagcctagaccaatacataaccattggtaacttctgtatactcgaagaaggaggcactacattcagttttggtaaagcatgcgaaaaatgtcatgtaaaatctgcgatacgcgttcacgatccccagttctattggaaggctgcaacagaaggagaccttggctttgcatctgcctacatcaatggccaaatctcatttgttgatcaccgaaaaggccttgtgaaccttgtacggatcatactggctaatagaggtgagttcaagaggttgagcagcactgctagtggcaatacaaggaaagcctggtggtcgccgttgcttggaattactggagtctcatttgcaaaatactttttgcgtcatgccttgcggaagaatagtgtatccaaagctcgtaaaaatatatctgaacactacgatctgagtaatgatttcttcgctctttatctggatccatcaatgacgtactcttctggcatttttaaggtggcggaggagagcttagaaacagcccaactacgcaaacttgacagtctcattaacaaggctaaggtggagccagggcaccatgttcttgacattggttgtggttggggcactttagcaatacggttggtgaagcaaaccggttgcaagtacacaggaatcacattatctgaggagcaactgaaatacgcgaagagaaaggtgaaagaatctgggttagaggaccgcataactttgctcctttgcgattaccgtcaactaccggcaggcgataagtttgacaggattataagctgtgaaatgattgaacatgttgggcatgagtacatggatgatttcttcgggtgctgcgagtatcatttggcagagcatggcctacttgtcctccagtccatcgcgctcccagaagaattgtatgacaaaatgaggatgcggcccgagtttctcaagacatatatcttccccggtggctgcctaccttctctaggccggattgtgtctgccatgtctaatgcatcaaggctcaacattcagcaccttgagaatattggggaccactactacactaccctaatgaactggagggacaacttcgtggccaacagagaaaaagcttctgcgcttggatttgacgacaaattcatccgtacctgggagtattatttaagttacgctgcggctttgttcaaatcacgcacagctatagattaccagatagtgtttgctcggccaggcgattcaaagctaccaagctatgttgccattgcataaaataaatggataggatcgagatgatgctgtgttatgcgtgtgtgtgtgtgagagagagaaatttattcagtcatgtacgtgcatgtgtgttggagagcagcagcaggccagctgctgcatgctgtgtggcttggatagatgcatgcgtgtggtatatagtactactagaagtctgcatgcatatgtctgctagcggtgctttcatttgcactcgagtcgctccacgtaagaggtgaaataatagtggttaaggcatctgatcgagtgcttggcaaaaacatgatgttaagttgacaacttgtaataatattacttaaatatgtagagaattgttcttttaaataaaaaagaagaggcgctaatgtgaagagtgatgttgagcacc

SEQ ID NO: 38494 - DNA, 1409 bp, Zea Mays
cgaaaatcccatcccaccgccccaccccaccggcagagacgcgatgcctccctccaaagccgtccacctcccctccctccttgcaccgcaccgcacaccccccctgcaccaacgccatttccatgcctggatagatcgtaggtctacgaggtagcatcgatggctctcccgtaggaagggtagagcctccgtgtggcggcctccagatcgcaactccggttcttcttcccacaccgcgcaggcgcatcgacggaccgagttttggcgaagagaacgcttggagcacctctatcccctccacgatggaggccaggtacacgacaaccgtgctaaggaacaacaccgatttgatgccattttggaggatctacgccctcgtggcatgcttggtggccggacttgccctcacatctatcccctctaggactccatgatggaggctgggtactcagcggagcggccatggcccgattcgccgctcgcgtgaccggggacgccgatgtactaagggtggttgtgggttgatctctggaacaccaacatcatgcccgcctcttctccgtccccgtcccccgcgtctaccatgctcctcgcccctcctaacgtcgtcctctccatctagcgccacaaccaatgcacgcctccgggctcacgccgcgccaagcccgtggggaggcggatctcgcccacaggccgcagatctccttccaaactaggaggcaacagcctggcaaggggcgaccttgcatggtaggcggcccctttccacaaaggacacaatttcacccccttccatatttggcggtcatggcatgcactacgcccccttcctcgccctcattccaaattcagccctcaactgtgcatgcacccacctcaatcgactgctattgtctgaatcggcagtgctattgttctggttggttggaacttgaggaggtgcgcagaggtggtggtgagttcgctattcatttttctgtagtaggtcaaagggccgctgtggctggatttcgaagtcgcatcactgaactactaggtgcacaagggcatttcctaaaatccgcgagatcagggtctcgtactgaccgtgttatcagcaagtcggatatcatggacaggaggcactgatgcttgtaacttcttgttgggaaatgtgattccactcaagtttggttatgtaggtgttgtaaatcacaaccaagaggcttaccatggtcttgctcattgttgggttgtttctcaattggctaaagagctaaatatgattgtgagtgaggcggtggtggtgcatacgcactggacgggacgaatggagcatcttccaaacaacgtttatggctaaaggaacttgcatctatggttgtctcctcagcgctcggtgctacaggaagagagaggtgaaggtcaag

SEQ ID NO: 38495 - DNA, 704 bp, Zea Mays
caccgccccaccccaccggcagagacgcgatgcctccctccaaagccgtccacctcccctccctccttgcaccgcaccgcacaccccccctgcaccaacgccatttccatgcctggatagatcgtaggtctacgaggtagcatcgatggctctcccgtaggaagggtagagcctccgtgtggcggcctccagatcgcaactccggttcttcttcccacaccgcggcgcatcgacggaccgagttttggcgaagagaacgcttggagcacctctatcccctccacgatggaggccagtgctattgttctggttggttggaacttgaggaggtgcgcagaggtggtggtgagttcgctattcatttttctgtagtaggtcaaagggccgctgtggctggatttcgaagtcgcatcactgaactactaggtgcacaagggcatttcctaaaatccgcgagatcagggtctcgtactgaccgtgttatcagcaagtcggatatcatggacaggaggcactgatgcttgtaacttcttgttgggaaatgtgattccactcaagtttggttatgtaggtgttgtaaatcacaaccaagaggcttaccatggtcttgctcattgttgggttgtttctcaattggctaaagagctaaatatgattttgaggacatatcctttgttccgtatagagaaactgtgtctttatag

SEQ ID NO: 38496 - DNA, 2271 bp, Zea Mays
atagaagttaaatgtgtatatacttattcattgtctgtataaagcgccatatgttcatgctctactgctagtctagcaactacataatgcaatagaagaggttaacgcttaacaatatattataataaaactagaacaagtgtaataatcacatgtgcccaggtcgatgaaatttgcagcaacctaaaggattgtctttattttctcatagaccaacaatggtgttacgaaaaatgtcttgagttgtaccgagacaatcaacaactaatatgaagtctactagcaaacaatgtcttaagctggcagataccagcttatcttttgtgcagttagcacaaataaaaaggtctgttgaaatattataactagtaagaaagcaaaatcatcagcagaagaaattgctaaagcatttagagtctatggaaaatgatgtcttggcaatatatctacctctcaagattcatgcatgcatctgagggctaaataggtgtaaacgtaggaacaaatctaaggcattccaggtcatctttgggccgggaacataaacgattggccaattatatcgtgggccgtcgaggtggctctgtgtgtgacagcctagttctttaatttagagaactaatttcaaaactgcgcgagcgtgcatgcatgcctgcatgcgcccatggagggaggtcgaggatcggagctcccagattagctcgcccacggccgaccagcgcgctccacccgacggtcaccatggagaacgcaccttaaaaacggccggccaccccccgcggtaccactgccctcgcgcgctccccgtccttcggtaggtgcattgcttcggtggtccaccatggcgcagcgagcggtggccacgatgacgactaataagcccctcctcctcctcgccctggcgtccgcgctccttggtgcggcgccggccgccgcgaacgcgcccggcggggcgttcagcaactgggtggcgatgaaccagcagagctacgcgctgtacgcgcagaagtccgtcggggacgggggcaaggagcccctggacaagaagctgtcggaggcggagaagaagaaggtcacgtacgtggtggaccccagcggcaagggcgactacaccaacatcaccgcggcgctggaggatatcccggtgagcaacaccaagcgcgtgatcctggatctcaagcccggcgctcagttccgcgagaagctgttcctgaacatcagcaagccgttcatcacgttccggtcggaccccaagaagcccgccgtcgtggtctggaacgacactgcggccacgaacggcaaggacggcaagccggtgggcacggtggggagcgccacgctggcggtggagtcggactacttcacggcgtacggcgtggtgttccggaacgacgcgccgctggccaagcccggcgccaagggcggccaggcggtggcggtgcggctgttcgggaccaagacgcagatctacaactgcaccatcgacggcggacaggacacgctgtacgaccacaagggcctgcactacttcaagggctgcctcatccggggcagcgtcgacttcatcttcggcttcggccgcagcttctacgaggactgccgcatcgagtcggtggtcaaggaggtggcggtgctgacggcgcagcagcgttccaagtccatcgagggcgccatcgacaccggcttctcgttcaagaactgcagcatcggcggcgtcaagggcggccagatctacctgggccgcgcctggggggactcctcccgggtcgtctactcgtacacgaagatgggggaggaggtggtccccgtgggctgggacggctggcagatcgccaagccggagagcagcggcatctactacggcgagttcaagtgctttggccccggcgctgacgccaagaagaagaagagggtggggtgggcgctggacctcaccgaggcgcaggccaagccattcgtcggcacacactacgtcctcggcgacacgtggatccagccaccgcccaagtagcgacgcatgccacacgatatatctatttgagtacgaagcaaaagcgagagacacgaatctctaatctctttactgatgagatgttttgcttatatatatatatagacgagctaatgaaagctcagggttttcattagtaccgggacatcccagccaggtatacctccatgcaggtaggcgtgcatccgatcgtgtacggttctgattcagacatattttagcgtaaaacgtgaaccaaactatcgtaaatgatattaaat

SEQ ID NO: 38497 - DNA, 1369 bp, Zea Mays
gaacacttgatttaatcaagaatatttataaattaaaatcgtatttttatttcctcctacactgatgtagtagtattacaatcgttgactttgatgtgacagcctacagcagctaacctaaccgtatcttcagaactgagattttgtaatggacatctatcacaatcaaacaacaagcccgcccatgcgatgcgagcaactcctcctcctcgctctctagcttgtctcttctttcatggatataaatccttcccgatcgagcagcatgcattgcaaacacagaaatcagcaagcagccagcagcatcagcagtttagacgactgacatcgatccgcaccgcatgacgatgctgccccgcggcgccgcggataaaatcatcagccacaccctggcaggcgcgatgctctcaggcctcggcatatggcacctcttcaaccacatgaggctcttggtctccctcgccccgacggccccgtcgtcctcatcgtcgcgcgtcgccgtcctcgcgccggcagcatggttcccggcgccacgggtgcgccgcctcgagcccatcgccatgctggccgcgggagcgtacgggctggccacccagatgctcgcctactcgccgatgccgttccgcgccgacggctccatcccgcctgagcgcctgccgaaccacgagcacgccatcatctacgcctcgctcctcgtctacgccggctccgccatatacctggacgacgacgacgaccgcgccgggccgcgccacgcggcgccggcgccaacgacgctctgcatgctcctcctggcggcgctcttcgcgcaggagctgttcgtgttccacgtccactcctccaccgacgaccacgccggcgtcgaggcccgcctgcactggttcctgcaggcctccgccgccgcgtgcctcgccgccgcgctgctcggcgccgcccgcctccccgcggacctccagctcgccgccggcctcgtccgctccgcgtcgctcgcgttccagggcctctggtgcgtcgtcatcggcgtcgcgtgggtccccgggatgcttcccgccggatgctacctcgacgggagcggcgtccacctgcgctgccgcggcgaggacagcctgcgccacgccattgctgtcgtcaacctgcagttcggatggtgcatggtcctcgtcgtcgggatttacgtgtacgtgtgcaaaaggtatccggctggagcttggtctcatggggaggtatacggacggctgccggaagcagaagctgcagacgaggacgacgacagccaccaccacgacatgaagacgccaaactgtggatttgatggaacagcttgcaaggcatttcataaggccccttactaaggatcaaatggaggcaa

SEQ ID NO: 38498 - DNA, 1166 bp, Zea Mays
ggtgatctgccgagctttttcgcaatttttctccctattgctataaaccttccgtcaccaacacgcttacatcgtcataaagttggcttgcaaatccggtctctctgcgaccaaaaaagagagcgggcgaggcgcggcggcggcggagtggctcgcgggtctcccctgcggcgccgggatggggctccccaggaggggcgcggcgggtggtagcgggttggtcccctcctctcccctctgcccggtcgcccgggcctgcagccattccctagatccagtagtctgcccggcggtgtccggctgtgtcagttcggcgttgtcagtgggtttggtttcaggcaaggattgcagcgagggggattgtgatcctgtggcagatcgtgtggagcagttcgcgcaggagaggatccccgcagctgagaagatgaaatggggacttgatgggtcactgggttctctgcaggacttcaatgcgccggattctctgcaggacttcattgtgcccggggatttgaaggcttgctgtgacttgtctcgtcggtatggggtgctcggcggcgtcctgacagcacagcagcctcggcttgctgtcccttccaaggtttgcagtgcagagcatttaggtttctcagatgttgtgttaagccaaaaatctattgagattgcatttcctaatcctgatacaatcctgaatcctttgcaaatcttagattcagctagagagacagcagccccaattttattaaatcaacagattgcatattctagtcctgatacatctctgagtgctttgcaaatcatagattcagttagggtgccagcagccccaaattcattaagtcagccactcgttgcagaatctcatgtgcctccacattcaaatattaatagtgcatctgtcatgccgtgcaatccagatttattcacctcttcgctgtcatgtagcatcccagatccctcaagcattaatatagatgaatttgttgcatctatctctaaagctcctgatgctccgctaattcgatcgcctcccagctctagcttagcttcaaacagtttggttgtggggtgttcatttcagcctgctgtggctgcgggtgtggatttgatggaacagcttgcaaggcatttcataaggccccttactaaggatcaaatggaggcaa

SEQ ID NO: 38499 - DNA, 9114 bp, Zea Mays
atggggctccccaggaggggcgcggcgggtggtagcgggttggtcccctcctctcccctctgcccggtcgcccgggcctgcagccattccctagatccagtagtctgcccggcggtgtccggctgtgtcagttcggcgttgtcagtgggtttggtttcaggcaaggattgcagcgagggggattgtgatcctgtggcagatcgtgtggagcagttcgcgcaggagaggatccccgcagctgagaagatgaaatggggacttgatgggtcactgggttctctgcaggacttcaatgcgccggattctctgcaggacttcattgtgcccggggatttgaaggcttgctgtgacttgtctcgtcggtatggggtgctcggcggttcgtcgccaagcgacagctctcgccgccctatccttaggccgtgcgacgaaaaggggaagtcaggtgtcttagcggtagaagaggatggctggtctgttgtgaagcctaagttctggtggcggaaaagttcaaattttcttggggatttcaagcagcaagatgtgatccgaggaaccgattttttcaagcaacagctcagaggtaaatgtttcaattgcctggcgtcagatcactttgcttacctctgttcggcacctgttcgctgctggcaatgcctacaagcaggtcataaggctaggtcatgtcctggcaatatctaccgtgggagatcccattcaattcgtgatctacctgggtcactcaagcattcaatccagaagggcagtaatttctcctcgagctaccagctgctgaagcctctacccggccctcttcaaatgggacatgaacggcagcctacacttcacacttcttctgtccagccaaacaagtcgtatctccaagctgtccagggaggccaagtcatggaagcgcgctaccccggtgaccctcgggcgcggcctgcaagagcagtctgtgccatctcggcgaccgggtcgatccgtcgtcgtagagatgagttaatcagtaaggcagtggtttgctcttttgatggaaacagtcatgaggtggatgtgctgtcagcaggggatatgctgagagaggcttttgatcttcaccacggtcagtatcaacttgtcaagcactttccagagcagttttttatcatcttctctgagtcaagaatcaagcaatgggcgctggataggaggtcggtctcctatcgtggtcgagtgttccactttggggactggtcagaggagagctatgccaggaagaccaactttgagttcagagtcaaggtcagggtggagggaattccggttcactgctggggagaagaggtggctgctagggctttaggtaagagctgtgctattcactatgtccaggagcgctcgaggcgtaaggagcgcacgagatcctttgatctttgggcttggtgttcggatccttgtgatatccccaaagaggtctcgctgtctgttgcagaacctgatagggagccccctcctcctggtgccccgctacctgtggttggggtttttcatgagttgccaactgatctaaaggaaggccatgtttacaccattcgaaaccacattgaagtcgtggaagacctctcattcattcgtggaagggatgctagagaaggtcccacttgccgtaggccacgcagagaatttgtgtggagctacggcgtgccggactctatcggagaaaaaagagagagatcagaggatcgcagaggcagggattttggtcatcgaggctgggatcatgatgatgatgaggactttcagcaggatagacgtcatggcactcgtaggcaccgcagtctttcgggctgggcgcgttcttcgcggtgccgtggcggtccggaggactgcttcagttcaagtggaaggcgcaggccggctaccccttttcgtcgtcgtgggctggttgggcgctggattccaaaggtgaaggtcagatcggtctcttttgctgatccactaatctctgctgtttggcccccaattggtgtggaagagctggaagatgaaattggtgctattcctgctggcgattcgatttcaggcgtcctgacagcacagcagcctcggcttgctgtcccttccaaggtttgcagtgcagagcatttaggtttctcagatgttgtgttaagccaaaaatctattgagattgcatttcctaatcctgatacaatcctgaatcctttgcaaatcttagattcagctagagagacagcagccccaattttattaaatcaacagattgcatattctagtcctgatacatctctgagtgctttgcaaatcatagattcagttagggtgccagcagccccaaattcattaagtcagccactcgttgcagaatctcatgtgcctccacattcaaatattaatagtgcatctgtcatgccgtgcaatccagatttattcacctcttcgctgtcatacttccacaggcttcaacatggtatcggagccgaggttctcggaggcgattgtggtggcgacgagtcggtgtacttcgaggagaaggaccggctgatccagcagcgtgcggcggagcgggtggaccagtgcgtcgagaagtgcgtggaggggtgcgccggctcgtcctgcgtgcatcgccaggggtgacgctgggccaaggtcagcacgtcgacgtccggctgggcggcgaggacgagcgcagcagcaggcgaaggaacccggcgcggagaaggcgaaggaggcggcggcggcgccgctgaagacgaccaagtccgtgcaggcggccaacggagagaggtctgcggtgagtgcggcaagaaaaaagggggcggctctgtaggtttggctgctgtctgggcacaaggcaaaggaggagaagaacaggcagcggaggagctgcaagaaagtgactggagcttctgctgattgagcagaatgggggaacaacaaggcattgaacaagtccttgggaagctggtggaactgcttacagcgaagaaagatgagactccatcttcaggcaaggagattgtatcgtatatggaacctgtccagaaaattgagctaatgccaaatgacattaaattggaaggcattagaaactacttgccgtggtcaagaagagcaatgttattactgaaggcaaagagacttgaaggttttgtcaccggagaatcaattgagcctgaagacaagtcgagcaatgactggaaaacatgggaggctataaactctctggtggctgcatggttgttgagctctttatctcctaccatagcaggctccgtggatactatcacaagtgcagctggaatatgggaggccttgtcgaaaatgtattcaggagctggtaatgtgatgctattagctgagactgaggacagaattagtactatgaagcagggggacctctccttaatggattatgttgcagctttgaagcggctgtgggctgatgtggatcattttgatcctattgagctaccacacactgaatgtgtagtgtggataaagaaatggatagaaaaaagaagggttcttcaattcttgagaggtttgaatccagattttgaggcaaggcgtgctagtatgtttcatcaatccagtcttccaagtctcgaagaagccatagctgcaatggcacaagaagatactagactgaagttgataaaaggtgatacttcatctccacctcctccagcttttgtgatgacaaggatacaagaaactagaacatgctataattgtggtgagcaaggtcatctgagtcgagattgccctcaacaacgaaggccttatcgtgggagaggaagaagcagtgatagacgtgctatgaggggaagtggaagccgtggaggaaggagcggaggttatagagctaatgttgctatacctgagggagatgaagatctaattacaattccagcttcagaactaaaagagttgagaaagttgaaggagaataagaatgactcaacgtctgatgatcaaggtgcagtgtcaacttcaactgataatttggacccaggtataaaaaaccatgctttaatttccatgagaaaatccaattcaagctggatattagattctggggcatctaaacatgtcactggcaggtcaagtgaatttgcatcatataagttatatccaagttcatataagaaaacggttcaaactgctgatggaacattccaacccatcagaggagttggcacagtaaaatgcacaccatctataaccttatcatcagtattatatgttccttcctttggagtcaatttagtttcaataagttctttggttgatcaattggactgtcaaatatttcttgatcgtgaaaattgtataattcaggaaaggaagactggaagaagacttggaactggggttcgtcataatggactctggtatcttgataagagaagaactgatgaagtagtatgtcgtgcactatctgcagtggccagtgaagaagaagcaaaggtaatgctcttacactgccgcctgggacatatatcttttgatgttatgagtagaatgtttccttatgaaatgagtaaggtgaacaaacaaagattagtctgtgatgcgtgtgaatttgggaaacatactagaacctcctatgtgactcgaggactacgaagtgaaagtcccttcatgcttgttcattcagatgtatggacatcccctattgtctcagtgagcggggtgaaatactttgtttcctttattgattgttattctcgtatgacctggttataccttatgaagcataaaaatgaagtgttagactgctttaaggatttctgtgcattagtaaagaaccagtataatactcatgtgaaaattatcagaagtgacaatggaacagagtatgtaaacacggaatttagatcttttctctctaaggaagggatattacatcagacgtcatgccccgatacacccccacagaatggagtagctgagaggaagaatcgacatctattagaggtggctcgctcacttatgtatacaatgaatgtgcctaagtttctatggagtgaggcagttatgactgctactcatttaattaatcgtatgccatcaaggatacttggcatgaaaactccatgtgaattgctctatggaaagaatgaattcattgtcccaccaaaggtttttggatgtacatgttttgttagagatcacagaccttcagtgggaaagttagaccctcgagctgttaaatgtatctttgttgggtactcctgtgggcagaaaggatataggtgttggaatccatctgaacgacggatgtttgtgagtttagatgtcacttttcgggaagctattcctttttatggagaaagatcagacctgagtgatctatttgctactcttgatactcctagtggagatggagttacatctgagggggagaatgagaatgaacaagatgatgtagacgagggacaaacaaagcatgaaggagtaataagcagtccagttcctcaggaaagaagagaggtaagtgatgaatcaattttacctcaagcccagaattctagaggagaaagtatacatgacagagtaatctcaaaagtgtatacaagacggaagtacatgactcgaacaaacacagaagacatggctcaatcaactcctatacaagaaagtggccaggaagaaattgaagaagctcgagctccagagattgaggttgaggacctgccatcagatgatatgcccattgcgttacgaaaggaaccaagaactggtgcaggagtccctcctcagaggtatggatttgatcacgacataagcaattatgtgtcttatacctcactatcttctgaatataatgtttttctggcatccttacaatctgtgactattccaaaagattggagggaagcaaaattggacccaaagtggaaagaggccatgcttgaagaactaactgctctagaaaaaaacaaaacttgggatcttgtgccttatccattgggtaagaaaatagttggttgcaaatggatatatacagtgaaacaaaatcctgatggaaaaatagaaagatacaaagctagattagttgcaaaaggatatagtcagacctatggaattgactatgatgagacattttccccggttgcaaaaatgagtactgtaagaacattaatctcttgtgcagctaattatgattggccgctatatcagttggatgttaagaatgcttttttacatggggatcttcaagaagaagtctacttggaggtcccaccgggatttgctactgatcagaccaaaggaaaagtattgaagctgaaaaaatcgttatatggtttaaaacaatcacctagagcttggtttgatcgactacgacgggctatgtgtaatatgggatataaacagtgcaatagtgatcacactgtgttttattatcattctggaggcagtgtcactattctggcagtatatgtggatgacatgatcatcacagggaatgatcctttgaatatctcccaactaaagaaaaatttaagcaaggaatttgaagttaaagacctaggacaactacgttattttctgggcattgagatagcaagatctcataagggaattatcctctcacagcgcaagtatgtattagatcttctacatgagacaggtatgcttggatgtcgtccagcttctagtcctattgagcaaaaatcataaaatatgtgcacaaaatggagatcctattgacaaagaaagatatcaaaggcttgtgggacggttaatttatttatgccacacaaggccagatataacttatgcagtaagtgttgtgagtaggtatatgcatgatccaaggagtggacatttagatgcagtctatagaattttgagatatttgaagagctgtccagggaagggactgtggttcaaaagaaattgtcatttagatgtggaaggttactgtgatgcagactgggcaagttgtctggatgacaggagatctacttcgggttactgtgtttttgttggaggaaatctcgtatcatggagaagcaaaaaacaatcagtagtatcccgctcaactgcagaagcagaattcagagctatgtcggtatgccttagtgaattgttgtgggaaaagaatttattatcagaattaaagcttatgaaaggtactctgaagcttcggtgtgataataagtcagcaattaatattgctaacaatcctgttcagcatgatcgaactaagcatgtggagatcgatcgcttctttattaaagaacgtctggatgatgggacacttaagctaatttctgtcccctctaatgaacaagtagctgattgttaacgaaaggattaggtgttaaagagtgtctattagcatgtagcaagatggggatgatagacattcatcactcatcttgagggggagtgttggtgtgtgtgtgtgttattagaagattttgtaaggacccaaatgcataaaatgccaataaaagagagagggggaggtgtgttcaggaagtctgaaccgacctcaacccatattctacagacttccacaggcttcaacaggatctgagtgatgtttttagatcttgtgtgggtcggtctggtgcagaatgttatctcgcatgtgtaatagtctgtgggtcacccaactacttttgatgactgctttgggtagcaggttgtgggattgtcagcagtgttttttcgtttggcttgctctgtcggtgtttcagtctgtcattatttcaggcgtgggatgcttgcttttcccaactagcaatgtgctgttgtcgctggttgtctggtcaggtcctgtcttgtgtggctctacttgggcatgtaggggaactacttttgattaatgaatgccaactgttgtattttgtcatggaatgtgagggggctaaatgacccagctaaaagggcaagtgtgaagcatttgattctctcttctggggcaactattgtctgtcttcaagaaacaaagataatgagctggaataataatcttctaaacgaaacactgggttacaagctagctgctcagacggttcatttaccatctcttggagcgtcaggtgggatcctaattgcatgtgatgaggatctgtttgacataactgctattccttatccatcagtatactcgatatctgtcagaatctgctcccgtatgagtgacgtggtgtgggacctcacaggggtttatggtcctcaacctgaaaatgaaaaaatgatttttctggcagagctgcgccatattcgtaatctgatgaagccggaatggctgattttaggtgattttaacatgataaggagagcaagggagaaaaacaaaggaataattaatagaagactgatgaggcagttcaaccacacaattgattaccttcagctgttagagcttgacctcaacggtaaattatacacatggtcaaatgaacaggacacccctacgatgtctaggattgacaggtttttagcgtctacggaatggcatgatttcttccctcaggctgatctgcaggccattgggtccatgacctcggatcattgccccttagttatgcaaggtaatgctgcctttagtttctataagggatttagatttgaagctttttggacaaaaattgatggattcaatgaggtaattcagcaagcttggacatccagtgttcgttcttccgatgccattcttcggctgcacgtgaagatgacccgcacggctaaagcgctattgatctggagacgaaagacagtaggcaattttaatgtgcaactagaaatcattcagaccgttcttgccctccttgagaaagcgcaggaatccaggcaactctccggggatgagctagagttcaggagaagtctaaaaatgaaaatcttagggctagtggcaatccaaaaggcaagagctagacagcattcaagacttacctggctgcgtctgggagatgcaaacacaaaatattttcacctcatggcaaatcatagaagaaggaaaaatttcatcagatcactggttcgcggtgataggctgctcaccagtcaggatgagaaactgcaggaggcccatcatcatttctctcaagttattggcagaaggggtactagtcaaagagctgttcg

SEQ ID NO: 38500 - DNA, 3607 bp, Zea Mays
cagcaacatttacagattagataaaacaagagtggctagaatgcaaccgcacagaagcccgagtttccgttcccagcaacccaggcaggcagacacaatgaaaaatgattgaaatactgcgagtgtggcaaacaaactagctagttccaattttgagcactgctactttacataagtaaatgaccaaacctatcaccaaaaaggaaattgtgtacacaaaatggaagaaaaaacacaggacgaaatacgcgagaaattccaggacacagcggcggtcacgcgttttctgacggctgacctgattgggagcacgccgctgccgttggagttgacgccccggcctggagccaccgtcatcgaggggggattgccgcgttcggcgccgctcgcggtgacggtcggcctcgcactcgctactggtggtggtggaagcctcgcactcgctatcgctagtcgctactgatggttccaagagcaaaggcccatgttgtttgggatccagtaggcccaatcaagccgttgactccgaggagagccgcttccgatgtcctcgcctcttgccgacaccttcacccactcccagcaggccagcacacattggcgacgcttctcgccggagaagggtgggcggaggatgccctgcctggcccctgccaattgacggccacatggcttcttctagcaggtaaacggtgctacttcaaatggcccacctcttagggtgtcaaaaatggagctcagtaaaatcctggagaaaatagaaaatattgtgactgaagcacacaaaattttgcagcttttgaacttgccaagcggcagtaatgttgacaagagacaaattgttgctgagaattcacgcggtgcagtcactactgtggcccctccacgtttagtaattggccgcgacgaggatcgcgtcaaggtcatatctatgcttcgtgagacacttgatgatggtcaacaggatcgcagcggtgctaaaccatactctacaattggcatttatggcattcctgggtctggtaaatctaccctcgcacagtatgtttgcgcccatgaggaagacaatatccactttgacattgtcatctgggtccatgtgtcgcagaaatttagtgtgcgagccgttttgagggagatgatcgagcagggttttgagggagaaagcatcgagaccgaggagagtttcagatgtatttttcccaggaggcattggctggaccctgagtatttagtcaggttgtgggtggcagaaggatttgtcaccagccgcaatacaggggaggaactggaggctgttggtcgaggctactttgatgagttagtgtcagcctcatttctgcaaccagtagatggtgacaaggaacgctatacgatccatgatctgttgcatgacttggtaagtaaagtagctggaagtgactgcttcagagctgacaatggctgggaaggagaatttcctcaggatgtccgtcatctttgggttgagaactgtaaactagacttgattgcccacaagattaccagactgaaaaagctacgcaccctgatcatttctgctggtgagaatgacacgccagttgaggaaaaagccttgttggaaaatattttcacgggtgtgacgacattgcgggtgctccagataacaccctggacagcaggaactctctcattcccagcatctgtcgggcggctaaagcatctacgctatctttctgtcggtaggcatattggcggtactaaggtgattctgccaagtacggttgttttgggactgtaccatctgcagcttttggattgcccttctgtagccttctcctcctgcgaagatattgttaagggcctgttcggttgtaccggaatgagccaggattcattccagctcatcaaaatctatataaattagagaagtaatccagctaggaattaatccggggctccaatccgaaacaaccgaacagggcctaagctggttagcttgaggcacctactgtgctcatcaggatctctgaatgtaccaaacataggcaggattgtgtcactccgaactcttcgatgcttcagggtaaagaagaaggcaggctacgagttgtggcagctgaagcacctcaacaagcttgagaagaagctagtgatccgcggccttcagaacgctggacgcaagggagaggctccagaagccaatctagctgccaaggaacggctcacaagcctagcccttgagtgggacagtgatgcgccgctgagctgcggcgcggacctccaagcagaggtactggagggcctctgccctccgttgcacctcgaaaaactgcggctctgttggtacggcggctcgaggtacccagactggattgttggtgtgcgatgcctttgtctctaccggtgcagccgactaggcgcctttcatggatgctccccccgtcttgtcaaactgaaaattttagagtgcggctgggatgccttgccagataacatggagcacctcgcctcactccggaagttggttattgacggctgcaaggatctacggtcgcttccagagctgcctcgctctctgctgcaccttaagatctccggctgcgatggcgaggtcatgaggtcatgcaaaacggttggacatcccaatcgcaaaaggatacagcacgttcgcacagtaatcatcggatgggaatcacttcccagagcagagctattagatcactttgagagcgagcctgtggtgccggagaaagagaaggagatcgccgcccttgttaaaaagttgctcgtgatgcttggccttctactactttgcatgttcagtgtgattgcaaggttgcttgtgggctctttcctgctcccagctccgctggtcgtcgtaattttgctgcttgtggtatggataattttgacactctagaggcctgtgaaatcggttatgcctggtgccgttaaacacggacactactctctatcaattttcttctcttctctatggatattatgtttgcttgcctatatctactcgaccagtctgagaaaagatactatgtagttgtttgtatggaaaaaatgttgtataagataaaaaacgaatataaagctatgacctttttttttgtttttggatgagtatacttttagtgtttttgtttagctagagatgctagtgtgtttgcttgttgttgtgcacagtttgtggtactgtgtatggcctaacgctccggcggccctgaagttgagacggaaagggtggttgcggacagtccgttcttagaagcggacagtccacgattagatcagacggattaacttctatctccacacatgtttatctctttaaatacgtgtgagttattagaagtgctgagctagctctgcatgtacatacataaataaaaaatctcaagaaagtccctagatcaaacaaataaataaacaaaggaaacaaagagcagaaacgaatcaaaggatccagatccacacctagatagatacaataatataggcaatcagatgtattggtgcgatcgtgcaattaaacaatctctacgtttgatcctatatatatattattattaagatattatcaccgcatgatttataatcaatgacacaaattgct

SEQ ID NO: 38501 - DNA, 3325 bp, Zea Mays
cagcaacatttacagattagataaaacaagagtggctagaatgcaaccgcacagaagcccgagtttccgttcccagcaacccaggcaggcagacacaatgaaaaatgattgaaatactgcgagtgtggcaaacaaactagctagttccaattttgagcactgctactttacataagtaaatgaccaaacctatcaccaaaaaggaaattgtgtacacaaaatggaagaaaaaacacaggacgaaatacgcgagaaattccaggacacagcggcggtcacgcgttttctgacggctgacctgattgggagcacgccgctgccgttggagttgacgccccggcctggagccaccgtcatcgaggggggattgccgcgttcggcgccgctcgcggtgacggtcggcctcgcactcgctactggtggtggtggaagcctcgcactcgctatcgctagtcgctactgatggttccaagagcaaaggcccatgttgtttgggatccagtaggcccaatcaagccgttgactccgaggagagccgcttccgatgtcctcgcctcttgccgacaccttcacccactcccagcaggccagcacacattggcgacgcttctcgccggagaagggtgggcggaggatgccctgcctggcccctgccaattgacggccacatggcttcttctagcaggtaaacggtgctacttcaaatggcccacctcttagggtgtcaaaaatggagctcagtaaaatcctggagaaaatagaaaatattgtgactgaagcacacaaaattttgcagcttttgaacttgccaagcggcagtaatgttgacaagagacaaattgttgctgagaattcacgcggtgcagtcactactgtggcccctccacgtttagtaattggccgcgacgaggatcgcgtcaaggtcatatctatgcttcgtgagacacttgatgatggtcaacaggatcgcagcggtgctaaaccatactctacaattggcatttatggcattcctgggtctggtaaatctaccctcgcacagtatgtttgcgcccatgaggaagacaatatccactttgacattgtcatctgggtccatgtgtcgcagaaatttagtgtgcgagccgttttgagggagatgatcgagcagggttttgagggagaaagcatcgagaccgaggagagtttcagatgtatttttcccaggaggcattggctggaccctgagtatttagtcaggttgtgggtggcagaaggatttgtcaccagccgcaatacaggggaggaactggaggctgttggtcgaggctactttgatgagttagtgtcagcctcatttctgcaaccagtagatggtgacaaggaacgctatacgatccatgatctgttgcatgacttggtaagtaaagtagctggaagtgactgcttcagagctgacaatggctgggaaggagaatttcctcaggatgtccgtcatctttgggttgagaactgtaaactagacttgattgcccacaagattaccagactgaaaaagctacgcaccctgatcatttctgctggtgagaatgacacgccagttgaggaaaaagccttgttggaaaatattttcacgggtgtgacgacattgcgggtgctccagataacaccctggacagcaggaactctctcattcccagcatctgtcgggcggctaaagcatctacgctatctttctgtcggatctctgaatgtaccaaacataggcaggattgtgtcactccgaactcttcgatgcttcagggtaaagaagaaggcaggctacgagttgtggcagctgaagcacctcaacaagcttgagaagaagctagtgatccgcggccttcagaacgctggacgcaagggagaggctccagaagccaatctagctgccaaggaacggctcacaagcctagcccttgagtgggacagtgatgcgccgctgagctgcggcgcggacctccaagcagaggtactggagggcctctgccctccgttgcacctcgaaaaactgcggctctgttggtacggcggctcgaggtacccagactggattgttggtgtgcgatgcctttgtctctaccggtgcagccgactaggcgcctttcatggatgctccccccgtcttgtcaaactgaaaattttagagtgcggctgggatgccttgccagataacatggagcacctcgcctcactccggaagttggttattgacggctgcaaggatctacggtcgcttccagagctgcctcgctctctgctgcaccttaagatctccggctgcgatggcgaggtcatgaggtcatgcaaaacggttggacatcccaatcgcaaaaggatacagcacgttcgcacagtaatcatcggatgggaatcacttcccagagcagagctattagatcactttgagagcgagcctgtggtgccggagaaagagaaggagatcgccgcccttgttaaaaagttgctcgtgatgcttggccttctactactttgcatgttcagtgtgattgcaaggttgcttgtgggctctttcctgctcccagctccgctggtcgtcgtaattttgctgcttgtggtatggataattttgacactctagaggcctgtgaaatcggttatgcctggtgccgttaaacacggacactactctctatcaattttcttctcttctctatggatattatgtttgcttgcctatatctactcgaccagtctgagaaaagatactatgtagttgtttgtatggaaaaaatgttgtataagataaaaaacgaatataaagctatgacctttttttttgtttttggatgagtatacttttagtgtttttgtttagctagagatgctagtgtgtttgcttgttgttgtgcacagtttgtggtactgtgtatggcctaacgctccggcggccctgaagttgagacggaaagggtggttgcggacagtccgttcttagaagcggacagtccacgattagatcagacggattaacttctatctccacacatgtttatctctttaaatacgtgtgagttattagaagtgctgagctagctctgcatgtacatacataaataaaaaatctcaagaaagtccctagatcaaacaaataaataaacaaaggaaacaaagagcagaaacgaatcaaaggatccagatccacacctagatagatacaataatataggcaatcagatgtattggtgcgatcgtgcaattaaacaatctctacgtttgatcctatatatatattattattaagatattatcaccgcatgatttataatcaatgacacaaattgct

SEQ ID NO: 38502 - DNA, 1726 bp, Zea Mays
caatgaaaaatgattgaaatactgcgagtgtggcaaacaaactagctagttccaattttgagcactgctactttacataagtaaatgaccaaacctatcaccaaaaaggaaattgtgtacacaaaatggaagaaaaaacacaggacgaaatacgcgagaaattccaggacacagcggcggtcacgcgttttctgacggctgacctgattgggagcacgccgctgccgttggagttgacgccccggcctggagccaccgtcatcgaggggggattgccgcgttcggcgccgctcgcggtgacggtcggcctcgcactcgctactggtggtggtggaagcctcgcactcgctatcgctagtcgctactgatggttccaagagcaaaggcccatgttgtttgggatccagtaggcccaatcaagccgttgactccgaggagagccgcttccgatgtcctcgcctcttgccgacaccttcacccactcccagcaggccagcacacattggcgacgcttctcgccggagaagggtgggcggaggatgccctgcctggcccctgccaattgacggccacatggcttcttctagcaggcaagtagataaacctaccacgacgagcaaacgcagatctgtagcctagtcgttcggggtggtcgaatggcagacccagtgaccattgctgcagtgggctggggcatcgctgctgtaggctggctcgtctcgcccatcatcaccaggcttctcaacaaagccttttcctacctcggtgtcgacggagccaagaagctgaaagagctcgagactaaagttttacagctggagctgttgatggaagcggttgaggagagtcctcgcagaaaccagctggagagattgtttcaggatctcaggtctgccttctacgaggctgaagacatcctggacgatgtcgagtactgcagtctggaaaggcaggccttatctttatctcaccccggtgacaagttggattcccagagcatgccttctagtggcaagaactggggcatcatttcctctcctatggttaagttgattgaaacttttgctgttttttgcaagtctcagagaactgcttatagggagaaggtgttaattgaagcagagaaacaatttctgcatgatttcacttttttcaaggaaaagttatcagttgattttggccaaatagtggatgtcgaatgcattgatagtacttgccaagttctgtgtgacaaggtcaggggttgttgttcaatttgcaagtcaaggtgtactgaagctatcatcgattctctaaaaattttggctgaagcaatgactattaagcatcagaagtttttgaattccaacaaccttctggcgaaagatatggatattaagtcagatgagaaagctaccaaaattgataccaatgtgcagccagttgatgttaagtcgaatgagaaaggggctggtgtggacattgttgaggcttctcatggaaaagctcatgtggtttttagctagatgatgctggggttatggttaatgaactactacttactactaattaccaggagaacaggttgttgatgtcatttgttaatttccatgagcaagagaagatctctaaagaaatcgtaacacacgctatagaaagctgcatgaagaaacaagcagataacttgtattgttttttttgtatattagttttttttctctatttttagagaaaaaaactacgtgtt

SEQ ID NO: 38503 - DNA, 1299 bp, Zea Mays
gaaaaatgattgaaatactgcgagtgtggcaaacaaactagctagttccaattttgagcactgctactttacataagtaaatgaccaaacctatcaccaaaaaggaaattgtgtacacaaaatggaagaaaaaacacaggacgaaatacgcgagaaattccaggacacagcggcggtcacgcgttttctgacggctgacctgattgggagcacgccgctgccgttggagttgacgccccggcctggagccaccgtcatcgaggggggattgccgcgttcggcgccgctcgcggtgacggtcggcctcgcactcgctactggtggtggtggaagcctcgcactcgctatcgctagtcgctactgatggttccaagagcaaaggcccatgttgtttgggatccagtaggcccaatcaagccgttgactccgaggagagccgcttccgatgtcctcgcctcttgccgacaccttcacccactcccagcaggccagcacacattggcgacgcttctcgccggagaagggtgggcggaggatgccctgcctggcccctgccaattgacggccacatggcttcttctagcagggcatcatttcctctcctatggttaagttgattgaaacttttgctgttttttgcaagtctcagagaactgcttatagggagaaggtgttaattgaagcagagaaacaatttctgcatgatttcacttttttcaaggaaaagttatcagttgattttggccaaatagtggatgtcgaatgcattgatagtacttgccaagttctgtgtgacaaggtcaggggttgttgttcaatttgcaagtcaaggtgtactgaagctatcatcgattctctaaaaattttggctgaagcaatgactattaagcatcagaagtttttgaattccaacaaccttctggcgaaagatatggatattaagtcagatgagaaagctaccaaaattgataccaatgtgcagccagttgatgttaagtcgaatgagaaaggggctggtgtggacattgttgaggcttctcatggaaaagctcatgtggtttttagctagatgatgctggggttatggttaatgaactactacttactactaattaccaggatttccaggagaacaggttgttgatgtcatttgttaatttccatgagcaagagaagatctctaaagaaatcgtaacacacgctatagaaagctgcatgaagaaacaagcagataacttgtattgttttttttgtatattagttttttttctctatttttagagaaaaaaactacgtgtt

SEQ ID NO: 38504 - DNA, 1836 bp, Zea Mays
gaaaaatgattgaaatactgcgagtgtggcaaacaaactagctagttccaattttgagcactgctactttacataagtaaatgaccaaacctatcaccaaaaaggaaattgtgtacacaaaatggaagaaaaaacacaggacgaaatacgcgagaaattccaggacacagcggcggtcacgcgttttctgacggctgacctgattgggagcacgccgctgccgttggagttgacgccccggcctggagccaccgtcatcgaggggggattgccgcgttcggcgccgctcgcggtgacggtcggcctcgcactcgctactggtggtggtggaagcctcgcactcgctatcgctagtcgctactgatggttccaagagcaaaggcccatgttgtttgggatccagtaggcccaatcaagccgttgactccgaggagagccgcttccgatgtcctcgcctcttgccgacaccttcacccactcccagcaggccagcacacattggcgacgcttctcgccggagaagggtgggcggaggatgccctgcctggcccctgccaattgacggccacatggcttcttctagcagggcatcatttcctctcctatggttaagttgattgaaacttttgctgttttttgcaagtctcagagaactgcttatagggagaaggtgttaattgaagcagagaaacaatttctgcatgatttcacttttttcaaggaaaagttatcagttgattttggccaaatagtggatgtcgaatgcattgatagtacttgccaagttctgtgtgacaaggtcaggggttgttgttcaatttgcaagtcaaggtgtactgaagctatcatcgattctctaaaaattttggctgaagcaatgactattaagcatcagaagtttttgaattccaacaaccttctggcgaaagatatggatattaagtcagatgagaaagctaccaaaattgataccaatgtgcagccagttgatgttaagtcgaatgagaaaggggctggtgtggacattgttgaggcttctcatggaaaagctcatgtggtttttagctagatgatgctggggttatggttaatgaactactacttactactaattaccaggtgcaagtgtaacttctgatctgcttttcgtctactgtgtcactccactgtgtagcaatcagagcagtaaccttactagtatctctgttcaaacaaaggaagtgcaccatacaatctacagtttaatcaccctacctgtgccttgcatcagttttaaacgttggagctcattcctgtcagtttctctctccctctctgaatttttgacagctctacttggagcaggatctaccattttccctgtgcatctgaaaatcacgctgtgctatacatataaatactgccagtctccagagctggctctgcgtgctgtctgtctgtctgcctagctgtgactgtgagcgagcatccgggttatctgtctgcctagctgtgactgtgtctgtcatcctatgtggtctaatattacaatgactttatgaagttgttgtgtttctgttctctgtaactagacacaggagagattgttcatcttatatgctgaattgttatgttcatcctatgtggtctaatatgtctgttatcccaatgaatcaggatttccaggagaacaggttgttgatgtcatttgttaatttccatgagcaagagaagatctctaaagaaatcgtaacacacgctatagaaagctgcatgaagaaacaagcagataacttgtattgttttttttgtatattagttttttttctctatttttagagaaaaaaactacgtgtt

SEQ ID NO: 38505 - DNA, 3394 bp, Zea Mays
aaatgattgaaatactgcgagtgtggcaaacaaactagctagttccaattttgagcactgctactttacataagtaaatgaccaaacctatcaccaaaaaggaaattgtgtacacaaaatggaagaaaaaacacaggacgaaatacgcgagaaattccaggacacagcggcggtcacgcgttttctgacggctgacctgattgggagcacgccgctgccgttggagttgacgccccggcctggagccaccgtcatcgaggggggattgccgcgttcggcgccgctcgcggtgacggtcggcctcgcactcgctactggtggtggtggaagcctcgcactcgctatcgctagtcgctactgatggttccaagagcaaaggcccatgttgtttgggatccagtaggcccaatcaagccgttgactccgaggagagccgcttccgatgtcctcgcctcttgccgacaccttcacccactcccagcaggccagcacacattggcgacgcttctcgccggagaagggtgggcggaggatgccctgcctggcccctgccaattgacggccacatggcttcttctagcagcttttgaacttgccaagcggcagtaatgttgacaagagacaaattgttgctgagaattcacgcggtgcagtcactactgtggcccctccacgtttagtaattggccgcgacgaggatcgcgtcaaggtcatatctatgcttcgtgagacacttgatgatggtcaacaggatcgcagcggtgctaaaccatactctacaattggcatttatggcattcctgggtctggtaaatctaccctcgcacagtatgtttgcgcccatgaggaagacaatatccactttgacattgtcatctgggtccatgtgtcgcagaaatttagtgtgcgagccgttttgagggagatgatcgagcagggttttgagggagaaagcatcgagaccgaggagagtttcagatgtatttttcccaggaggcattggctggaccctgagtatttagtcaggttgtgggtggcagaaggatttgtcaccagccgcaatacaggggaggaactggaggctgttggtcgaggctactttgatgagttagtgtcagcctcatttctgcaaccagtagatggtgacaaggaacgctatacgatccatgatctgttgcatgacttggtaagtaaagtagctggaagtgactgcttcagagctgacaatggctgggaaggagaatttcctcaggatgtccgtcatctttgggttgagaactgtaaactagacttgattgcccacaagattaccagactgaaaaagctacgcaccctgatcatttctgctggtgagaatgacacgccagttgaggaaaaagccttgttggaaaatattttcacgggtgtgacgacattgcgggtgctccagataacaccctggacagcaggaactctctcattcccagcatctgtcgggcggctaaagcatctacgctatctttctgtcggtaggcatattggcggtactaaggtgattctgccaagtacggttgttttgggactgtaccatctgcagcttttggattgcccttctgtagccttctcctcctgcgaagatattgttaagggcctgttcggttgtaccggaatgagccaggattcattccagctcatcaaaatctatataaattagagaagtaatccagctaggaattaatccggggctccaatccgaaacaaccgaacagggcctaagctggttagcttgaggcacctactgtgctcatcaggatctctgaatgtaccaaacataggcaggattgtgtcactccgaactcttcgatgcttcagggtaaagaagaaggcaggctacgagttgtggcagctgaagcacctcaacaagcttgagaagaagctagtgatccgcggccttcagaacgctggacgcaagggagaggctccagaagccaatctagctgccaaggaacggctcacaagcctagcccttgagtgggacagtgatgcgccgctgagctgcggcgcggacctccaagcagaggtactggagggcctctgccctccgttgcacctcgaaaaactgcggctctgttggtacggcggctcgaggtacccagactggattgttggtgtgcgatgcctttgtctctaccggtgcagccgactaggcgcctttcatggatgctccccccgtcttgtcaaactgaaaattttagagtgcggctgggatgccttgccagataacatggagcacctcgcctcactccggaagttggttattgacggctgcaaggatctacggtcgcttccagagctgcctcgctctctgctgcaccttaagatctccggctgcgatggcgaggtcatgaggtcatgcaaaacggttggacatcccaatcgcaaaaggatacagcacgttcgcacagtaatcatcggatgggaatcacttcccagagcagagctattagatcactttgagagcgagcctgtggtgccggagaaagagaaggagatcgccgcccttgttaaaaagttgctcgtgatgcttggccttctactactttgcatgttcagtgtgattgcaaggttgcttgtgggctctttcctgctcccagctccgctggtcgtcgtaattttgctgcttgtggtatggataattttgacactctagaggcctgtgaaatcggttatgcctggtgccgttaaacacggacactactctctatcaattttcttctcttctctatggatattatgtttgcttgcctatatctactcgaccagtctgagaaaagatactatgtagttgtttgtatggaaaaaatgttgtataagataaaaaacgaatataaagctatgacctttttttttgtttttggatgagtatacttttagtgtttttgtttagctagagatgctagtgtgtttgcttgttgttgtgcacagtttgtggtactgtgtatggcctaacgctccggcggccctgaagttgagacggaaagggtggttgcggacagtccgttcttagaagcggacagtccacgattagatcagacggattaacttctatctccacacatgtttatctctttaaatacgtgtgagttattagaagtgctgagctagctctgcatgtacatacataaataaaaaatctcaagaaagtccctagatcaaacaaataaataaacaaaggaaacaaagagcagaaacgaatcaaaggatccagatccacacctagatagatacaataatataggcaatcagatgtattggtgcgatcgtgcaattaaacaatctctacgtttgatcctatatatatattattattaagatattatcaccgcatgatttataatcaatgacacaaattgct

SEQ ID NO: 38506 - DNA, 1298 bp, Zea Mays
aaatgattgaaatactgcgagtgtggcaaacaaactagctagttccaattttgagcactgctactttacataagtaaatgaccaaacctatcaccaaaaaggaaattgtgtacacaaaatggaagaaaaaacacaggacgaaatacgcgagaaattccaggacacagcggcggtcacgcgttttctgacggctgacctgattgggagcacgccgctgccgttggagttgacgccccggcctggagccaccgtcatcgaggggggattgccgcgttcggcgccgctcgcggtgacggtcggcctcgcactcgctactggtggtggtggaagcctcgcactcgctatcgctagtcgctactgatggttccaagagcaaaggcccatgttgtttgggatccagtaggcccaatcaagccgttgactccgaggagagccgcttccgatgtcctcgcctcttgccgacaccttcacccactcccagcaggccagcacacattggcgacgcttctcgccggagaagggtgggcggaggatgccctgcctggcccctgccaattgacggccacatggcttcttctagcagggcatcatttcctctcctatggttaagttgattgaaacttttgctgttttttgcaagtctcagagaactgcttatagggagaaggtgttaattgaagcagagaaacaatttctgcatgatttcacttttttcaaggaaaagttatcagttgattttggccaaatagtggatgtcgaatgcattgatagtacttgccaagttctgtgtgacaaggtcaggggttgttgttcaatttgcaagtcaaggtgtactgaagctatcatcgattctctaaaaattttggctgaagcaatgactattaagcatcagaagtttttgaattccaacaaccttctggcgaaagatatggatattaagtcagatgagaaagctaccaaaattgataccaatgtgcagccagttgatgttaagtcgaatgagaaaggggctggtgtggacattgttgaggcttctcatggaaaagctcatgtggtttttagctagatgatgctggggttatggttaatgaactactacttactactaattaccaggtgatttccaggagaacaggttgttgatgtcatttgttaatttccatgagcaagagaagatctctaaagaaatcgtaacacacgctatagaaagctgcatgaagaaacaagcagataacttgtattgttttttttgtatattagttttttttctctatttttagagaaaaaaactacgtgtt

SEQ ID NO: 38507 - DNA, 1471 bp, Zea Mays
aaatgattgaaatactgcgagtgtggcaaacaaactagctagttccaattttgagcactgctactttacataagtaaatgaccaaacctatcaccaaaaaggaaattgtgtacacaaaatggaagaaaaaacacaggacgaaatacgcgagaaattccaggacacagcggcggtcacgcgttttctgacggctgacctgattgggagcacgccgctgccgttggagttgacgccccggcctggagccaccgtcatcgaggggggattgccgcgttcggcgccgctcgcggtgacggtcggcctcgcactcgctactggtggtggtggaagcctcgcactcgctatcgctagtcgctactgatggttccaagagcaaaggcccatgttgtttgggatccagtaggcccaatcaagccgttgactccgaggagagccgcttccgatgtcctcgcctcttgccgacaccttcacccactcccagcaggccagcacacattggcgacgcttctcgccggagaagggtgggcggaggatgccctgcctggcccctgccaattgacggccacatggcttcttctagcagggcatcatttcctctcctatggttaagttgattgaaacttttgctgttttttgcaagtctcagagaactgcttatagggagaaggtgttaattgaagcagagaaacaatttctgcatgatttcacttttttcaaggaaaagttatcagttgattttggccaaatagtggatgtcgaatgcattgatagtacttgccaagttctgtgtgacaaggtcaggggttgttgttcaatttgcaagtcaaggtgtactgaagctatcatcgattctctaaaaattttggctgaagcaatgactattaagcatcagaagtttttgaattccaacaaccttctggcgaaagatatggatattaagtcagatgagaaagctaccaaaattgataccaatgtgcagccagttgatgttaagtcgaatgagaaaggggctggtgtggacattgttgaggcttctcatggaaaagctcatgtggtttttagctagatgatgctggggttatggttaatgaactactacttactactaattaccaggtgcaagtgtaacttctgatctgcttttcgtctactgtgtcactccactgtgtagcaatcagagcagtaaccttactagtatctctgttcaaacaaaggaagtgcaccatacaatctacagtttaatcaccctacctgtgccttgcatcagttttaaacgttggagctcattcctgatttccaggagaacaggttgttgatgtcatttgttaatttccatgagcaagagaagatctctaaagaaatcgtaacacacgctatagaaagctgcatgaagaaacaagcagataacttgtattgttttttttgtatattagttttttttctctatttttagagaaaaaaactacgtgtt

SEQ ID NO: 38508 - DNA, 3106 bp, Zea Mays
acatcccctccgtgctccacctgcacactgatagactcagaattctggttagtagcatgatcatcaacatcccctccggcccaagcctcccggcgacgggcctccgcttcgctcgccaacttggccgccttcttcagaatttggatcacaaactcaacacaagacgtcacgcctaaaaagacaggtaaacggtgctacttcaaatggcccacctcttagggtgtcaaaaatggagctcagtaaaatcctggagaaaatagaaaatattgtgactgaagcacacaaaattttgcagcttttgaacttgccaagcggcagtaatgttgacaagagacaaattgttgctgagaattcacgcggtgcagtcactactgtggcccctccacgtttagtaattggccgcgacgaggatcgcgtcaaggtcatatctatgcttcgtgagacacttgatgatggtcaacaggatcgcagcggtgctaaaccatactctacaattggcatttatggcattcctgggtctggtaaatctaccctcgcacagtatgtttgcgcccatgaggaagacaatatccactttgacattgtcatctgggtccatgtgtcgcagaaatttagtgtgcgagccgttttgagggagatgatcgagcagggttttgagggagaaagcatcgagaccgaggagagtttcagatgtatttttcccaggaggcattggctggaccctgagtatttagtcaggttgtgggtggcagaaggatttgtcaccagccgcaatacaggggaggaactggaggctgttggtcgaggctactttgatgagttagtgtcagcctcatttctgcaaccagtagatggtgacaaggaacgctatacgatccatgatctgttgcatgacttggtaagtaaagtagctggaagtgactgcttcagagctgacaatggctgggaaggagaatttcctcaggatgtccgtcatctttgggttgagaactgtaaactagacttgattgcccacaagattaccagactgaaaaagctacgcaccctgatcatttctgctggtgagaatgacacgccagttgaggaaaaagccttgttggaaaatattttcacgggtgtgacgacattgcgggtgctccagataacaccctggacagcaggaactctctcattcccagcatctgtcgggcggctaaagcatctacgctatctttctgtcggtaggcatattggcggtactaaggtgattctgccaagtacggttgttttgggactgtaccatctgcagcttttggattgcccttctgtagccttctcctcctgcgaagatattgttaagggcctgttcggttgtaccggaatgagccaggattcattccagctcatcaaaatctatataaattagagaagtaatccagctaggaattaatccggggctccaatccgaaacaaccgaacagggcctaagctggttagcttgaggcacctactgtgctcatcaggatctctgaatgtaccaaacataggcaggattgtgtcactccgaactcttcgatgcttcagggtaaagaagaaggcaggctacgagttgtggcagctgaagcacctcaacaagcttgagaagaagctagtgatccgcggccttcagaacgctggacgcaagggagaggctccagaagccaatctagctgccaaggaacggctcacaagcctagcccttgagtgggacagtgatgcgccgctgagctgcggcgcggacctccaagcagaggtactggagggcctctgccctccgttgcacctcgaaaaactgcggctctgttggtacggcggctcgaggtacccagactggattgttggtgtgcgatgcctttgtctctaccggtgcagccgactaggcgcctttcatggatgctccccccgtcttgtcaaactgaaaattttagagtgcggctgggatgccttgccagataacatggagcacctcgcctcactccggaagttggttattgacggctgcaaggatctacggtcgcttccagagctgcctcgctctctgctgcaccttaagatctccggctgcgatggcgaggtcatgaggtcatgcaaaacggttggacatcccaatcgcaaaaggatacagcacgttcgcacagtaatcatcggatgggaatcacttcccagagcagagctattagatcactttgagagcgagcctgtggtgccggagaaagagaaggagatcgccgcccttgttaaaaagttgctcgtgatgcttggccttctactactttgcatgttcagtgtgattgcaaggttgcttgtgggctctttcctgctcccagctccgctggtcgtcgtaattttgctgcttgtggtatggataattttgacactctagaggcctgtgaaatcggttatgcctggtgccgttaaacacggacactactctctatcaattttcttctcttctctatggatattatgtttgcttgcctatatctactcgaccagtctgagaaaagatactatgtagttgtttgtatggaaaaaatgttgtataagataaaaaacgaatataaagctatgacctttttttttgtttttggatgagtatacttttagtgtttttgtttagctagagatgctagtgtgtttgcttgttgttgtgcacagtttgtggtactgtgtatggcctaacgctccggcggccctgaagttgagacggaaagggtggttgcggacagtccgttcttagaagcggacagtccacgattagatcagacggattaacttctatctccacacatgtttatctctttaaatacgtgtgagttattagaagtgctgagctagctctgcatgtacatacataaataaaaaatctcaagaaagtccctagatcaaacaaataaataaacaaaggaaacaaagagcagaaacgaatcaaaggatccagatccacacctagatagatacaataatataggcaatcagatgtattggtgcgatcgtgcaattaaacaatctctacgtttgatcctatatatatattattattaagatattatcaccgcatgatttataatcaatgacacaaattgct

SEQ ID NO: 38509 - DNA, 1267 bp, Zea Mays
gcgactatcaccagcgctctgctctctgccgcctcttcactttctcagtgcggctgccgtcgtcgttcccagggcggctgccgcgcgcgcccctgccgcgcgcgcccctgctgccctccagtgcgcgcccctgctgctgatgtgcctgctgccgcgcgcgccctgctgtgctgctgccgcgcgcgatgagttggagtcgcgggcgaggtggatccgacgagatccatggcggagggcgaggaggctccgatggatctatggctgggggcgaggtagctccgacgaggtacatggcgcgggtggaggcagctgcgattccgacgaggtccacgtcggagggcgaggaggccgtgactggatctatggcggggggcgagtgggctgctgcagggtccatggtggaggagaggaaggtccgacgggatccatggctgggggtggtggagctggctgcgacggtatctacggcggggggcgagggtgtcccgacaggatccattttcgctgtccggcgacagcaacctgttgtgaagcaggcgggtctggtgttccactgcgcgaagggcatcatttcctctcctatggttaagttgattgaaacttttgctgttttttgcaagtctcagagaactgcttatagggagaaggtgttaattgaagcagagaaacaatttctgcatgatttcacttttttcaaggaaaagttatcagttgattttggccaaatagtggatgtcgaatgcattgatagtacttgccaagttctgtgtgacaaggtcaggggttgttgttcaatttgcaagtcaaggtgtactgaagctatcatcgattctctaaaaattttggctgaagcaatgactattaagcatcagaagtttttgaattccaacaaccttctggcgaaagatatggatattaagtcagatgagaaagctaccaaaattgataccaatgtgcagccagttgatgttaagtcgaatgagaaaggggctggtgtggacattgttgaggcttctcatggaaaagctcatgtggtttttagctagatgatgctggggttatggttaatgaactactacttactactaattaccaggagaacaggttgttgatgtcatttgttaatttccatgagcaagagaagatctctaaagaaatcgtaacacacgctatagaaagctgcatgaagaaacaagcagataacttgtattgttttttttgtatattagttttttttctctatttttagagaaaaaaactacgtgtt

SEQ ID NO: 38510 - DNA, 1266 bp, Zea Mays
atgagttggagtcgcgggcgaggtggatccgacgagatccatggcggagggcgaggaggctccgatggatctatggctgggggcgaggtagctccgacgaggtacatggcgcgggtggaggcagctgcgattccgacgaggtccacgtcggagggcgaggaggccgtgactggatctatggcggggggcgagtgggctgctgcagggtccatggtggaggagaggaaggtccgacgggatccatggctgggggtggtggagctggctgcgacggtatctacggcggggggcgagggtgtcccgacaggatccattttcgctgtccggcgacagcaacctgttgtgaagcaggcgggtctggtgttccactgcgcgaagggcatcatttcctctcctatggttaagttgattgaaacttttgctgttttttgcaagtctcagagaactgcttatagggagaaggtgttaattgaagcagagaaacaatttctgcatgatttcacttttttcaaggaaaagttatcagttgattttggccaaatagtggatgtcgaatgcattgatagtacttgccaagttctgtgtgacaaggtcaggggttgttgttcaatttgcaagtcaaggtgtactgaagctatcatcgattctctaaaaattttggctgaagcaatgactattaagcatcagaagtttttgaattccaacaaccttctggcgaaagatatggatattaagtcagatgagaaagctaccaaaattgataccaatgtgcagccagttgatgttaagtcgaatgagaaaggggctggtgtggacattgttgaggcttctcatggaaaagctcatgtggtttttagctagatgatgctggggttatggttaatgaactactacttactactaattaccaggtgcaagtgtaacttctgatctgcttttcgtctactgtgtcactccactgtgtagcaatcagagcagtaaccttactagtatctctgttcaaacaaaggaagtgcaccatacaatctacagtttaatcaccctacctgtgccttgcatcagttttaaacgttggagctcattcctgatttccaggagaacaggttgttgatgtcatttgttaatttccatgagcaagagaagatctctaaagaaatcgtaacacacgctatagaaagctgcatgaagaaacaagcagataacttgtattgttttttttgtatattagttttttttctctatttttagagaaaaaaactacgtgtt

SEQ ID NO: 38511 - DNA, 1091 bp, Zea Mays
atgagttggagtcgcgggcgaggtggatccgacgagatccatggcggagggcgaggaggctccgatggatctatggctgggggcgaggtagctccgacgaggtacatggcgcgggtggaggcagctgcgattccgacgaggtccacgtcggagggcgaggaggccgtgactggatctatggcggggggcgagtgggctgctgcagggtccatggtggaggagaggaaggtccgacgggatccatggctgggggtggtggagctggctgcgacggtatctacggcggggggcgagggtgtcccgacaggatccattttcgctgtccggcgacagcaacctgttgtgaagcaggcgggtctggtgttccactgcgcgaagggcatcatttcctctcctatggttaagttgattgaaacttttgctgttttttgcaagtctcagagaactgcttatagggagaaggtgttaattgaagcagagaaacaatttctgcatgatttcacttttttcaaggaaaagttatcagttgattttggccaaatagtggatgtcgaatgcattgatagtacttgccaagttctgtgtgacaaggtcaggggttgttgttcaatttgcaagtcaaggtgtactgaagctatcatcgattctctaaaaattttggctgaagcaatgactattaagcatcagaagtttttgaattccaacaaccttctggcgaaagatatggatattaagtcagatgagaaagctaccaaaattgataccaatgtgcagccagttgatgttaagtcgaatgagaaaggggctggtgtggacattgttgaggcttctcatggaaaagctcatgtggtttttagctagatgatgctggggttatggttaatgaactactacttactactaattaccaggatttccaggagaacaggttgttgatgtcatttgttaatttccatgagcaagagaagatctctaaagaaatcgtaacacacgctatagaaagctgcatgaagaaacaagcagataacttgtattgttttttttgtatattagttttttttctctatttttagagaaaaaaactacgtgtt

SEQ ID NO: 38512 - DNA, 2363 bp, Zea Mays
cagagatgtcaggccatcctgcctcggcagccgtgcgcaccccacccacaccacacactctccgtctccgactacgaccatggcggtgtccgacgaggcgcgcgccatgtacaacggcgggcgggcgggcctcaccttctggtccccgaacgtgaacatcttccgggacccgcggtggggccgcggccaggagacgcccggcgaggaccccgccgtctcggcgcgctacgccgccgcctacgtgcgcggcctccagcagccctacgccgccccgaacggcggccaccgcaaccgcctcaagctcgccgcctgctgcaagcacttcacggcgtacgacctggacaagtggggcggcacggaccggttccacttcaacgccgtggtggcggcgcaggacctggaggacaccttcaacgtccccttccgcgcctgcgtcgaggacggccgcgccgccagcgtcatgtgctcctacaaccaggtcaacggcgtgcccacgtgcgccgacgcggcgttcctgcgcggcaccatccgcgggcgctggggcctggacggctacatcgtctccgactgcgactccgtcgacgtcttcttccgcgaccagcactacacgcgcacccccgaggacgccgccgccgccacgctccgcgccggcctcgacctcgactgcgggccgttcctcgcgctctacgccggctccgccgtcgccgcgggcaaggtcgccgacgccgacgtcgacgccgcgctcctcaacaccgtcaccgtgcagatgcggctcggcatgttcgacggggaccccgcggccgggccgttcgggcgcctgggccccgcggacgtgtgcaccagggagcaccaggacctggcgctcgacgcggcgcgccagggcgtcgtgctcctcaagaaccggcgcggcgccaggcacaacagggacgtgctcccgctccgccccgccgcgcaccgcgtcgtcgccgtcgtcggcccgcacgccgacgccaccgtcgccatgatcgggaactacgcgggcaagccctgccgctacaccacgccgctgcagggcgtcgccgcgtacgccgcgcgggttgcgcaccaggccggctgcaccgacgtcgcgtgccgcgggaaccagcccatcgccgcggccgtcgaggcggcgcgccaagccgacgccaccgtcgtcgtcgcgggcctcgaccagagggtggaggccgagggcctggaccggaccacccttctcctccctgggcgacaggccgagctcatctccgccgtggccaaggcgtccaaggggccagtcatcctcgtgctcatgtctggcggtcccatcgacatcgcgttcgcgcagaacgaccccaggatcgatgggatcctgtgggtcggctaccccggccaggccggaggacaggcgattgccgacgtcatcttcggacaccataatccaggtgcgaagctgccggtgacatggtaccatcaagactacctgcagaaggtgccgatgacaaacatggcgatgcgcgcgaacccggcgcgcgggtaccccggccggacgtaccggttctacacgggcccgacgatctacccgttcgggcacgggctcagctacacccagttcacgcacacgctcgcgcacgcgccgacgcagctcaccgtgcgcctctccggcagcggccactccgccgcgtccgccgcctccctcctcaacgcgacgcttgcgcgccccgtccgcgccgtgcgggtggcgcacgcgcggtgcgagggcctcacggtcccggtgcacgtggacgtgagcaatgtcggcgaccgcgacggcgcgcacgccgtgctcgtgtaccacgcggcgccctcgccctcgcacgctgcccccggcgcggacgcgcccgcgcggcagctggtggcgttcgagaaggtgcacgtgcccgcgggcggcgtggcgcgcgtggagatgcgcatcggcgtgtgcgaccggctcagcgtcgcggaccggaacggcgtgcggcgggtccccgtcggcgagcacaggctgatgatcggcgagctcacgcactcggtctcgctcggcgtcgagcagctcggggtataaccggatgcttgaacggaaggtggaggatccagagtaataattgtgatgtgatgtgttgtttcgggtggggggtattattggcttctgattgccggggtgcttgctgctgtctctgcaaaggtggagatgggagatgtagaaggcaccggattactgaaaattgctggattgaaaacgaaaacgattgaaatggaaggaagacagaagaatgttgtttccctcctcgatactgatgttttttttcctgatctttatctaaacaaaatcctatgctttctgacgtcaagat

SEQ ID NO: 38513 - DNA, 2047 bp, Zea Mays
aaccaaccgttctcctcgccgatgccgctcgccgctggcgatccgtcgcctccgccgtccaccgcccacgccataaccaccccagacgggtggcacccgcgcacggcggagcgccatctgcttcacctcctccatcactgtcccctagctcgcggtcgcccgctcgagctcctcgcgttcgccgtccgccgcgcgctcccctactccccgccgtcaccgcaccaccacgccctcgcggcgctgctgctcctgtcctcccctccgccacccgctctgccaatcctccgcctcctccctcccgaacccacaccccctctcccgctcctcaacgccgccgtcaaggccctctccgcctcctccccgccggacgatgccttccgtctcctctccaccctccgccaattccacgcgcctgaccgcctaaccttcctgcccctcatcggctgcgcctcctccttgccgctcctctacgcgctgcactcgctcctcctccgcctcggcttcctatctcaccacgtcatctccctcgccctactcaagccctacccgctgccgcaggcccgggtcttgttcgacgatatgccccaaaagaacaagtgcaccgtcgcctacaacaccctcatcacggcgtgcctcagggtcagggacatccgtgcagcgcgccacctgttcgacgaaatgcagtggcacaggcggtccaggaggagcgtggtttcctggaaccttatgatcgccgggtgtgcacgctgcggacgagatgacatggcggtgtcctgtttcgagaggatgatcagggaaggagaggtggcgccagatgatggcaccttggtggcagtgctccctgcttgtggtaggacagggaatgttagggctgggaggtgggcacatgagtatgcgaggaagagtggcttgttggacggtacagtgcatgttgcaaatgcactgatggatatgtattgcaagagcggtgatgttaatagtgcacgggaggtgtttatgacgacgcggccgcgtagtgtggtgagctggaacaccttgatcgctggattctcattgaatggtcgcggagttgaggggattgatctgttccaggagatgaggaggcaagggatggagcctaatgctgtgacgttcttggcagtgcttggatgctgtgcgcatgctggggcagtggatattgggcgggagatcttccggagcatgctgtcggagcatgggactgaggcagcaattgagcactacgggtgtatggtggatttatttggaagatctggtctccttgaagaggcacacgtattgattcaggggatgccaatgaagcctaatgctgcgatatggggagcacttttaagtgcgtgtcgggctcatgctgggcttggccttgctgaggtggctctgaaagagcttatcaatcttgaaccatggaactcggggaactatgtgctgttggccaatctttatgtggaaacagagcggtgggatgaggcaggggaagtgaggagattgatgaggaggatgagtgtgaataaggctccagggcagagcttcatggaagaagctgagtttagttgacaaattgagaccaatagctaactatgtggaaataacttaagtttggaagggaaacttcatagaggggctgtaaatgaaaagatctatacatcaattatccctattaaaagtgacttatgcagggcatctcgagtctagtttacttaagaagaaggggagagaatgcttgaacaaggagcccaaccttatagcagattcgctgctcacatctcttaatttatcttgaatgccatgagtttctctgacatggggatatgtcagctccaaggaaaatggtgcacgtgagggagcaggaagacgtccgattggcggtgagaatcagaaacagctgaagaaagaagtgttgggccgccgtgtgcctaggcccagtgggcgatatccatcggacaagtggtccgtgtaagagtgcaataaggaatacttaaactaagactggctacagtgaacgctaggaaatgagaaaatactattgctc

SEQ ID NO: 38514 - DNA, 2164 bp, Zea Mays
ctgggtgatccattccccgaggagctagtcgatcagccatccagcatcggttgagagatgccagccagatgaagggaggatggtctggatatggttactgtcgacaactgtggcaatgatttccttgcatcactggctgatgccacacaacctactgatgactgggacgatctcaaagggattgagaccgaggcatgtggcaacttgaatgatatgatgatgaagaatgtacctgactgcaatggaggagttgctatagacagccgttatacatccagagagccaaattcgtcctctcaacgtgctccgaatcatcttgaagctttcaaatttgcctctgatgattcagattttgaaatggacaaccttcctgacaagtcttgtagtatgcaaaggcagacacaatcaagaaactctggaatgcagacccgaagctcagcaaaatccacagtgactagggaaaccagcagatatgagccaacgactcccacttcaaatagagagatgcctccagctgcatttcatcaaaggagagaacttctgagctacgagcaactttgttgcctcgatgatgtcaattttgccaatgctgtcatctttggcaacaaaggctttaggcccctgcagtacgaagcttgcagggctgcaatggataaccaagactgtttcatacttatgccaactggtggtgggaagagtttgtgttatcagctccctgcaacattgcacccaggtgtcactgttgtcgtaagtccgctgctgtcgctgatccaggatcagattgtggcattaacttacaggtttgcagtaccagcagcattcttaaattcccagcaaacttctgctcaggcatctgcagtaatccaggagctaagatgtgggaaaccagccttcaaacttctgtatgttactcctgaaagaattgtcacgaactattcatttatggagaccctaagaggcttagatcagaggggactgctagcaagatttgtgattgatgaagcacattgtgtaagtcaatggggacacgatttccgtccagattaccgtggtctaggttgcctcaagcagaacttccctagggtcccgatcatggctttaactgcgacagcaactgaatctgtccgtaaggacgtcctcggtgccttgaggatccccaacgctgtggtactgaagaggagcttcgacagactgaacctcaactacgaggtaatcggcaagacgaaaactttccagaagcagctgggcgatctcctgaaagagcgcttcatgaacgaatctggtatcgtgtactgtctctcgaagaacgagtgtgcagacactgccaagtttttgagggagaaatacaagatcaaatgcgcgcactaccacgctagcctggcagctcgtcagcgaaccagtgtccaggagaaatggcacagcggggaggttaaggtcatctgcgctaccatagccttcggcatggggatcgacaaacctgacgtgcgttttgttatccacaacacattgtccaagtcaatagaaagctactaccaggagtccgggagggcagggcgagatgagcttccggcacactgtatcgtcttgtaccagaagaaagacttcagccgtatcgtgtgcatgttgaggaacggtgagaacttcaggagcgagagcttcagggttgcgatggagcaagctaagaagatgcaggcatactgcgagctcaagaccgagtgccggagacaggcacttctgcagcacttcggcgaacagtacgacaggcgaaggtgccgagacgggcctagcccctgcgacaactgcctcaagacatagtttagggtaataaactaggcgataaaaaatgccatgacgcttggttatgctctgaacttgtgaggtgtgttccacttccacagtacattcgtctgtgtatatgtagcatccatagctcaaacaagtggccgcaactgcactgtgtgtaacgatggtctttgttttcagtggattgtgaggttcatgctttactctccctaaccacacacctaaaaaaaggtaacgcaaaccgaaacacaaattatttttgtgttgggagcaaagaaaacaattaccctctctattttagctcttactccctcttttcataaatatatgataccgttgatttttaaaaaaaaacgttgac

SEQ ID NO: 38515 - DNA, 2411 bp, Zea Mays
  misc_feature (2410)..(2411): n is a, c, g, or t
ccgcgagcgccactaccaccgtaccattccgtccgcagaggagagccctcccctccaccggcttccccgcccctcctcccagcgatcgcgcctccttccgggcgtcccagccttggtccggtcgccgggtgcggcgctggtcctggtttgggctctcccatggcatctctggagcaggaggtggtggtcgccatggcatctctggagcaggaggcggtggtcgccgcggccgtcgtggagaacgtgacgccgcagcagcagggcggaggttgtggcggcgcaggaggaggaggggataccgttagcgcctggaggaacgtcgacattgcctggctcaaggcgaaggaagcttcaataagaagatatgaggcagccaactggttgcgaaggtatgttggggtagtgtgtgcgaaggaccttgcagaagagccttccgaggacgaattccttgttggcctgagaaatggcattattctctgcactgcactcaataagattcaacctggtgcggtacctaaggttgtggaggtgccatcggattctactgcccctgccgatgctacagctctctgtgcatttcagtactttgagaatgtgagaaatttccttactggcctgcaaggtttaggtcttccaacatttgaggcatcagacctacaaaagggtggacaaggtgttcgagttgtagactgtgttctcgctctgaagtcattttgtgatgctaagcaagtgggaaaacaatcttcattcaaatttggtggcattgtaaagcctttgtcgggaaagtatgccactcgcaagaataatgaaccttctgtgaaggcgatgataaggagtcactcagctgaattacttcgggatggcgtatcactggagcaaataggtcttgatttttctccagaactcactgaaacaactgctccagattccatccggatgcttgttcaaacagttctctcagataagaaaccagaagaaattcaatcagttgtagaatcactcttgagcaaagtaattaatgaacttgagcaccgtattgcaagccagagtgaattggtgaaagaaactatggataccaacggctgtaactcagttttgagaatggagtctccctgtaacaccaatgacagtaaatcattatccagagtggaccctccacaagtggagttgacttcctgcagtgatctggagaaggtgaaagaaactatggataccaatggctgtaactcagttttgagaatggagtctccctgtaacaccaatgacagtaaatcattatccagagtggaccctccacaagtggagttgacttcctgcagtgatctggagaaggccactgaaaatattaagatggacgaagttgatgagaatgcgttgagtctgacagaagatgtaagcacattagtacatgcaccactaagcaatgataatgtaaataaaaatatgccaaagccagtgagaaattttgatcgagaggagaaacagatccaggatttgaaaagtaacatgtccacagttaagtgttgcatggagcagttaaaactgctgtactctgaagaccttaaaaagcttgtttgttcaggaaaaccgcaagctttacaaccaaatacaagaccttacagccaagtcaaacgaggaaggaggtgaaggaggagaagaagttagagagctcaaagaacagattgcttgcctcagggcagcattagctaggaaagatggaggtcaagagagcattcgaagcactcaatcaagcccagacatatatagaatgagaacgggcaatggattacctgcgttgaggcacccaatagtagatggaagtatagagaacgactcggcattgggagatttcgctgagcactcgccattcgggagcagcaattcgctgccagagttgggaccagatggcacacaagatctagccttctaccaaagaagcagccctgaacagcaatggagctggtccgggtctgttgcaacagaggattccgatgacttcgaggttgcaacgaattgctcgtcagatctggattgcgtgagaccatctagtgccccaaaagcttctggtttaacaaacggagggggctcagctgcaagaaagtcccaactgaagggtgcaaaaagttcagacatcagaggagggaatcctgcaaaaaagtcatcgcccttacagaaaaagctgagtgctccctcaccaacggtaactaagaagagcggaactgaaggaaagaaaactccaaatggaaaaacaggagccaagaagtaagcaactcagttgaaacttcgttttgttgggaccaacttcaccatggccggggacagataaacatgttgatcctatctactgggtgatacattggtgttttgacacacggatatgtcagtcctattggttgagagagcatgctgnn

SEQ ID NO: 38516 - DNA, 200 bp, Zea Mays
cgagctagattactgcagatttttttgcagattttttttcctggaacacagtagagagctacgtatcattatattaagaagcaagagattacggcaggttgacagacaggtatactgaatgtatatagagaagagagcttgtcgaatccggccggaacctgagagaacgtgaagcaggtgtcacggggccacgacgcatg

SEQ ID NO: 38517 - DNA, 182 bp, Zea Mays
gtttttccaggatccagaatagtctactttactattttaaattttgaatttcagtacaagattgttttatatgtaatttcagattctaactcgtataagtgcgtctaaattcgatatttagactgcaaactattacatatattgtacatacctgactgtttattatgaatataatagacttt

SEQ ID NO: 38518 - DNA, 983 bp, Zea Mays
ggaagacaggtggggatggtggtgactgctccatgagacccttgctgaagaattcctcaggtgtggtggccatggtgatcaaatgtagtgcagtcagtggttcagtagccaagatgaagagaggacttctaatttggtcaatggttccaacagttccaatgctgcatggatagcggagatgatggctagcgatttttccaatgttgcttggctaatggttccaaaatctagcatttgttttactttacctattgaaaataacaaagcaagaagataccattgtgcaacgcgaagctaaacaagagcaagaatatgctgttgtacaacgcgaagcatatttaaataaagctttacaggcaaatatatgtgaagtagtaatagtgatcagcaaaacagtaaaggagctgagtttggacgcaagcaataaacatcttcaataggtgcttatataactttttttctttttgcaaatgtgaaagaaggtacgtacaggactgcaagctgagaggcgcaggtagcgcagaggaaggatctcactggccgcggcatttccgcaaacaccttgggctcgctgcccagtacacgccagttacacggcacaccggcacctgctacgtggctctgacaggcacggccaaagcaccctaggaaaatcacggcgtctccgtgaccactgttcgcgctctccccttccagcgatgtgttatgtaccttgcaggctcgcagtcgtggggtcgtctgttccgcctctcgagagagcgtagataggtgtagcgcgcgtgagttgtggacatggcgcgtgctgcaggagccagccagagaggaaacccagagaaacgagccgggcaacgggctggcggcggagcggaggtcccgagagctctctcctgcgatgcaacgatctgggccgcacgcgctagatcggacgtcaggtaggcacgcacagagggggctcaacggtgtttgagagaaaccaggcgtcc

SEQ ID NO: 38519 - DNA, 2303 bp, Zea Mays
gctagccgaagctccgagtcggtcaatctatttccaccagtccccatccagtacaggccagcactgccgctgccgtgtcgccaccggcccccggctggctctccagcgactccgtcggcggcttgccttcccgcgccgcgccgggcccggatcgctcgccctttccgactgtcctgctcaacgccgccaccagcacgtcctttcccgcgccggaggtcccgctcgcctgccacagcggtgcggcgcaagctcccccaagcgtttctcaagtgacgagaagaagaaagagggggagaaggaggttggcgtcagtgggtcccgcggaccaatcagctagagagctgagtgatgtctcgcaagcgatgagcctcatgagatcggatcggaggccatcattccacgcactggtgatgaaaagctcgcttggtgcccctagctagctagtggcgaagcaaggaagctagccagccaagatcctgcttgtgagaaaaaaaagggagtagatccagtaattttaagaatctggtcaacatacctacggcaagatggctgatattgtaatccgcgacctggagagggtagtcaaagtcgcacttgcgatcaagaaggccgtggaaacagctaagcagaacaaggaggattgcgttaagatcggtgagcgtgcagctgaggtcagtactcatatgaagcggctgaaggagaatacaaaagcaatggaggaccctttgatgagcgatacgctcaagagtatggaagagacactccaacgcgctcttaagctcgtcaacgagtgccagaggaagcacgtcgtgctccattacttaaatgccggcggcatgtccaagaagctgcgccaggtgcaggaggatatatcatataaattgtggaatggggtcttggccaccgttgtcgacacaaggattgctttggaaaagcagatccaatctgctattgatgcccctctgcaccaacaccaacagcgtgcagggcaggtggaaacctcacaaagtagtcattcaagaactgatcaagctagcgagaaaggaaaggccatgttagcaagagtaaaaagggagcagtctgaacttttgtctgggagtattacacgacggactagatgttgccatcaagaagttagcagtctctgatgatactcaagagaggcgcctgcaacttgagcttaatattcgtgcaaagcttgaacatggaaacatacttaaacttctgggatattgcctcgatgcccaagaaaaagaaaagctatactttctggtcgaagaatacataccgaatgttgaaagcttggagaaatttattaatgtctctcgactcgattggtcctcgtgtttcaagataattcaggggatagcaaagggcttacattgcttacataagcatcatattctctatatggatttgaatccagccaacatcctcgtccgttcagatatgaatcctgtggtcatcaattttggatcatcaatagtgctggatcgtgatgatgataaggtcaccggggatgccgtagcaggcacactgggttatgtcgctccagaaaaacttatggaagcttatgcatcaatgatgtctgatgtgttctcttttggaatcatcatcattgagatcattaccggcaggagagcttcacctttcgttgatttaccggaatggggttcagttgatgagatgattacatcagcgaaagggttatttgatccggcgctagctaacgagtctcagctgatgaagattaataggtgcagagaggtcggactgaagtgcattgagcgggatccgaaacgtcggcctaccatgggaaatgtccttgagatgctaagtagctagagtgacaggcaccgatttgaggtgttctcggttaggagtggattgaagcggattagagataatcaaatctcttgctagtcaaaactgaatagaaatgggtttactttccctcaatcccctcctacctatgcaaccaaacaaggccttatgggtttcaacaatttggtttgatgtattgtcacaaattgatcatttgtaacattcaagatttatgcgcaaatgtattggcgtgtggattagagagtttctatcttataggctggctcttgaatgatatggcaaacataagctagcaaaccagttcaactactgagggtgcacatgaacctcgtgtttactagcatttttttttcgtatgctatttcctagttcaagtttgcatctcaaacctttttcatgtatgtacatgtattgtaaatgtgtcaagtgttaattttattgaaacaattgaaatgtgt

SEQ ID NO: 38520 - DNA, 2360 bp, Zea Mays
gctagccgaagctccgagtcggtcaatctatttccaccagtccccatccagtacaggccagcactgccgctgccgtgtcgccaccggcccccggctggctctccagcgactccgtcggcggcttgccttcccgcgccgcgccgggcccggatcgctcgccctttccgactgtcctgctcaacgccgccaccagcacgtcctttcccgcgccggaggtcccgctcgcctgccacagcggtgcggcgcaagctcccccaagcgtttctcaagtgacgagaagaagaaagagggggagaaggaggttggcgtcagtgggtcccgcggaccaatcagctagagagctgagtgatgtctcgcaagcgatgagcctcatgagatcggatcggaggccatcattccacgcactggtgatgaaaagctcgcttggtgcccctagctagctagtggcgaagcaaggaagctagccagccaagatcctgcttgtgagaaaaaaaagggagtagatccagtaattttaagaatctggtcaacatacctacggcaagatggctgatattgtaatccgcgacctggagagggtagtcaaagtcgcacttgcgatcaagaaggccgtggaaacagctaagcagaacaaggaggattgcgttaagatcggtgagcgtgcagctgaggtcagtactcatatgaagcggctgaaggagaatacaaaagcaatggaggaccctttgatgagcgatacgctcaagagtatggaagagacactccaacgcgctcttaagctcgtcaacgagtgccagaggaagcacgtcgtgctccattacttaaatgccggcggcatgtccaagaagctgcgccaggtgcaggaggatatatcatataaattgtggaatggggtcttggccaccgttgtcgacacaaggattgctttggaaaagcagatccaatctgctattgatgcccctctgcaccaacaccaacagcgtgcagggcaggtggaaacctcacaaagtagtcattcaagaactgatcaagctagcgagaaaggaaaggccatgttagcaagagtaaaaagggagcagtctgaacttttgtctggtgttcctcagttcagtttgtctcaactgaacgctgctacaaacgaattttcagagggctgtgtggttgaaagaggctactacaagggagtattacacgacggactagatgttgccatcaagaagttagcagtctctgatgatactcaagagaggcgcctgcaacttgagcttaatattcgtgcaaagcttgaacatggaaacatacttaaacttctgggatattgcctcgatgcccaagaaaaagaaaagctatactttctggtcgaagaatacataccgaatgttgaaagcttggagaaatttattaatgtctctcgactcgattggtcctcgtgtttcaagataattcaggggatagcaaagggcttacattgcttacataagcatcatattctctatatggatttgaatccagccaacatcctcgtccgttcagatatgaatcctgtggtcatcaattttggatcatcaatagtgctggatcgtgatgatgataaggggttatgtcgctccagaaaaacttatggaagcttatgcatcaatgatgtctgatgtgttctcttttggaatcatcatcattgagatcattaccggcaggagagcttcacctttcgttgatttaccggaatggggttcagttgatgagatgattacatcagcgaaagggttatttgatccggcgctagctaacgagtctcagctgatgaagattaataggtgcagagaggtcggactgaagtgcattgagcgggatccgaaacgtcggcctaccatgggaaatgtccttgagatgctaagtagctagagtgacaggcaccgatttgaggtgttctcggttaggagtggattgaagcggattagagataatcaaatctcttgctagtcaaaactgaatagaaatgggtttactttccctcaatcccctcctacctatgcaaccaaacaaggccttatgggtttcaacaatttggtttgatgtattgtcacaaattgatcatttgtaacattcaagatttatgcgcaaatgtattggcgtgtggattagagagtttctatcttataggctggctcttgaatgatatggcaaacataagctagcaaaccagttcaactactgagggtgcacatgaacctcgtgtttactagcatttttttttcgtatgctatttcctagttcaagtttgcatctcaaacctttttcatgtatgtacatgtattgtaaatgtgtcaagtgttaattttattgaaacaattgaaatgtgt

SEQ ID NO: 38521 - DNA, 1776 bp, Zea Mays
gctagccgaagctccgagtcggtcaatctatttccaccagtccccatccagtacaggccagcactgccgctgccgtgtcgccaccggcccccggctggctctccagcgactccgtcggcggcttgccttcccgcgccgcgccgggcccggatcgctcgccctttccgactgtcctgctcaacgccgccaccagcacgtcctttcccgcgccggaggtcccgctcgcctgccacagcggtgcggcgcaagctcccccaagcgtttctcaagtgacgagaagaagaaagagggggagaaggaggttggcgtcagtgggtcccgcggaccaatcagctagagagctgagtgatgtctcgcaagcgatgagcgtgcagggcaggtggaaacctcacaaagtagtcattcaagaactgatcaagctagcgagaaaggaaaggccatgttagcaagagtaaaaagggagcagtctgaacttttgtctggtgttcctcagttcagtttgtctcaactgaacgctgctacaaacgaattttcagagggctgtgtggttgaaagaggctactacaagggagtattacacgacggactagatgttgccatcaagaagttagcagtctctgatgatactcaagagaggcgcctgcaacttgagcttaatattcgtgcaaagcttgaacatggaaacatacttaaacttctgggatattgcctcgatgcccaagaaaaagaaaagctatactttctggtcgaagaatacataccgaatgttgaaagcttggagaaatttattaatgtctctcgactcgattggtcctcgtgtttcaagataattcaggggatagcaaagggcttacattgcttacataagcatcatattctctatatggatttgaatccagccaacatcctcgtccgttcagatatgaatcctgtggtcatcaattttggatcatcaatagtgctggatcgtgatgatgataaggtcaccggggatgccgtagcaggcacactgggttatgtcgctccagaaaaacttatggaagcttatgcatcaatgatgtctgatgtgttctcttttggaatcatcatcattgagatcattaccggcaggagagcttcacctttcgttgatttaccggaatggggttcagttgatgagatgattacatcagcgaaagggttatttgatccggcgctagctaacgagtctcagctgatgaagattaataggtgcagagaggtcggactgaagtgcattgagcgggatccgaaacgtcggcctaccatgggaaatgtccttgagatgctaagtagctagagtgacaggcaccgatttgaggtgttctcggttaggagtggattgaagcggattagagataatcaaatctcttgctagtcaaaactgaatagaaatgggtttactttccctcaatcccctcctacctatgcaaccaaacaaggccttatgggtttcaacaatttggtttgatgtattgtcacaaattgatcatttgtaacattcaagatttatgcgcaaatgtattggcgtgtggattagagagtttctatcttataggctggctcttgaatgatatggcaaacataagctagcaaaccagttcaactactgagggtgcacatgaacctcgtgtttactagcatttttttttcgtatgctatttcctagttcaagtttgcatctcaaacctttttcatgtatgtacatgtattgtaaatgtgtcaagtgttaattttattgaaacaattgaaatgtgt

SEQ ID NO: 38522 - DNA, 1743 bp, Zea Mays
ttttcttgtagcgcgctgagcaacgcaagtaagatggccggcaagcgccgccatcctgccatcgggatcgatctgggcacgacctactcctgcattggggtgtggcagaacgaccgcgtggagatcatcgccaacgaccaaggcaaccgaaccaccccatcctacgtcgccttcaccggctccaggcgcctcatcggggatgctgccaagaaccaggccgaaatgaaccccagcaacacaatcttcggtgggtgccattccaagcggctcattggtagaagatttagcgatgcttctgtacagagtgacattaagcactggcccttcaaggtcatttctggacctgatgacaagcctctgattgttgttcagtacaggggtgtggagcatcagtttgcagctgaagagatctcctcgatggttctcgtcaagatgcgggagactgctgaagcctatcttggcaccaccatcagggatgccgttgtcactgttcctgcctgctccacggacttgcagaggcaggccacctggaatgccggagtgcttgctagtctcaatgttatgcgcatcatccctgagcccactgctgctgctttggcttatggtcttgacaggaagtctgctcaggttcagggtttatacaatgttctcgtgtttgaccttggaggtggtacctttgatgtctctgttctcgacaaagtggagggtgtctttgaggtcttagccacagctggtgccgctcaccttggaggtgaggacttcgacaaccggatggtgaaccactttgttcaggaattcaagagaaagacgaaggaggacatcagtggcaaccccagggctctcaggagactaaggacggcctgcgagagggcgaagaggaccctctcctccactttagaggccaccattgagattgactgtttgtacgaggacatcaacttctactcaaccatcactcgcgccaggtttgaggagctcaacatggatctcttcaggaagtgcattgacattgtggaggactgcctcagcgatgctaaaatggacgtgggctcggttcatgatgttgtccttgttggtggctcctctagaattccaaaggtccagcagtttctccaagagctcttcaacgggaagaagcttttcaagagcatcaaccctgacgaggctgttgcttacggagctactatccaggctgcaatcatgagtggagaggatgagatacaggactacctcatgaacgatgctacgcctctttctcttgggttggccacggatgggggtgtgatgaccgtgctgattccgaagaacgcaaccatccccacaaggaaggaggtggtcttgtcaactgactccgacaaccagccttgtatccgtatccaggtgtacgaaggtgagggggccatggctcgcgacaacaacctgttgggtgagtttgagttctccattcctccagcccccaagggtgttccacagatcactattacatttcatatcgatgccgactgcatcctcgatgtcgcagctgaggacaaaactaccggcgagaagatgaggaaaaccatcaccaagaggttccgtttaaagcattaaattatttattatttatcaccatatgtaattaaaaagagatgaactctagaaattctgacagaaattagaaacatagcaattttctaattttagtttcatagacattaatgatcaacgccaataatatccaatgggtggagtcttttgggtgct

SEQ ID NO: 38523 - DNA, 1342 bp, Zea Mays
ttttcttgtagcgcgctgagcaacgcaagtaagatggccggcaagcgccgccatcctgccatcgggatcgatctgggcacgacctactcctgcattggggtgtggcagaacgaccgcgtggagatcatcgccaacgaccaaggcaaccgaaccaccccatcctacgtcgccttcaccggctccaggcgcctcatcggggatgctgccaagaaccaggccgaaatgaaccccagcaacacaatcttcgattccaagcggctcattggtagaagatttagcgatgcttctgtacagagtgacattaagcactggcccttcaaggtcatttctggacctgatgacaagcctctgattgttgttcagtacaggggtgtggagcatcagtttgcagctgaagagatctcctcgatggttctcgtcaagatgcgggagactgctgaagcctatcttggcaccaccatcagggatgccgttgtcactgttcctgcctgctccacggacttgcagaggcaggccacctggaatgccggagtgcttgctagtctcaatgttatgcgcatcatccctgagcccactgctgctgctttggcttatggtcttgacaggaagtctgctcaggttcagggtttatacaatgttctcgtgtttgaccttggaggtggtacctttgatgtctctgttctcgacaaagtggagggtgtctttgaggtcttagccacagctggtgccgctcaccttggaggtgaggacttcgacaaccggatggtgaaccactttgttcaggaattcaagagaaagacgaaggaggacatcagtggcaaccccagggctctcaggagactaaggacggcctgcgagagggcgaagaggaccctctcctccactttagaggccaccattgagattgactgtttgtacgaggacatcaacttctactcaaccatcactcgcgccaggtttgaggagctcaacatggatctcttcaggaagtgagggggccatggctcgcgacaacaacctgttgggtgagtttgagttctccattcctccagcccccaagggtgttccacagatcactattacatttcatatcgatgccgactgcatcctcgatgtcgcagctgaggacaaaactaccggcgagaagatgaggaaaaccatcaccaagaggttccgtttaaagcattaaattatttattatttatcaccatatgtaattaaaaagagatgaactctagaaattctgacagaaattagaaacatagcaattttctaattttagtttcatagacattaatgatcaacgccaataatatccaatgggtggagtcttttgggtgct

SEQ ID NO: 38524 - DNA, 1602 bp, Zea Mays
ttttcttgtagcgcgctgagcaacgcaagtaagatggccggcaagcgccgccatcctgccatcgggatcgatctgggcacgacctactcctgcattggggtgtggcagaacgaccgcgtggagatcatcgccaacgaccaaggcaaccgaaccaccccatcctacgtcgccttcaccggctccaggcgcctcatcggggatgctgccaagaaccaggccgaaatgaaccccagcaacacaatcttcgattccaagcggctcattggtagaagatttagcgatgcttctgtacagagtgacattaagcactggcccttcaaggtcatttctggacctgatgacaagcctctgattgttgttcagtacaggggtgtggagcatcagtttgcagctgaagagatctcctcgatggttctcgtcaagatgcgggagactgctgaagcctatcttggcaccaccatcagggatgccgttgtcactgttcctgcctgctccacggacttgcagaggcaggccacctggaatgccggagtgcttgctagtctcaatgttatgcgcatcatccctgagcccactgctgctgctttggcttatggtcttgacaggaagtctgctcaggttcagggtttatacaatgttctcgtgtttgaccttggaggtggtacctttgatgtctctgttctcgacaaagtggagggtgtctttgaggtcttagccacagctggtgccgctcaccttggaggtgaggacttcgacaaccggatggtgaaccactttgttcaggaattcaagagaaagacgaaggaggacatcagtggcaaccccagggctctcaggagactaaggacggcctgcgagagggcgaagaggaccctctcctccactttagaggccaccattgagattgactgtttgtacgaggacatcaacttctactcaaccatcactcgcgccaggtttgaggagctcaacatggatctcttcaggaagtgcattgacattgtggaggactgcctcagcgatgctaaaatggacgtgggctcggttcatgatgttgtccttgttggtggctcctctagaattccaaaggtccagcagtttctccaagagctcttcaacgggaagaagcttttcaagagcatcaaccctgacgaggctgttgcttacggagctactatccaggctgcaatcatgagtggagaggatgagatacaggactacctcatgaacgatgctacgcctctttctcttgggttggccacggatgggggtgtgatgaccgtgctgattccgaagaacgcaaccatccccacaaggaaggaggtggtcttgtcaactgactccgacaaccagccttgtatccgtatccaggtgtacgaagctgaggacaaaactaccggcgagaagatgaggaaaaccatcaccaagaggttccgtttaaagcattaaattatttattatttatcaccatatgtaattaaaaagagatgaactctagaaattctgacagaaattagaaacatagcaattttctaattttagtttcatagacattaatgatcaacgccaataatatccaatgggtggagtcttttgggtgct

SEQ ID NO: 38525 - DNA, 4510 bp, Zea Mays
cctcctctcattgacacaaaaaggcttaaggaaaaaaaaccattttccggaggagaaaaaacccccgagaagaagaattcctctcgctcgaggggtgggaaagaagcggaaggggagacgagtcgagaggaagccctcgcctccggcacacgccatggtggagactcgccggagctccgccgccgccgccgggaagcgcacgtctccatcgccatcctcttcgtccgtacctcccccgaagcgctccaaggcggagtcctcggggtcaccgacggcgtccgcgcccggcagggccgaggaggattctgtggcgggagcggcacccgcgaggagcgccggctcggtcgatgacgcggcagcggtcgcacagaaagatcaaggagtcgataagccgtcttccgccgctgcagagagttcaaagcggaggaaggagcaggagcaacagcaacccgcagtgccatgggcgaagctgctctcggagtgctcacagactcctcactatcccatcagtgtggatcagatttctgttggtcaaagcaaaaactgtaatttgtggctgaaagaccaacctgttagcaaagtgctttgcaagctgcggcgccttgagcaaggaggtccatgtgagttagaagttatagggaagaagggtatggtccaattaaatggaaggtccgtaagtccaggcacaaaagttccccttacaggaggggatgaagtcatattcagttcatgcggcaagcatacttatatttttctttatcctttgaatgacaaagttcctaaaacggtgctatcatctgctgttagccttctagaagctcctgttgctagtgtaaagcgtatccgtacagataagagaacaggagacacttcagctgttgctggtacagagatgatgacatctacatctaatcagaaggatgtagcagcagtacctcccgcgtcagctggagagaacagccaaagagtagtgcggccattggcatcatctgcttctgataaattgaaagggcgtgctgtgagccctgaaaaggaatttgcgaatggggaaaatgctaatgaggttaattctaacatcgaagactctccaatggttgttgctgcagcccccatatctcctgatgctgctgcgaacgatacctgtcaacaaaatggctttgtctctgattctcatctcggtgcggaaatcgctcttgaagatcagagggatcacatcatcagggagcttaacgcttcaaccaacgtgcctccaagtagatgccaagcctttaaggatgggatgaaacaaggaattatcaatccaagtgatattgatgtcacctttgagaattttccttattatctcagtgagaatacaaagaatgtgctcttgtcatctgcgttcatacacttaaaaaagaaggagttcatcaagcaatttgttgagatctcatcaataaaccagcgaattttgttatctggtccagcaggttccgagatttatcaggaaacattggtaaaggcacttgccaaacattttagtgctagactccttgtggtggattcacttttgctgcctggggcaccttcaaaggatccagaattccagaaagatgttgggaaggctgataaatcaggggataaggcagctgccgagaagtttgcaatatatcagaagcatcgttcttcgttggcagacactgttcacttcaggaggccagctgcaccaacttctagtgtgaatgctgatattgtaggaacatccactctgcattctgcatctctaccaaaacaggaatcgtcaacagctacatccaagagttatacttttagagaaggtgatagggtgcgttatgtgggtccagctcaaccatgctcgttgtcacaaaggggaccaagttatggttatcgaggtagagtgatgcttgcttttgaagataatggatcctcaaaaattggagtccggtttgacaagcagatccctgatggtaatgatcttggtggtttgtgcgaggaagatcatggcttcttctgctctgctgaattactgcgcccagacttttctgctggtgaagaagttgagaggctagctatgaccgagttaatagaggtcatttcagaagagaacaaatctggacctctgatagtgttacttaaggatgtcgagaaatcattcacgggggttacagagtcactatcatctttgaggagcaaacttgaatcgcttccacctggtgttcttattataggatcccacacccagatggacagccgcaaagagaaggcacatcctggaggttttcttttcacgaagtttgccagtagtagccagactctttttgaccttttcccggatagctttggtagcaggttgcatgaaagaagcaaagaaagtccgaaaacaatgaaacatctaaataaacttttcccaaacaaaattttgatccagcttccacaggatgaagctctacttacagattggaagcagcagttggatcgtgatgttgaaacccttaaagccaaatcaaatattggtagcattcgcatgtttctgagccgcaatggaattgaatgcaatgatcttgaagaattattcatcaaagaccaatcattgagtaatgaaaatgtggacaagattgttgggtacgcagtaagttatcaccttaatcagaataaaattgaaacctctaaggatgccaaacttgtactcacaactgaaagccttaagcatgggctcaacatgctccaaagcatgcaaaatgataacaagagctccaaaaaatcactgaaggatgttgtcacagagaatgagtttgagaaaaggcttttggcagatgttatacctccaaatgacattggagttacctttgatgatattggagccttggagaatgtaaaggacacgttaaaggagctggtgatgctccctttgcaaagacctgagttgttctgcaaagggcagttaacaaagccttgcaaggggatattgcttttcggacctcctggcactggaaaaactatgcttgccaaagcagtagcaactgaagcaggcgctaatttcatcaatatatcaatgtcgagcattacatcgaagtggtttggtgaaggggagaagtatgtaaaggctgttttctcactagcaagtaaaatagcacccagtgttatatttattgatgaggtcgatagtatgctaggaaggagagaaaatccaggggagcatgaagcgatgcgcaagatgaagaatgaatttatggtaaattgggatgggttgcgcactaaagataaggagcgtgtgcttgttcttggtgctacaaataggccttttgacctcgacgaggctgtgattaggaggttcccccgcaggttaatggtaaacttgcccgatgcatcaaatagggagaaaattctaaaagtaattttggcaaaagaagagctgggatctgatgttgatatggactcgcttgccaatatgactgatggttattcaggaagcgacctgaagaatctgtgtgtgaccgcggcgcattaccccatccgagaaattctggagaaggaaaagaaggagaagaatttggctaaaacagaaggtaggccggagcctgcattatatggaagcgaggacatccgccctcttagcatagatgacttcaaatctgcccatgagcaggtttgtgcgagcgtttcgtccgactcggcgaacatgaacgagctccttcaatggaacgacctgtacggcgaaggcgggtcaaggaagaagaaagcgctgagctacttcatgtgatggggtgagagcatagaatccagaaggatcacagccgtggcataagatcagaaggaacacagagcggccatagtaccacacccactatggccctaaatccagtcaagttttcgctccttccccctccctcagtagccgccgccgccccgccgccgcctggtgtaattagaactgtgtacggagtcgagttggtttgccagctgtttcaaggttacagagttgagatttggaattacaatggcgccattgccctcctccaacccccccccccccccccccccccccccgttttcttcctcccataagttgcggtcactgtccttcttggactctctggcctttgttcttgtaaatgcgaaatgaagggatgtgaaataagaacatcttcgtcctgttgttgacagtatggtacacatatttaatttttgtacttgaccggcgatgataaattggatcggtgccaacataagaattatggaaaggtgcctttcctgcccgccgaaatctgtgtgtatgtcgagtgggctgggtattgtgaggtgaaattttatgcgtctcctgtcgtcttgtggttgcgaaatgcgtgggagcaaacgtccggcataatgaactttcgtcatttcttatggctgcgaaatgcatgggttcggtatgtatgaattttctctgtcataatgaacttggattctgataacggtgcattgcacagatttcattttttttcttacgtaaacacttcggttctttcta

SEQ ID NO: 38526 - DNA, 4564 bp, Zea Mays
aaaaaaaccattttccggaggagaaaaaacccccgagaagaagaattcctctcgctcgaggggtgggaaagaagcggaaggggagacgagtcgagaggaagccctcgcctccggcacacgccatggtggagactcgccggagctccgccgccgccgccgggaagcgcacgtctccatcgccatcctcttcgtccgtacctcccccgaagcgctccaaggcggagtcctcggggtcaccgacggcgtccgcgcccggcagggccgaggaggattctgtggcgggagcggcacccgcgaggagcgccggctcggtcgatgacgcggcagcggtcgcacagaaagatcaaggagtcgataagccgtcttccgccgctgcagagagttcaaagcggaggaaggagcaggagcaacagcaacccgcagtgccatgggcgaagctgctctcggagtgctcacagactcctcactatcccatcagtgtggatcagatttctgttggtcaaagcaaaaactgtaatttgtggctgaaagaccaacctgttagcaaagtgctttgcaagctgcggcgccttgagcaaggaggtccatgtgagttagaagttatagggaagaagggtatggtccaattaaatggaaggtccgtaagtccaggcacaaaagttccccttacaggaggggatgaagtcatattcagttcatgcggcaagcatacttatatttttctttatcctttgaatgacaaagttcctaaaacggtgctatcatctgctgttagccttctagaagctcctgttgctagtgtaaagcgtatccgtacagataagagaacaggagacacttcagctgttgctggtacagagatgatgacatctacatctaatcagaaggatgtagcagcagtacctcccgcgtcagctggagagaacagccaaagagtagtgcggccattggcatcatctgcttctgataaattgaaagggcgtgctgtgagccctgaaaaggaatttgcgaatggggaaaatgctaatgaggttaattctaacatcgaagactctccaatggttgttgctgcagcccccatatctcctgatgctgctgcgaacgatacctgtcaacaaaatggctttgtctctgattctcatctcggtgcggaaatcggtaagactgcaacctataagataaggccagttctgaggatgattacaggatcaactatatccgagttcgatttgactggtgatgatctttttaaagctcttgaagatcagagggatcacatcatcagggagcttaacgcttcaaccaacgtgcctccaagtagatgccaagcctttaaggatgggatgaaacaaggaattatcaatccaagtgatattgatgtcacctttgagaattttccttattatctcagtgagaatacaaagaatgtgctcttgtcatctgcgttcatacacttaaaaaagaaggagttcatcaagcaatttgttgagatctcatcaataaaccagcgaattttgttatctggtccagcaggttccgagatttatcaggaaacattggtaaaggcacttgccaaacattttagtgctagactccttgtggtggattcacttttgctgcctggggcaccttcaaaggatccagaattccagaaagatgttgggaaggctgataaatcaggggataaggcagctgccgagaagtttgcaatatatcagaagcatcgttcttcgttggcagacactgttcacttcaggaggccagctgcaccaacttctagtgtgaatgctgatattgtaggaacatccactctgcattctgcatctctaccaaaacaggaatcgtcaacagctacatccaagagttatacttttagagaaggtgatagggtgcgttatgtgggtccagctcaaccatgctcgttgtcacaaaggggaccaagttatggttatcgaggtagagtgatgcttgcttttgaagataatggatcctcaaaaattggagtccggtttgacaagcagatccctgatggtaatgatcttggtggtttgtgcgaggaagatcatggcttcttctgctctgctgaattactgcgcccagacttttctgctggtgaagaagttgagaggctagctatgaccgagttaatagagaagagaacaaatctggacctctgatagtgttacttaaggatgtcgagaaatcattcacgggggttacagagtcactatcatctttgaggagcaaacttgaatcgcttccacctggtgttcttattataggatcccacacccagatggacagccgcaaagagaaggcacatcctggaggttttcttttcacgaagtttgccagtagtagccagactctttttgaccttttcccggatagctttggtagcaggttgcatgaaagaagcaaagaaagtccgaaaacaatgaaacatctaaataaacttttcccaaacaaaattttgatccagcttccacaggatgaagctctacttacagattggaagcagcagttggatcgtgatgttgaaacccttaaagccaaatcaaatattggtagcattcgcatgtttctgagccgcaatggaattgaatgcaatgatcttgaagaattattcatcaaagaccaatcattgagtaatgaaaatgtggacaagattgttgggtacgcagtaagttatcaccttaatcagaataaaattgaaacctctaaggatgccaaacttgtactcacaactgaaagccttaagcatgggctcaacatgctccaaagcatgcaaaatgataacaagagctccaaaaaatcactgaaggatgttgtcacagagaatgagtttgagaaaaggcttttggcagatgttatacctccaaatgacattggagttacctttgatgatattggagccttggagaatgtaaaggacacgttaaaggagctggtgatgctccctttgcaaagacctgagttgttctgcaaagggcagttaacaaagccttgcaaggggatattgcttttcggacctcctggcactggaaaaactatgcttgccaaagcagtagcaactgaagcaggcgctaatttcatcaatatatcaatgtcgagcattacatcgaagtggtttggtgaaggggagaagtatgtaaaggctgttttctcactagcaagtaaaatagcacccagtgttatatttattgatgaggtcgatagtatgctaggaaggagagaaaatccaggggagcatgaagcgatgcgcaagatgaagaatgaatttatggtaaattgggatgggttgcgcactaaagataaggagcgtgtgcttgttcttggtgctacaaataggccttttgacctcgacgaggctgtgattaggaggttcccccgcaggttaatggtaaacttgcccgatgcatcaaatagggagaaaattctaaaagtaattttggcaaaagaagagctgggatctgatgttgatatggactcgcttgccaatatgactgatggttattcaggaagcgacctgaagaatctgtgtgtgaccgcggcgcattaccccatccgagaaattctggagaaggaaaagaaggagaagaatttggctaaaacagaaggtaggccggagcctgcattatatggaagcgaggacatccgccctcttagcatagatgacttcaaatctgcccatgagcaggtttgtgcgagcgtttcgtccgactcggcgaacatgaacgagctccttcaatggaacgacctgtacggcgaaggcgggtcaaggaagaagaaagcgctgagctacttcatgtgatggggtgagagcatagaatccagaaggatcacagccgtggcataagatcagaaggaacacagagcggccatagtaccacacccactatggccctaaatccagtcaagttttcgctccttccccctccctcagtagccgccgccgccccgccgccgcctggtgtaattagaactgtgtacggagtcgagttggtttgccagctgtttcaaggttacagagttgagatttggaattacaatggcgccattgccctcctccaacccccccccccccccccccccccccccgttttcttcctcccataagttgcggtcactgtccttcttggactctctggcctttgttcttgtaaatgcgaaatgaagggatgtgaaataagaacatcttcgtcctgttgttgacagtatggtacacatatttaatttttgtacttgaccggcgatgataaattggatcggtgccaacataagaattatggaaaggtgcctttcctgcccgccgaaatctgtgtgtatgtcgagtgggctgggtattgtgaggtgaaattttatgcgtctcctgtcgtcttgtggttgcgaaatgcgtgggagcaaacgtccggcataatgaactttcgtcatttcttatggctgcgaaatgcatgggttcggtatgtatgaattttctctgtcataatgaacttggattctgataacggtgcattgcacagatttcattttttttcttacgtaaacacttcggttctttcta

SEQ ID NO: 38527 - DNA, 4298 bp, Zea Mays
ccatcgccatcctcttcgtccgtacctcccccgaagcgctccaaggcggagtcctcggggtcaccgacggcgtccgcgcccggcagggccgaggaggattctgtggcgggagcggcacccgcgaggagcgccggctcggtcgatgacgcggcagcggtcgcacagaaagatcaaggagtcgataagccgtcttccgccgctgcagagagttcaaagcggaggaaggagcaggagcaacagcaacccgcagtgccatgggcgaagctgctctcggagtgctcacagactcctcactatcccatcagtgtggatcagatttctgttggtcaaagcaaaaactgtaatttgtggctgaaagaccaacctgttagcaaagtgctttgcaagctgcggcgccttgagcaaggaggtccatgtgagttagaagttatagggaagaagggtatggtccaattaaatggaaggtccgtaagtccaggcacaaaagttccccttacaggaggggatgaagtcatattcagttcatgcggcaagcatacttatatttttctttatcctttgaatgacaaagttcctaaaacggtgctatcatctgctgttagccttctagaagctcctgttgctagtgtaaagcgtatccgtacagataagagaacaggagacacttcagctgttgctggtacagagatgatgacatctacatctaatcagaaggatgtagcagcagtacctcccgcgtcagctggagagaacagccaaagagtagtgcggccattggcatcatctgcttctgataaattgaaagggcgtgctgtgagccctgaaaaggaatttgcgaatggggaaaatgctaatgaggttaattctaacatcgaagactctccaatggttgttgctgcagcccccatatctcctgatgctgctgcgaacgatacctgtcaacaaaatggctttgtctctgattctcatctcggtgcggaaatcgctcttgaagatcagagggatcacatcatcagggagcttaacgcttcaaccaacgtgcctccaagtagatgccaagcctttaaggatgggatgaaacaaggaattatcaatccaagtgatattgatgtcacctttgagaattttccttattatctcagtgagaatacaaagaatgtgctcttgtcatctgcgttcatacacttaaaaaagaaggagttcatcaagcaatttgttgagatctcatcaataaaccagcgaattttgttatctggtccagcaggttccgagatttatcaggaaacattggtaaaggcacttgccaaacattttagtgctagactccttgtggtggattcacttttgctgcctggggcaccttcaaaggatccagaattccagaaagatgttgggaaggctgataaatcaggggataaggcagctgccgagaagtttgcaatatatcagaagcatcgttcttcgttggcagacactgttcacttcaggaggccagctgcaccaacttctagtgtgaatgctgatattgtaggaacatccactctgcattctgcatctctaccaaaacaggaatcgtcaacagctacatccaagagttatacttttagagaagggtgcgttatgtgggtccagctcaaccatgctcgttgtcacaaaggggaccaagttatggttatcgaggtagagtgatgcttgcttttgaagataatggatcctcaaaaattggagtccggtttgacaagcagatccctgatggtaatgatcttggtggtttgtgcgaggaagatcatggcttcttctgctctgctgaattactgcgcccagacttttctgctggtgaagaagttgagaggctagctatgaccgagttaatagaggtcatttcagaagagaacaaatctggacctctgatagtgttacttaaggatgtcgagaaatcattcacgggggttacagagtcactatcatctttgaggagcaaacttgaatcgcttccacctggtgttcttattataggatcccacacccagatggacagccgcaaagagaaggcacatcctggaggttttcttttcacgaagtttgccagtagtagccagactctttttgaccttttcccggatagctttggtagcaggttgcatgaaagaagcaaagaaagtccgaaaacaatgaaacatctaaataaacttttcccaaacaaaattttgatccagcttccacaggatgaagctctacttacagattggaagcagcagttggatcgtgatgttgaaacccttaaagccaaatcaaatattggtagcattcgcatgtttctgagccgcaatggaattgaatgcaatgatcttgaagaattattcatcaaagaccaatcattgagtaatgaaaatgtggacaagattgttgggtacgcagtaagttatcaccttaatcagaataaaattgaaacctctaaggatgccaaacttgtactcacaactgaaagccttaagcatgggctcaacatgctccaaagcatgcaaaatgataacaagagctccaaaaaatcactgaaggatgttgtcacagagaatgagtttgagaaaaggcttttggcagatgttatacctccaaatgacattggagttacctttgatgatattggagccttggagaatgtaaaggacacgttaaaggagctggtgatgctccctttgcaaagacctgagttgttctgcaaagggcagttaacaaagccttgcaaggggatattgcttttcggacctcctggcactggaaaaactatgcttgccaaagcagtagcaactgaagcaggcgctaatttcatcaatatatcaatgtcgagcattacatcgaagtggtttggtgaaggggagaagtatgtaaaggctgttttctcactagcaagtaaaatagcacccagtgttatatttattgatgaggtcgatagtatgctaggaaggagagaaaatccaggggagcatgaagcgatgcgcaagatgaagaatgaatttatggtaaattgggatgggttgcgcactaaagataaggagcgtgtgcttgttcttggtgctacaaataggccttttgacctcgacgaggctgtgattaggaggttcccccgcaggttaatggtaaacttgcccgatgcatcaaatagggagaaaattctaaaagtaattttggcaaaagaagagctgggatctgatgttgatatggactcgcttgccaatatgactgatggttattcaggaagcgacctgaagaatctgtgtgtgaccgcggcgcattaccccatccgagaaattctggagaaggaaaagaaggagaagaatttggctaaaacagaaggtaggccggagcctgcattatatggaagcgaggacatccgccctcttagcatagatgacttcaaatctgcccatgagcaggtttgtgcgagcgtttcgtccgactcggcgaacatgaacgagctccttcaatggaacgacctgtacggcgaaggcgggtcaaggaagaagaaagcgctgagctacttcatgtgatggggtgagagcatagaatccagaaggatcacagccgtggcataagatcagaaggaacacagagcggccatagtaccacacccactatggccctaaatccagtcaagttttcgctccttccccctccctcagtagccgccgccgccccgccgccgcctggtgtaattagaactgtgtacggagtcgagttggtttgccagctgtttcaaggttacagagttgagatttggaattacaatggcgccattgccctcctccaacccccccccccccccccccccccccccgttttcttcctcccataagttgcggtcactgtccttcttggactctctggcctttgttcttgtaaatgcgaaatgaagggatgtgaaataagaacatcttcgtcctgttgttgacagtatggtacacatatttaatttttgtacttgaccggcgatgataaattggatcggtgccaacataagaattatggaaaggtgcctttcctgcccgccgaaatctgtgtgtatgtcgagtgggctgggtattgtgaggtgaaattttatgcgtctcctgtcgtcttgtggttgcgaaatgcgtgggagcaaacgtccggcataatgaactttcgtcatttcttatggctgcgaaatgcatgggttcggtatgtatgaattttctctgtcataatgaacttggattctgataacggtgcattgcacagatttcattttttttcttacgtaaacacttcggttctttcta

SEQ ID NO: 38528 - DNA, 4140 bp, Zea Mays
ctcttcgtccgtacctcccccgaagcgctccaagactcctcactatcccatcagtgtggatcagatttctgttggtcaaagcaaaaactgtaatttgtggctgaaagaccaacctgttagcaaagtgctttgcaagctgcggcgccttgagcaaggaggtccatgtgagttagaagttatagggaagaagggtatggtccaattaaatggaaggtccgtaagtccaggcacaaaagttccccttacaggaggggatgaagtcatattcagttcatgcggcaagcatacttatatttttctttatcctttgaatgacaaagttcctaaaacggtgctatcatctgctgttagccttctagaagctcctgttgctagtgtaaagcgtatccgtacagataagagaacaggagacacttcagctgttgctggtacagagatgatgacatctacatctaatcagaaggatgtagcagcagtacctcccgcgtcagctggagagaacagccaaagagtagtgcggccattggcatcatctgcttctgataaattgaaagggcgtgctgtgagccctgaaaaggaatttgcgaatggggaaaatgctaatgaggttaattctaacatcgaagactctccaatggttgttgctgcagcccccatatctcctgatgctgctgcgaacgatacctgtcaacaaaatggctttgtctctgattctcatctcggtgcggaaatcggtaagactgcaacctataagataaggccagttctgaggatgattacaggatcaactatatccgagttcgatttgactggtgatgatctttttaaagctcttgaagatcagagggatcacatcatcagggagcttaacgcttcaaccaacgtgcctccaagtagatgccaagcctttaaggatgggatgaaacaaggaattatcaatccaagtgatattgatgtcacctttgagaattttccttattatctcagtgagaatacaaagaatgtgctcttgtcatctgcgttcatacacttaaaaaagaaggagttcatcaagcaatttgttgagatctcatcaataaaccagcgaattttgttatctggtccagcaggttccgagatttatcaggaaacattggtaaaggcacttgccaaacattttagtgctagactccttgtggtggattcacttttgctgcctggggcaccttcaaaggatccagaattccagaaagatgttgggaaggctgataaatcaggggataaggcagctgccgagaagtttgcaatatatcagaagcatcgttcttcgttggcagacactgttcacttcaggaggccagctgcaccaacttctagtgtgaatgctgatattgtaggaacatccactctgcattctgcatctctaccaaaacaggaatcgtcaacagctacatccaagagttatacttttagagaaggtgatagggtgcgttatgtgggtccagctcaaccatgctcgttgtcacaaaggggaccaagttatggttatcgaggtagagtgatgcttgcttttgaagataatggatcctcaaaaattggagtccggtttgacaagcagatccctgatggtaatgatcttggtggtttgtgcgaggaagatcatggcttcttctgctctgctgaattactgcgcccagacttttctgctggtgaagaagttgagaggctagctatgaccgagttaatagagaagagaacaaatctggacctctgatagtgttacttaaggatgtcgagaaatcattcacgggggttacagagtcactatcatctttgaggagcaaacttgaatcgcttccacctggtgttcttattataggatcccacacccagatggacagccgcaaagagaaggcacatcctggaggttttcttttcacgaagtttgccagtagtagccagactctttttgaccttttcccggatagctttggtagcaggttgcatgaaagaagcaaagaaagtccgaaaacaatgaaacatctaaataaacttttcccaaacaaaattttgatccagcttccacaggatgaagctctacttacagattggaagcagcagttggatcgtgatgttgaaacccttaaagccaaatcaaatattggtagcattcgcatgtttctgagccgcaatggaattgaatgcaatgatcttgaagaattattcatcaaagaccaatcattgagtaatgaaaatgtggacaagattgttgggtacgcagtaagttatcaccttaatcagaataaaattgaaacctctaaggatgccaaacttgtactcacaactgaaagccttaagcatgggctcaacatgctccaaagcatgcaaaatgataacaagagctccaaaaaatcactgaaggatgttgtcacagagaatgagtttgagaaaaggcttttggcagatgttatacctccaaatgacattggagttacctttgatgatattggagccttggagaatgtaaaggacacgttaaaggagctggtgatgctccctttgcaaagacctgagttgttctgcaaagggcagttaacaaagccttgcaaggggatattgcttttcggacctcctggcactggaaaaactatgcttgccaaagcagtagcaactgaagcaggcgctaatttcatcaatatatcaatgtcgagcattacatcgaagtggtttggtgaaggggagaagtatgtaaaggctgttttctcactagcaagtaaaatagcacccagtgttatatttattgatgaggtcgatagtatgctaggaaggagagaaaatccaggggagcatgaagcgatgcgcaagatgaagaatgaatttatggtaaattgggatgggttgcgcactaaagataaggagcgtgtgcttgttcttggtgctacaaataggccttttgacctcgacgaggctgtgattaggaggttcccccgcaggttaatggtaaacttgcccgatgcatcaaatagggagaaaattctaaaagtaattttggcaaaagaagagctgggatctgatgttgatatggactcgcttgccaatatgactgatggttattcaggaagcgacctgaagaatctgtgtgtgaccgcggcgcattaccccatccgagaaattctggagaaggaaaagaaggagaagaatttggctaaaacagaaggtaggccggagcctgcattatatggaagcgaggacatccgccctcttagcatagatgacttcaaatctgcccatgagcaggtttgtgcgagcgtttcgtccgactcggcgaacatgaacgagctccttcaatggaacgacctgtacggcgaaggcgggtcaaggaagaagaaagcgctgagctacttcatgtgatggggtgagagcatagaatccagaaggatcacagccgtggcataagatcagaaggaacacagagcggccatagtaccacacccactatggccctaaatccagtcaagttttcgctccttccccctccctcagtagccgccgccgccccgccgccgcctggtgtaattagaactgtgtacggagtcgagttggtttgccagctgtttcaaggttacagagttgagatttggaattacaatggcgccattgccctcctccaacccccccccccccccccccccccccccgttttcttcctcccataagttgcggtcactgtccttcttggactctctggcctttgttcttgtaaatgcgaaatgaagggatgtgaaataagaacatcttcgtcctgttgttgacagtatggtacacatatttaatttttgtacttgaccggcgatgataaattggatcggtgccaacataagaattatggaaaggtgcctttcctgcccgccgaaatctgtgtgtatgtcgagtgggctgggtattgtgaggtgaaattttatgcgtctcctgtcgtcttgtggttgcgaaatgcgtgggagcaaacgtccggcataatgaactttcgtcatttcttatggctgcgaaatgcatgggttcggtatgtatgaattttctctgtcataatgaacttggattctgataacggtgcattgcacagatttcattttttttcttacgtaaacacttcggttctttcta

SEQ ID NO: 38529 - DNA, 4125 bp, Zea Mays
gacgcggcagcggtcgcacagaaagagagttcaaagcggaggaaggagcaggagcaacagcaacccgcagtgccatgggcgaagctgctctcggagtgctcacagactcctcactatcccatcagtgtggatcagatttctgttggtcaaagcaaaaactgtaatttgtggctgaaagaccaacctgttagcaaagtgctttgcaagctgcggcgccttgagcaaggaggtccatgtgagttagaagttatagggaagaagggtatggtccaattaaatggaaggtccgtaagtccaggcacaaaagttccccttacaggaggggatgaagtcatattcagttcatgcggcaagcatacttatatttttctttatcctttgaatgacaaagttcctaaaacggtgctatcatctgctgttagccttctagaagctcctgttgctagtgtaaagcgtatccgtacagataagagaacaggagacacttcagctgttgctggtacagagatgatgacatctacatctaatcagaaggatgtagcagcagtacctcccgcgtcagctggagagaacagccaaagagtagtgcggccattggcatcatctgcttctgataaattgaaagggcgtgctgtgagccctgaaaaggaatttgcgaatggggaaaatgctaatgaggttaattctaacatcgaagactctccaatggttgttgctgcagcccccatatctcctgatgctgctgcgaacgatacctgtcaacaaaatggctttgtctctgattctcatctcggtgcggaaatcgctcttgaagatcagagggatcacatcatcagggagcttaacgcttcaaccaacgtgcctccaagtagatgccaagcctttaaggatgggatgaaacaaggaattatcaatccaagtgatattgatgtcacctttgagaattttccttattatctcagtgagaatacaaagaatgtgctcttgtcatctgcgttcatacacttaaaaaagaaggagttcatcaagcaatttgttgagatctcatcaataaaccagcgaattttgttatctggtccagcaggttccgagatttatcaggaaacattggtaaaggcacttgccaaacattttagtgctagactccttgtggtggattcacttttgctgcctggggcaccttcaaaggatccagaattccagaaagatgttgggaaggctgataaatcaggggataaggcagctgccgagaagtttgcaatatatcagaagcatcgttcttcgttggcagacactgttcacttcaggaggccagctgcaccaacttctagtgtgaatgctgatattgtaggaacatccactctgcattctgcatctctaccaaaacaggaatcgtcaacagctacatccaagagttatacttttagagaaggtgatagggtgcgttatgtgggtccagctcaaccatgctcgttgtcacaaaggggaccaagttatggttatcgaggtagagtgatgcttgcttttgaagataatggatcctcaaaaattggagtccggtttgacaagcagatccctgatggtaatgatcttggtggtttgtgcgaggaagatcatggcttcttctgctctgctgaattactgcgcccagacttttctgctggtgaagaagttgagaggctagctatgaccgagttaatagaggtcatttcagaagagaacaaatctggacctctgatagtgttacttaaggatgtcgagaaatcattcacgggggttacagagtcactatcatctttgaggagcaaacttgaatcgcttccacctggtgttcttattataggatcccacacccagatggacagccgcaaagagaaggcacatcctggaggttttcttttcacgaagtttgccagtagtagccagactctttttgaccttttcccggatagctttggtagcaggttgcatgaaagaagcaaagaaagtccgaaaacaatgaaacatctaaataaacttttcccaaacaaaattttgatccagcttccacaggatgaagctctacttacagattggaagcagcagttggatcgtgatgttgaaacccttaaagccaaatcaaatattggtagcattcgcatgtttctgagccgcaatggaattgaatgcaatgatcttgaagaattattcatcaaagaccaatcattgagtaatgaaaatgtggacaagattgttgggtacgcagtaagttatcaccttaatcagaataaaattgaaacctctaaggatgccaaacttgtactcacaactgaaagccttaagcatgggctcaacatgctccaaagcatgcaaaatgataacaagagctccaaaaaatcactgaaggatgttgtcacagagaatgagtttgagaaaaggcttttggcagatgttatacctccaaatgacattggagttacctttgatgatattggagccttggagaatgtaaaggacacgttaaaggagctggtgatgctccctttgcaaagacctgagttgttctgcaaagggcagttaacaaagccttgcaaggggatattgcttttcggacctcctggcactggaaaaactatgcttgccaaagcagtagcaactgaagcaggcgctaatttcatcaatatatcaatgtcgagcattacatcgaagtggtttggtgaaggggagaagtatgtaaaggctgttttctcactagcaagtaaaatagcacccagtgttatatttattgatgaggtcgatagtatgctaggaaggagagaaaatccaggggagcatgaagcgatgcgcaagatgaagaatgaatttatggtaaattgggatgggttgcgcactaaagataaggagcgtgtgcttgttcttggtgctacaaataggccttttgacctcgacgaggctgtgattaggaggttcccccgcaggttaatggtaaacttgcccgatgcatcaaatagggagaaaattctaaaagtaattttggcaaaagaagagctgggatctgatgttgatatggactcgcttgccaatatgactgatggttattcaggaagcgacctgaagaatctgtgtgtgaccgcggcgcattaccccatccgagaaattctggagaaggaaaagaaggagaagaatttggctaaaacagaaggtaggccggagcctgcattatatggaagcgaggacatccgccctcttagcatagatgacttcaaatctgcccatgagcaggtttgtgcgagcgtttcgtccgactcggcgaacatgaacgagctccttcaatggaacgacctgtacggcgaaggcgggtcaaggaagaagaaagcgctgagctacttcatgtgatggggtgagagcatagaatccagaaggatcacagccgtggcataagatcagaaggaacacagagcggccatagtaccacacccactatggccctaaatccagtcaagttttcgctccttccccctccctcagtagccgccgccgccccgccgccgcctggtgtaattagaactgtgtacggagtcgagttggtttgccagctgtttcaaggttacagagttgagatttggaattacaatggcgccattgccctcctccaacccccccccccccccccccccccccccgttttcttcctcccataagttgcggtcactgtccttcttggactctctggcctttgttcttgtaaatgcgaaatgaagggatgtgaaataagaacatcttcgtcctgttgttgacagtatggtacacatatttaatttttgtacttgaccggcgatgataaattggatcggtgccaacataagaattatggaaaggtgcctttcctgcccgccgaaatctgtgtgtatgtcgagtgggctgggtattgtgaggtgaaattttatgcgtctcctgtcgtcttgtggttgcgaaatgcgtgggagcaaacgtccggcataatgaactttcgtcatttcttatggctgcgaaatgcatgggttcggtatgtatgaattttctctgtcataatgaacttggattctgataacggtgcattgcacagatttcattttttttcttacgtaaacacttcggttctttcta

SEQ ID NO: 38530 - DNA, 3993 bp, Zea Mays
cagatttctgttggtcaaagcaaaaactgtaatttgtggctgaaagaccaacctgttagcaaagtgctttgcaagctgcggcgccttgagcaaggaggtccatgtgagttagaagttatagggaagaagggtatggtccaattaaatggaaggtccgtaagtccaggcacaaaagttccccttacaggaggggatgaagtcatattcagttcatgcggcaagcatacttatatttttctttatcctttgaatgacaaagttcctaaaacggtgctatcatctgctgttagccttctagaagctcctgttgctagtgtaaagcgtatccgtacagataagagaacaggagacacttcagctgttgctggtacagagatgatgacatctacatctaatcagaaggatgtagcagcagtacctcccgcgtcagctggagagaacagccaaagagtagtgcggccattggcatcatctgcttctgataaattgaaagggcgtgctgtgagccctgaaaaggaatttgcgaatggggaaaatgctaatgaggttaattctaacatcgaagactctccaatggttgttgctgcagcccccatatctcctgatgctgctgcgaacgatacctgtcaacaaaatggctttgtctctgattctcatctcggtgcggaaatcgctcttgaagatcagagggatcacatcatcagggagcttaacgcttcaaccaacgtgcctccaagtagatgccaagcctttaaggatgggatgaaacaaggaattatcaatccaagtgatattgatgtcacctttgagaattttccttattatctcagtgagaatacaaagaatgtgctcttgtcatctgcgttcatacacttaaaaaagaaggagttcatcaagcaatttgttgagatctcatcaataaaccagcgaattttgttatctggtccagcaggttccgagatttatcaggaaacattggtaaaggcacttgccaaacattttagtgctagactccttgtggtggattcacttttgctgcctggggcaccttcaaaggatccagaattccagaaagatgttgggaaggctgataaatcaggggataaggcagctgccgagaagtttgcaatatatcagaagcatcgttcttcgttggcagacactgttcacttcaggaggccagctgcaccaacttctagtgtgaatgctgatattgtaggaacatccactctgcattctgcatctctaccaaaacaggaatcgtcaacagctacatccaagagttatacttttagagaaggtgatagggtgcgttatgtgggtccagctcaaccatgctcgttgtcacaaaggggaccaagttatggttatcgaggtagagtgatgcttgcttttgaagataatggatcctcaaaaattggagtccggtttgacaagcagatccctgatggtaatgatcttggtggtttgtgcgaggaagatcatggcttcttctgctctgctgaattactgcgcccagacttttctgctggtgaagaagttgagaggctagctatgaccgagttaatagaggtcatttcagaagagaacaaatctggacctctgatagtgttacttaaggatgtcgagaaatcattcacgggggttacagagtcactatcatctttgaggagcaaacttgaatcgcttccacctggtgttcttattataggatcccacacccagatggacagccgcaaagagaaggcacatcctggaggttttcttttcacgaagtttgccagtagtagccagactctttttgaccttttcccggatagctttggtagcaggttgcatgaaagaagcaaagaaagtccgaaaacaatgaaacatctaaataaacttttcccaaacaaaattttgatccagcttccacaggatgaagctctacttacagattggaagcagcagttggatcgtgatgttgaaacccttaaagccaaatcaaatattggtagcattcgcatgtttctgagccgcaatggaattgaatgcaatgatcttgaagaattattcatcaaagaccaatcattgagtaatgaaaatgtggacaagattgttgggtacgcagtaagttatcaccttaatcagaataaaattgaaacctctaaggatgccaaacttgtactcacaactgaaagccttaagcatgggctcaacatgctccaaagcatgcaaaatgataacaagagctccaaaaaatcactgaaggatgttgtcacagagaatgagtttgagaaaaggcttttggcagatgttatacctccaaatgacattggagttacctttgatgatattggagccttggagaatgtaaaggacacgttaaaggagctggtgatgctccctttgcaaagacctgagttgttctgcaaagggcagttaacaaagccttgcaaggggatattgcttttcggacctcctggcactggaaaaactatgcttgccaaagcagtagcaactgaagcaggcgctaatttcatcaatatatcaatgtcgagcattacatcgaagtggtttggtgaaggggagaagtatgtaaaggctgttttctcactagcaagtaaaatagcacccagtgttatatttattgatgaggtcgatagtatgctaggaaggagagaaaatccaggggagcatgaagcgatgcgcaagatgaagaatgaatttatggtaaattgggatgggttgcgcactaaagataaggagcgtgtgcttgttcttggtgctacaaataggccttttgacctcgacgaggctgtgattaggaggttcccccgcaggttaatggtaaacttgcccgatgcatcaaatagggagaaaattctaaaagtaattttggcaaaagaagagctgggatctgatgttgatatggactcgcttgccaatatgactgatggttattcaggaagcgacctgaagaatctgtgtgtgaccgcggcgcattaccccatccgagaaattctggagaaggaaaagaaggagaagaatttggctaaaacagaaggtaggccggagcctgcattatatggaagcgaggacatccgccctcttagcatagatgacttcaaatctgcccatgagcaggtttgtgcgagcgtttcgtccgactcggcgaacatgaacgagctccttcaatggaacgacctgtacggcgaaggcgggtcaaggaagaagaaagcgctgagctacttcatgtgatggggtgagagcatagaatccagaaggatcacagccgtggcataagatcagaaggaacacagagcggccatagtaccacacccactatggccctaaatccagtcaagttttcgctccttccccctccctcagtagccgccgccgccccgccgccgcctggtgtaattagaactgtgtacggagtcgagttggtttgccagctgtttcaaggttacagagttgagatttggaattacaatggcgccattgccctcctccaacccccccccccccccccccccccccccgttttcttcctcccataagttgcggtcactgtccttcttggactctctggcctttgttcttgtaaatgcgaaatgaagggatgtgaaataagaacatcttcgtcctgttgttgacagtatggtacacatatttaatttttgtacttgaccggcgatgataaattggatcggtgccaacataagaattatggaaaggtgcctttcctgcccgccgaaatctgtgtgtatgtcgagtgggctgggtattgtgaggtgaaattttatgcgtctcctgtcgtcttgtggttgcgaaatgcgtgggagcaaacgtccggcataatgaactttcgtcatttcttatggctgcgaaatgcatgggttcggtatgtatgaattttctctgtcataatgaacttggattctgataacggtgcattgcacagatttcattttttttcttacgtaaacacttcggttctttcta

SEQ ID NO: 38531 - DNA, 3712 bp, Zea Mays
gtcatattcagttcatgcggcaagcatacttattgtaaagcgtatccgtacagataagagaacaggagacacttcagctgttgctggtacagagatgatgacatctacatctaatcagaaggatgtagcagcagtacctcccgcgtcagctggagagaacagccaaagagtagtgcggccattggcatcatctgcttctgataaattgaaagggcgtgctgtgagccctgaaaaggaatttgcgaatggggaaaatgctaatgaggttaattctaacatcgaagactctccaatggttgttgctgcagcccccatatctcctgatgctgctgcgaacgatacctgtcaacaaaatggctttgtctctgattctcatctcggtgcggaaatcgctcttgaagatcagagggatcacatcatcagggagcttaacgcttcaaccaacgtgcctccaagtagatgccaagcctttaaggatgggatgaaacaaggaattatcaatccaagtgatattgatgtcacctttgagaattttccttattatctcagtgagaatacaaagaatgtgctcttgtcatctgcgttcatacacttaaaaaagaaggagttcatcaagcaatttgttgagatctcatcaataaaccagcgaattttgttatctggtccagcaggttccgagatttatcaggaaacattggtaaaggcacttgccaaacattttagtgctagactccttgtggtggattcacttttgctgcctggggcaccttcaaaggatccagaattccagaaagatgttgggaaggctgataaatcaggggataaggcagctgccgagaagtttgcaatatatcagaagcatcgttcttcgttggcagacactgttcacttcaggaggccagctgcaccaacttctagtgtgaatgctgatattgtaggaacatccactctgcattctgcatctctaccaaaacaggaatcgtcaacagctacatccaagagttatacttttagagaaggtgatagggtgcgttatgtgggtccagctcaaccatgctcgttgtcacaaaggggaccaagttatggttatcgaggtagagtgatgcttgcttttgaagataatggatcctcaaaaattggagtccggtttgacaagcagatccctgatggtaatgatcttggtggtttgtgcgaggaagatcatggcttcttctgctctgctgaattactgcgcccagacttttctgctggtgaagaagttgagaggctagctatgaccgagttaatagaggtcatttcagaagagaacaaatctggacctctgatagtgttacttaaggatgtcgagaaatcattcacgggggttacagagtcactatcatctttgaggagcaaacttgaatcgcttccacctggtgttcttattataggatcccacacccagatggacagccgcaaagagaaggcacatcctggaggttttcttttcacgaagtttgccagtagtagccagactctttttgaccttttcccggatagctttggtagcaggttgcatgaaagaagcaaagaaagtccgaaaacaatgaaacatctaaataaacttttcccaaacaaaattttgatccagcttccacaggatgaagctctacttacagattggaagcagcagttggatcgtgatgttgaaacccttaaagccaaatcaaatattggtagcattcgcatgtttctgagccgcaatggaattgaatgcaatgatcttgaagaattattcatcaaagaccaatcattgagtaatgaaaatgtggacaagattgttgggtacgcagtaagttatcaccttaatcagaataaaattgaaacctctaaggatgccaaacttgtactcacaactgaaagccttaagcatgggctcaacatgctccaaagcatgcaaaatgataacaagagctccaaaaaatcactgaaggatgttgtcacagagaatgagtttgagaaaaggcttttggcagatgttatacctccaaatgacattggagttacctttgatgatattggagccttggagaatgtaaaggacacgttaaaggagctggtgatgctccctttgcaaagacctgagttgttctgcaaagggcagttaacaaagccttgcaaggggatattgcttttcggacctcctggcactggaaaaactatgcttgccaaagcagtagcaactgaagcaggcgctaatttcatcaatatatcaatgtcgagcattacatcgaagtggtttggtgaaggggagaagtatgtaaaggctgttttctcactagcaagtaaaatagcacccagtgttatatttattgatgaggtcgatagtatgctaggaaggagagaaaatccaggggagcatgaagcgatgcgcaagatgaagaatgaatttatggtaaattgggatgggttgcgcactaaagataaggagcgtgtgcttgttcttggtgctacaaataggccttttgacctcgacgaggctgtgattaggaggttcccccgcaggttaatggtaaacttgcccgatgcatcaaatagggagaaaattctaaaagtaattttggcaaaagaagagctgggatctgatgttgatatggactcgcttgccaatatgactgatggttattcaggaagcgacctgaagaatctgtgtgtgaccgcggcgcattaccccatccgagaaattctggagaaggaaaagaaggagaagaatttggctaaaacagaaggtaggccggagcctgcattatatggaagcgaggacatccgccctcttagcatagatgacttcaaatctgcccatgagcaggtttgtgcgagcgtttcgtccgactcggcgaacatgaacgagctccttcaatggaacgacctgtacggcgaaggcgggtcaaggaagaagaaagcgctgagctacttcatgtgatggggtgagagcatagaatccagaaggatcacagccgtggcataagatcagaaggaacacagagcggccatagtaccacacccactatggccctaaatccagtcaagttttcgctccttccccctccctcagtagccgccgccgccccgccgccgcctggtgtaattagaactgtgtacggagtcgagttggtttgccagctgtttcaaggttacagagttgagatttggaattacaatggcgccattgccctcctccaacccccccccccccccccccccccccccgttttcttcctcccataagttgcggtcactgtccttcttggactctctggcctttgttcttgtaaatgcgaaatgaagggatgtgaaataagaacatcttcgtcctgttgttgacagtatggtacacatatttaatttttgtacttgaccggcgatgataaattggatcggtgccaacataagaattatggaaaggtgcctttcctgcccgccgaaatctgtgtgtatgtcgagtgggctgggtattgtgaggtgaaattttatgcgtctcctgtcgtcttgtggttgcgaaatgcgtgggagcaaacgtccggcataatgaactttcgtcatttcttatggctgcgaaatgcatgggttcggtatgtatgaattttctctgtcataatgaacttggattctgataacggtgcattgcacagatttcattttttttcttacgtaaacacttcggttctttcta

SEQ ID NO: 38532 - DNA, 3650 bp, Zea Mays
tgacaaagttcctaaaacggtgctatcatctgctgttagccttctagaagctcctgttgctagtgtaaagcgtatccgtacagataagagaacaggagacacttcagctgttgctggtacagagatgatgacatctacatctaatcagaaggatgtagcagcagtacctcccgcgtcagctggagagaacagccaaagagtagtgcggccattggcatcatctgcttctgataaattgaaagggcgtgctgtgagccctgaaaaggaatttgcgaatggggaaaatgctaatgaggttaattctaacatcgaagactctccaatggttgttgctgcagcccccatatctcctgatgctgctgcgaacgatacctgtcaacaaaatggctttgtctctgattctcatctcggtgcggaaatcgctcttgaagatcagagggatcacatcatcagggagcttaacgcttcaaccaacgtgcctccaagtagatgccaagcctttaaggatgggatgaaacaaggaattatcaatccaagtgatattgatgtcacctttgagaattttccttattatctcagtgagaatacaaagaatgtgctcttgtcatctgcgttcatacacttaaaaaagaaggagttcatcaagcaatttgttgagatctcatcaataaaccagcgaattttgttatctggtccagcaggcaccttcaaaggatccagaattccagaaagatgttgggaaggctgataaatcaggggataaggcagctgccgagaagtttgcaatatatcagaagcatcgttcttcgttggcagacactgttcacttcaggaggccagctgcaccaacttctagtgtgaatgctgatattgtaggaacatccactctgcattctgcatctctaccaaaacaggaatcgtcaacagctacatccaagagttatacttttagagaaggtgatagggtgcgttatgtgggtccagctcaaccatgctcgttgtcacaaaggggaccaagttatggttatcgaggtagagtgatgcttgcttttgaagataatggatcctcaaaaattggagtccggtttgacaagcagatccctgatggtaatgatcttggtggtttgtgcgaggaagatcatggcttcttctgctctgctgaattactgcgcccagacttttctgctggtgaagaagttgagaggctagctatgaccgagttaatagaggtcatttcagaagagaacaaatctggacctctgatagtgttacttaaggatgtcgagaaatcattcacgggggttacagagtcactatcatctttgaggagcaaacttgaatcgcttccacctggtgttcttattataggatcccacacccagatggacagccgcaaagagaaggcacatcctggaggttttcttttcacgaagtttgccagtagtagccagactctttttgaccttttcccggatagctttggtagcaggttgcatgaaagaagcaaagaaagtccgaaaacaatgaaacatctaaataaacttttcccaaacaaaattttgatccagcttccacaggatgaagctctacttacagattggaagcagcagttggatcgtgatgttgaaacccttaaagccaaatcaaatattggtagcattcgcatgtttctgagccgcaatggaattgaatgcaatgatcttgaagaattattcatcaaagaccaatcattgagtaatgaaaatgtggacaagattgttgggtacgcagtaagttatcaccttaatcagaataaaattgaaacctctaaggatgccaaacttgtactcacaactgaaagccttaagcatgggctcaacatgctccaaagcatgcaaaatgataacaagagctccaaaaaatcactgaaggatgttgtcacagagaatgagtttgagaaaaggcttttggcagatgttatacctccaaatgacattggagttacctttgatgatattggagccttggagaatgtaaaggacacgttaaaggagctggtgatgctccctttgcaaagacctgagttgttctgcaaagggcagttaacaaagccttgcaaggggatattgcttttcggacctcctggcactggaaaaactatgcttgccaaagcagtagcaactgaagcaggcgctaatttcatcaatatatcaatgtcgagcattacatcgaagtggtttggtgaaggggagaagtatgtaaaggctgttttctcactagcaagtaaaatagcacccagtgttatatttattgatgaggtcgatagtatgctaggaaggagagaaaatccaggggagcatgaagcgatgcgcaagatgaagaatgaatttatggtaaattgggatgggttgcgcactaaagataaggagcgtgtgcttgttcttggtgctacaaataggccttttgacctcgacgaggctgtgattaggaggttcccccgcaggttaatggtaaacttgcccgatgcatcaaatagggagaaaattctaaaagtaattttggcaaaagaagagctgggatctgatgttgatatggactcgcttgccaatatgactgatggttattcaggaagcgacctgaagaatctgtgtgtgaccgcggcgcattaccccatccgagaaattctggagaaggaaaagaaggagaagaatttggctaaaacagaaggtaggccggagcctgcattatatggaagcgaggacatccgccctcttagcatagatgacttcaaatctgcccatgagcaggtttgtgcgagcgtttcgtccgactcggcgaacatgaacgagctccttcaatggaacgacctgtacggcgaaggcgggtcaaggaagaagaaagcgctgagctacttcatgtgatggggtgagagcatagaatccagaaggatcacagccgtggcataagatcagaaggaacacagagcggccatagtaccacacccactatggccctaaatccagtcaagttttcgctccttccccctccctcagtagccgccgccgccccgccgccgcctggtgtaattagaactgtgtacggagtcgagttggtttgccagctgtttcaaggttacagagttgagatttggaattacaatggcgccattgccctcctccaacccccccccccccccccccccccccccgttttcttcctcccataagttgcggtcactgtccttcttggactctctggcctttgttcttgtaaatgcgaaatgaagggatgtgaaataagaacatcttcgtcctgttgttgacagtatggtacacatatttaatttttgtacttgaccggcgatgataaattggatcggtgccaacataagaattatggaaaggtgcctttcctgcccgccgaaatctgtgtgtatgtcgagtgggctgggtattgtgaggtgaaattttatgcgtctcctgtcgtcttgtggttgcgaaatgcgtgggagcaaacgtccggcataatgaactttcgtcatttcttatggctgcgaaatgcatgggttcggtatgtatgaattttctctgtcataatgaacttggattctgataacggtgcattgcacagatttcattttttttcttacgtaaacacttcggttctttcta

SEQ ID NO: 38533 - DNA, 2709 bp, Zea Mays
ttttgcccgaatagtggctaaacgacaagtgaccacctgttcaccatttaggagaacatgtccaccaggggaccaagttatggttatcgaggtagagtgatgcttgcttttgaagataatggatcctcaaaaattggagtccggtttgacaagcagatccctgatggtaatgatcttggtggtttgtgcgaggaagatcatggcttcttctgctctgctgaattactgcgcccagacttttctgctggtgaagaagttgagaggctagctatgaccgagttaatagaggtcatttcagaagagaacaaatctggacctctgatagtgttacttaaggatgtcgagaaatcattcacgggggttacagagtcactatcatctttgaggagcaaacttgaatcgcttccacctggtgttcttattataggatcccacacccagatggacagccgcaaagagaaggcacatcctggaggttttcttttcacgaagtttgccagtagtagccagactctttttgaccttttcccggatagctttggtagcaggttgcatgaaagaagcaaagaaagtccgaaaacaatgaaacatctaaataaacttttcccaaacaaaattttgatccagcttccacaggatgaagctctacttacagattggaagcagcagttggatcgtgatgttgaaacccttaaagccaaatcaaatattggtagcattcgcatgtttctgagccgcaatggaattgaatgcaatgatcttgaagaattattcatcaaagaccaatcattgagtaatgaaaatgtggacaagattgttgggtacgcagtaagttatcaccttaatcagaataaaattgaaacctctaaggatgccaaacttgtactcacaactgaaagccttaagcatgggctcaacatgctccaaagcatgcaaaatgataacaagagctccaaaaaatcactgaaggatgttgtcacagagaatgagtttgagaaaaggcttttggcagatgttatacctccaaatgacattggagttacctttgatgatattggagccttggagaatgtaaaggacacgttaaaggagctggtgatgctccctttgcaaagacctgagttgttctgcaaagggcagttaacaaagccttgcaaggggatattgcttttcggacctcctggcactggaaaaactatgcttgccaaagcagtagcaactgaagcaggcgctaatttcatcaatatatcaatgtcgagcattacatcgaagtggtttggtgaaggggagaagtatgtaaaggctgttttctcactagcaagtaaaatagcacccagtgttatatttattgatgaggtcgatagtatgctaggaaggagagaaaatccaggggagcatgaagcgatgcgcaagatgaagaatgaatttatggtaaattgggatgggttgcgcactaaagataaggagcgtgtgcttgttcttggtgctacaaataggccttttgacctcgacgaggctgtgattaggaggttcccccgcaggttaatggtaaacttgcccgatgcatcaaatagggagaaaattctaaaagtaattttggcaaaagaagagctgggatctgatgttgatatggactcgcttgccaatatgactgatggttattcaggaagcgacctgaagaatctgtgtgtgaccgcggcgcattaccccatccgagaaattctggagaaggaaaagaaggagaagaatttggctaaaacagaaggtaggccggagcctgcattatatggaagcgaggacatccgccctcttagcatagatgacttcaaatctgcccatgagcaggtttgtgcgagcgtttcgtccgactcggcgaacatgaacgagctccttcaatggaacgacctgtacggcgaaggcgggtcaaggaagaagaaagcgctgagctacttcatgtgatggggtgagagcatagaatccagaaggatcacagccgtggcataagatcagaaggaacacagagcggccatagtaccacacccactatggccctaaatccagtcaagttttcgctccttccccctccctcagtagccgccgccgccccgccgccgcctggtgtaattagaactgtgtacggagtcgagttggtttgccagctgtttcaaggttacagagttgagatttggaattacaatggcgccattgccctcctccaacccccccccccccccccccccccccccgttttcttcctcccataagttgcggtcactgtccttcttggactctctggcctttgttcttgtaaatgcgaaatgaagggatgtgaaataagaacatcttcgtcctgttgttgacagtatggtacacatatttaatttttgtacttgaccggcgatgataaattggatcggtgccaacataagaattatggaaaggtgcctttcctgcccgccgaaatctgtgtgtatgtcgagtgggctgggtattgtgaggtgaaattttatgcgtctcctgtcgtcttgtggttgcgaaatgcgtgggagcaaacgtccggcataatgaactttcgtcatttcttatggctgcgaaatgcatgggttcggtatgtatgaattttctctgtcataatgaacttggattctgataacggtgcattgcacagatttcattttttttcttacgtaaacacttcggttctttcta

SEQ ID NO: 38534 - DNA, 3057 bp, Zea Mays
catccctcttgtccgactcgattttttttttggatcccctcccctatgatatgcatccctcttgtccggcaagttgggaaaggatcgtttttttctccttttttgaccaggggttccgcaaaaataacaaagaaacaatacacgagttccacgtctggacagtgacaaaatccccaacggatttccaatttcacatgcaaaaagtcgttcaaatgcgatgaaccttaacgtgctcgtccgatgtacagtaattaataactgatgagagtgactgggactgatgatgaacctcacctcacctcacgtaaggagtggccgtcagttgctgttgcgggggtgtggtgtggccgccgagccgaaagcggcagcattcgtcgtctcccagatgcgcatgcggcggtagctagcttccgtcaccgctcccccagtaggccagtaccaccaaatctctagcgaggccgcccgcaaccgtgtcccggggttgaggatctgcgcggggccgtcctcgcgcgcgccgccgcatccccgccgtcccactccggcgaggctggctgcgttccgtcgtcgtcccccgcaccgccgctgactcctggaacaggaaccagcttcttcgcccccaccatctcacgtccagcgtcgcgaactcgcgatggcgggcgccgccactcctcctccgtcgtcgtcgtcgtcggcgtcgtgtggcacggacgctgcctacctgctgttccgcggggagacgctgctccccgacggcgtccacgcctccctctacgccgtcgctctcgcgtactgcttcgtggggctgtccgcggtcacggcccgcttcttcaaatccatggagcagatcatgaggcactcccgggaggtggtggtcggcgtggacccgcgcaccggggcgcccgtcgtgaggcgcgacaaggtgtggaactacaccgtcgcggacattgctctcctcgccttcggcaccagcttccctcagatctccctcgccaccatcgacgccatccgtaacctcggtcaactcacagcaggaggtctaggtccaggcacacttgtcggctctgcggcgtttgatctgtttccgatccacgctgtctgtgtgcttatgccaagggcgggatcaaagaagaagatctcggacctgggcgtttggttagtcgagctcttctggtctttctgggcatatatctggctctatgtcatcttagaggtgtggacgcctagagtgatcaccctctgggaggcatcgctgacagtcctgcagtatgggctgcttctactccatgcgtatgcgcaggataaacgatgtccatttgtgtcgatcccgtttgcgagaggtgagaggcctgaagattgggttccaccagaagatgtttctgctgtttattacgccaaatgtgatggcattgacgagacactccctatgggtgctgacgggaacgatgggattgtagacatcttctctgcacattcctactacgatgcagcagagtacagtcaacttgcagaagaggatatggaaggatcgtcaacaatggatcaagttgtaaagaacacacaagataacatgtcctggctttctatttggtggcaacaatttgttgatgcttcaatggtaatttggttcatttcatttatgggacagatgtgcctaacccttttaatacattggacaccataactagcatggtgcatggactgggaaatatgttctagacttttattttacaaatagttgatgaatttatttctaggtgctgctgagacaaatttgtttcccagagatagttatattgaaatagtttaatccacaccccttcccatctagccaggagaaaattcagtagcattaacatttgtcatttgccagtcttaaaactgagccccaatattaagaactttctgttttttttggcatagtaattgtttttttagcaatacatgcagttggagagccctgagtcaatgaagatggattctgtctgcctgaggtacaccagaatattttggaacttgatcattgcgccttggaagtttttgtttgcttttgtgcccccataccacattgcacatggctggattgcttttatatgctcactgatcttcataagtggtattgcttatggtgttactaagcttacagatcagataagctgcgtcacaggagtaagtccatatgttattgcattcacagcactggccgctggaacctcatggccagatctagttgctagcaagatagctgctgagcgtcaagtcaccgcggactctgcaatagccaacatcacttgcagtaactcggtgaacatatatgttggcattggtgttccatggttgattgatacagtgtacaacttcttcgtttaccgggaaccattgtacatagataatgctgccggtctcagcttctcccttctagtcttcttcgcgacatcatttggatgcataacggttttggttctgcgtcgtattatactcggtgctgagcttggaggccctaggctatgggcttgggttacatcagtctacttcatgatcctttgggttgtttttgttgtgttttcctctttaagagtatctggagtaatatagacaggaattaaaaaaaaaaggtagtgggggcttcgattttccataaattttgttgcaattggttttcatatccacaaagaaaacaactattgcgggtgaaaattagggtctgtgaattagggattatagatacaagtgcttgttctatataatgattactgatgaagccaacaatatattgtgtagtataattgaagttattgtatcagaaagaagggagaacagttggatagctcttaaattttttattcaatcagagtgttgcattatcaatcatacatgtaaatatcgaggcttatgttttgctagcattgtactactactattatgtttttatgggttaacaacagtacattggacataggctgcctcacattcatatgttttgctagtaactagagactgtataaggatatagaattcttaattcttgcactccctccgtttctttttattagtcgctgg

SEQ ID NO: 38535 - DNA, 2618 bp, Zea Mays
cctcacctcacctcacgtaaggagtggccgtcagttgctgttgcgggggtgtggtgtggccgccgagccgaaagcggcagcattcgtcgtctcccagatgcgcatgcggcggtagctagcttccgtcaccgctcccccagtaggccagtaccaccaaatctctagcgaggccgcccgcaaccgtgtcccggggttgaggatctgcgcggggccgtcctcgcgcgcgccgccgcatccccgccgtcccactccggcgaggctggctgcgttccgtcgtcgtcccccgcaccgccgctgactcctggaacaggaaccagcttcttcgcccccaccatctcacgtccagcgtcgcgaactcgcgatggcgggcgccgccactcctcctccgtcgtcgtcgtcgtcggcgtcgtgtggcacggacgctgcctacctgctgttccgcggggagacgctgctccccgacggcgtccacgcctccctctacgccgtcgctctcgcgtactgcttcgtggggctgtccgcggtcacggcccgcttcttcaaatccatggagcagatcatgaggcactcccgggaggtggtggtcggcgtggacccgcgcaccggggcgcccgtcgtgaggcgcgacaaggtgtggaactacaccgtcgcggacattgctctcctcgccttcggcaccagcttccctcagatctccctcgccaccatcgacgccatccgtaacctcggtcaactcacagcaggaggtctaggtccaggcacacttgtcggctctgcggcgtttgatctgtttccgatccacgctgtctgtgtgcttatgccaagggcgggatcaaagaagaagatctcggacctgggcgtttggttagtcgagctcttctggtctttctgggcatatatctggctctatgtcatcttagaggtgtggacgcctagagtgatcaccctctgggaggcatcgctgacagtcctgcagtatgggctgcttctactccatgcgtatgcgcaggataaacgatgtccatttgtgtcgatcccgttgtacgatcccgattcctgaatgaatgcctttttcttttgcaaacttatctcatggtcatgtgtgctccaccagaagaaggttgggtgtatgtatgtagtagcttatgtttttggttcaatctgctgcgatcagtgcgagaggtgagaggcctgaagattgggttccaccagaagatgtttctgctgtttattacgccaaatgtgatggcattgacgagacactccctatgggtgctgacgggaacgatgggattgtagacatcttctctgcacattcctactacgatgcagcagagtacagtcaacttgcagaagaggatatggaaggatcgtcaacaatggatcaagttgtaaagaacacacaagataacatgtcctggctttctatttggtggcaacaatttgttgatgcttcaatgaatattttggaacttgatcattgcgccttggaagtttttgtttgcttttgtgcccccataccacattgcacatggctggattgcttttatatgctcactgatcttcataagtggtattgcttatggtgttactaagcttacagatcagataagctgcgtcacaggttaaattaaaacatactcaaaacacaactttaatgttcaatttgctgaccaagatgttaccttcacgtatgaagacaaaaaaatcttctgttttgagcaggagtaagtccatatgttattgcattcacagcactggccgctggaacctcatggccagatctagttgctagcaagatagctgctgagcgtcaagtcaccgcggactctgcaatagccaacatcacttgcagtaactcggtgaacatatatgttggcattggtgttccatggttgattgatacagtgtacaacttcttcgtttaccgggaaccattgtacatagataatgctgccggtctcagcttctcccttctagtcttcttcgcgacatcatttggatgcataacggttttggttctgcgtcgtattatactcggtgctgagcttggaggccctaggctatgggcttgggttacatcagtctacttcatgatcctttgggttgtttttgttgtgttttcctctttaagagtatctggagtaatatagacaggaattaaaaaaaaaaggtagtgggggcttcgattttccataaattttgttgcaattggttttcatatccacaaagaaaacaactattgcgggtgaaaattagggtctgtgaattagggattatagatacaagtgcttgttctatataatgattactgatgaagccaacaatatattgtgtagtataattgaagttattgtatcagaaagaagggagaacagttggatagctcttaaattttttattcaatcagagtgttgcattatcaatcatacatgtaaatatcgaggcttatgttttgctagcattgtactactactattatgtttttatgggttaacaacagtacattggacataggctgcctcacattcatatgttttgctagtaactagagactgtataaggatatagaattcttaattcttgcactccctccgtttctttttattagtcgctgg

SEQ ID NO: 38536 - DNA, 2739 bp, Zea Mays
cctcacctcacctcacgtaaggagtggccgtcagttgctgttgcgggggtgtggtgtggccgccgagccgaaagcggcagcattcgtcgtctcccagatgcgcatgcggcggtagctagcttccgtcaccgctcccccagtaggccagtaccaccaaatctctagcgaggccgcccgcaaccgtgtcccggggttgaggatctgcgcggggccgtcctcgcgcgcgccgccgcatccccgccgtcccactccggcgaggctggctgcgttccgtcgtcgtcccccgcaccgccgctgactcctggaacaggaaccagcttcttcgcccccaccatctcacgtccagcgtcgcgaactcgcgatggcgggcgccgccactcctcctccgtcgtcgtcgtcgtcggcgtcgtgtggcacggacgctgcctacctgctgttccgcggggagacgctgctccccgacggcgtccacgcctccctctacgccgtcgctctcgcgtactgcttcgtggggctgtccgcggtcacggcccgcttcttcaaatccatggagcagatcatgaggcactcccgggaggtggtggtcggcgtggacccgcgcaccggggcgcccgtcgtgaggcgcgacaaggtgtggaactacaccgtcgcggacattgctctcctcgccttcggcaccagcttccctcagatctccctcgccaccatcgacgccatccgtaacctcggtcaactcacagcaggaggtctaggtccaggcacacttgtcggctctgcggcgtttgatctgtttccgatccacgctgtctgtgtgcttatgccaagggcgggatcaaagaagaagatctcggacctgggcgtttggttagtcgagctcttctggtctttctgggcatatatctggctctatgtcatcttagaggtgtggacgcctagagtgatcaccctctgggaggcatcgctgacagtcctgcagtatgggctgcttctactccatgcgtatgcgcaggataaacgatgtccatttgtgtcgatcccgtttgcgagaggtgagaggcctgaagattgggttccaccagaagatgtttctgctgtttattacgccaaatgtgatggcattgacgagacactccctatgggtgctgacgggaacgatgggattgtagacatcttctctgcacattcctactacgatgcagcagagtacagtcaacttgcagaagaggatatggaaggatcgtcaacaatggatcaagttgtaaagaacacacaagataacatgtcctggctttctatttggtggcaacaatttgttgatgcttcaatggtaatttggttcatttcatttatgggacagatgtgcctaacccttttaatacattggacaccataactagcatggtgcatggactgggaaatatgttctagacttttattttacaaatagttgatgaatttatttctaggtgctgctgagacaaatttgtttcccagagatagttatattgaaatagtttaatccacaccccttcccatctagccaggagaaaattcagtagcattaacatttgtcatttgccagtcttaaaactgagccccaatattaagaactttctgttttttttggcatagtaattgtttttttagcaatacatgcagttggagagccctgagtcaatgaagatggattctgtctgcctgaggtacaccagaatattttggaacttgatcattgcgccttggaagtttttgtttgcttttgtgcccccataccacattgcacatggctggattgcttttatatgctcactgatcttcataagtggtattgcttatggtgttactaagcttacagatcagataagctgcgtcacagcactggccgctggaacctcatggccagatctagttgctagcaagatagctgctgagcgtcaagtcaccgcggactctgcaatagccaacatcacttgcagtaactcggtgaacatatatgttggcattggtgttccatggttgattgatacagtgtacaacttcttcgtttaccgggaaccattgtacatagataatgctgccggtctcagcttctcccttctagtcttcttcgcgacatcatttggatgcataacggttttggttctgcgtcgtattatactcggtgctgagcttggaggccctaggctatgggcttgggttacatcagtctacttcatgatcctttgggttgtttttgttgtgttttcctctttaagagtatctggagtaatatagacaggaattaaaaaaaaaaggtagtgggggcttcgattttccataaattttgttgcaattggttttcatatccacaaagaaaacaactattgcgggtgaaaattagggtctgtgaattagggattatagatacaagtgcttgttctatataatgattactgatgaagccaacaatatattgtgtagtataattgaagttattgtatcagaaagaagggagaacagttggatagctcttaaattttttattcaatcagagtgttgcattatcaatcatacatgtaaatatcgaggcttatgttttgctagcattgtactactactattatgtttttatgggttaacaacagtacattggacataggctgcctcacattcatatgttttgctagtaactagagactgtataaggatatagaattcttaattcttgcactccctccgtttctttttattagtcgctgg

SEQ ID NO: 38537 - DNA, 2234 bp, Zea Mays
ccgaaagcggcagcattcgtcgtctcccagatgcgcatgcggcggtagctagcttccgtcaccgctcccccagtaggccagtaccaccaaatctctagcgaggccgcccgcaaccgtgtcccggggttgaggatctgcgcggggccgtcctcgcgcgcgccgccgcatccccgccgtcccactccggcgaggctggctgcgttccgtcgtcgtcccccgcaccgccgctgactcctggaacaggaaccagcttcttcgcccccaccatctcacgtccagcgtcgcgaactcgcgatggcgggcgccgccactcctcctccgtcgtcgtcgtcgtcggcgtcgtgtggcacggacgctgcctacctgctgttccgcggggagacgctgctccccgacggcgtccacgcctccctctacgccgtcgctctcgcgtactgcttcgtggggctgtccgcggtcacggcccgcttcttcaaatccatggagcagatcatgaggcactcccgggaggtggtggtcggcgtggacccgcgcaccggggcgcccgtcgtgaggcgcgacaaggtgtggaactacaccgtcgcggacattgctctcctcgccttcggcaccagcttccctcagatctccctcgccaccatcgacgccatccgtaacctcggtcaactcacagcaggagtgcgagaggtgagaggcctgaagattgggttccaccagaagatgtttctgctgtttattacgccaaatgtgatggcattgacgagacactccctatgggtgctgacgggaacgatgggattgtagacatcttctctgcacattcctactacgatgcagcagagtacagtcaacttgcagaagaggatatggaaggatcgtcaacaatggatcaagttgtaaagaacacacaagataacatgtcctggctttctatttggtggcaacaatttgttgatgcttcaatggtaatttggttcatttcatttatgggacagatgtgcctaacccttttaatacattggacaccataactagcatggtgcatggactgggaaatatgttctagacttttattttacaaatagttgatgaatttatttctaggtgctgctgagacaaatttgtttcccagagatagttatattgaaatagtttaatccacaccccttcccatctagccaggagaaaattcagtagcattaacatttgtcatttgccagtcttaaaactgagccccaatattaagaactttctgttttttttggcatagtaattgtttttttagcaatacatgcagttggagagccctgagtcaatgaagatggattctgtctgcctgaggagtaagtccatatgttattgcattcacagcactggccgctggaacctcatggccagatctagttgctagcaagatagctgctgagcgtcaagtcaccgcggactctgcaatagccaacatcacttgcagtaactcggtgaacatatatgttggcattggtgttccatggttgattgatacagtgtacaacttcttcgtttaccgggaaccattgtacatagataatgctgccggtctcagcttctcccttctagtcttcttcgcgacatcatttggatgcataacggttttggttctgcgtcgtattatactcggtgctgagcttggaggccctaggctatgggcttgggttacatcagtctacttcatgatcctttgggttgtttttgttgtgttttcctctttaagagtatctggagtaatatagacaggaattaaaaaaaaaaggtagtgggggcttcgattttccataaattttgttgcaattggttttcatatccacaaagaaaacaactattgcgggtgaaaattagggtctgtgaattagggattatagatacaagtgcttgttctatataatgattactgatgaagccaacaatatattgtgtagtataattgaagttattgtatcagaaagaagggagaacagttggatagctcttaaattttttattcaatcagagtgttgcattatcaatcatacatgtaaatatcgaggcttatgttttgctagcattgtactactactattatgtttttatgggttaacaacagtacattggacataggctgcctcacattcatatgttttgctagtaactagagactgtataaggatatagaattcttaattcttgcactccctccgtttctttttattagtcgctgg

SEQ ID NO: 38538 - DNA, 2189 bp, Zea Mays
ggcagcattcgtcgtctcccagatgcgcatgcggcggtagctagcttccgtcaccgctcccccagtaggccagtaccaccaaatctctagcgaggccgcccgcaaccgtgtcccggggttgaggatctgcgcggggccgtcctcgcgcgcgccgccgcatccccgccgtcccactccggcgaggctggctgcgttccgtcgtcgtcccccgcaccgccgctgactcctggaacaggaaccagcttcttcgcccccaccatctcacgtccagcgtcgcgaactcgcgatggcgggcgccgccactcctcctccgtcgtcgtcgtcgtcggcgtcgtgtggcacggacgctgcctacctgctgttccgcggggagacgctgctccccgacggcgtccacgcctccctctacgccgtcgctctcgcgtactgcttcgtggggctgtccgcggtcacggcccgcttcttcaaatccatggagcagatcatgaggcactcccgggaggtggtggtcggcgtggacccgcgcaccggggcgcccgtcgtgaggcgcgacaaggtgtggaactacaccgtcgcggacattgctctcctcgccttcggcaccagcttccctcagatctccctcgccaccatcgacgccatccgtaacctcggtcaactcacagcaggaggtctaggtccaggcacacttgtcggctctgcggcgtttgatctgtttccgatccacgctgtctgtgtgcttatgccaagggcgggatcaaagaagaagatctcggacctgggcgtttggttagtcgagctcttctggtctttctgggcatatatctggctctatgtcatcttagaggtgtggacgcctagagtgatcaccctctgggaggcatcgctgacagtcctgcagtatgggctgcttctactccatgcgtatgcgcaggataaacgatgtccatttgtgtcgatcccgtttgcgagaggtgagaggcctgaagattgggttccaccagaagatgtttctgctgtttattacgccaaatgtgatggcattgacgagacactccctatgggtgctgacgggaacgatgggattgtagacatcttctctgcacattcctactacgatgcagcagagtacagtcaacttgcagaagaggatatggaaggatcgtcaacaatggatcaagttgtaaagaacacacaagataacatgtcctggctttctatttggtggcaacaatttgttgatgcttcaatgttggagagccctgagtcaatgaagatggattctgtctgcctgaggagtaagtccatatgttattgcattcacagcactggccgctggaacctcatggccagatctagttgctagcaagatagctgctgagcgtcaagtcaccgcggactctgcaatagccaacatcacttgcagtaactcggtgaacatatatgttggcattggtgttccatggttgattgatacagtgtacaacttcttcgtttaccgggaaccattgtacatagataatgctgccggtctcagcttctcccttctagtcttcttcgcgacatcatttggatgcataacggttttggttctgcgtcgtattatactcggtgctgagcttggaggccctaggctatgggcttgggttacatcagtctacttcatgatcctttgggttgtttttgttgtgttttcctctttaagagtatctggagtaatatagacaggaattaaaaaaaaaaggtagtgggggcttcgattttccataaattttgttgcaattggttttcatatccacaaagaaaacaactattgcgggtgaaaattagggtctgtgaattagggattatagatacaagtgcttgttctatataatgattactgatgaagccaacaatatattgtgtagtataattgaagttattgtatcagaaagaagggagaacagttggatagctcttaaattttttattcaatcagagtgttgcattatcaatcatacatgtaaatatcgaggcttatgttttgctagcattgtactactactattatgtttttatgggttaacaacagtacattggacataggctgcctcacattcatatgttttgctagtaactagagactgtataaggatatagaattcttaattcttgcactccctccgtttctttttattagtcgctgg

SEQ ID NO: 38539 - DNA, 2748 bp, Zea Mays
ctagcttccgtcaccgctcccccagtaggccagtaccaccaaatctctagcgaggccgcccgcaaccgtgtcccggggttgaggatctgcgcggggccgtcctcgcgcgcgccgccgcatccccgccgtcccactccggcgaggctggctgcgttccgtcgtcgtcccccgcaccgccgctgactcctggaacaggaaccagcttcttcgcccccaccatctcacgtccagcgtcgcgaactcgcgatggcgggcgccgccactcctcctccgtcgtcgtcgtcgtcggcgtcgtgtggcacggacgctgcctacctgctgttccgcggggagacgctgctccccgacggcgtccacgcctccctctacgccgtcgctctcgcgtactgcttcgtggggctgtccgcggtcacggcccgcttcttcaaatccatggagcagatcatgaggcactcccgggaggtggtggtcggcgtggacccgcgcaccggggcgcccgtcgtgaggcgcgacaaggtgtggaactacaccgtcgcggacattgctctcctcgccttcggcaccagcttccctcagatctccctcgccaccatcgacgccatccgtaacctcggtcaactcacagcaggaggtctaggtccaggcacacttgtcggctctgcggcgtttgatctgtttccgatccacgctgtctgtgtgcttatgccaagggcgggatcaaagaagaagatctcggacctgggcgtttggttagtcgagctcttctggtctttctgggcatatatctggctctatgtcatcttagaggtgtggacgcctagagtgatcaccctctgggaggcatcgctgacagtcctgcagtatgggctgcttctactccatgcgtatgcgcaggataaacgatgtccatttgtgtcgatcccgtttgcgagaggtgagaggcctgaagattgggttccaccagaagatgtttctgctgtttattacgccaaatgtgatggcattgacgagacactccctatgggtgctgacgggaacgatgggattgtagacatcttctctgcacattcctactacgatgcagcagtcaacttgcagaagaggatatggaaggatcgtcaacaatggatcaagttgtaaagaacacacaagataacatgtcctggctttctatttggtggcaacaatttgttgatgcttcaatggtaatttggttcatttcatttatgggacagatgtgcctaacccttttaatacattggacaccataactagcatggtgcatggactgggaaatatgttctagacttttattttacaaatagttgatgaatttatttctaggtgctgctgagacaaatttgtttcccagagatagttatattgaaatagtttaatccacaccccttcccatctagccaggagaaaattcagtagcattaacatttgtcatttgccagtcttaaaactgagccccaatattaagaactttctgttttttttggcatagtaattgtttttttagcaatacatgcagttggagagccctgagtcaatgaagatggattctgtctgcctgaggtacaccagaatattttggaacttgatcattgcgccttggaagtttttgtttgcttttgtgcccccataccacattgcacatggctggattgcttttatatgctcactgatcttcataagtggtattgcttatggtgttactaagcttacagatcagataagctgcgtcacaggttaaattaaaacatactcaaaacacaactttaatgttcaatttgctgaccaagatgttaccttcacgtatgaagacaaaaaaatcttctgttttgagcaggagtaagtccatatgttattgcattcacagcactggccgctggaacctcatggccagatctagttgctagcaagatagctgctgagcgtcaagtcaccgcggactctgcaatagccaacatcacttgcagtaactcggtgaacatatatgttggcattggtgttccatggttgattgatacagtgtacaacttcttcgtttaccgggaaccattgtacatagataatgctgccggtctcagcttctcccttctagtcttcttcgcgacatcatttggatgcataacggttttggttctgcgtcgtattatactcggtgctgagcttggaggccctaggctatgggcttgggttacatcagtctacttcatgatcctttgggttgtttttgttgtgttttcctctttaagagtatctggagtaatatagacaggaattaaaaaaaaaaggtagtgggggcttcgattttccataaattttgttgcaattggttttcatatccacaaagaaaacaactattgcgggtgaaaattagggtctgtgaattagggattatagatacaagtgcttgttctatataatgattactgatgaagccaacaatatattgtgtagtataattgaagttattgtatcagaaagaagggagaacagttggatagctcttaaattttttattcaatcagagtgttgcattatcaatcatacatgtaaatatcgaggcttatgttttgctagcattgtactactactattatgtttttatgggttaacaacagtacattggacataggctgcctcacattcatatgttttgctagtaactagagactgtataaggatatagaattcttaattcttgcactccctccgtttctttttattagtcgctgg

SEQ ID NO: 38540 - DNA, 2119 bp, Zea Mays
ctagcttccgtcaccgctcccccagtaggccagtaccaccaaatctctagcgaggccgcccgcaaccgtgtcccggggttgaggatctgcgcggggccgtcctcgcgcgcgccgccgcatccccgccgtcccactccggcgaggctggctgcgttccgtcgtcgtcccccgcaccgccgctgactcctggaacaggaaccagcttcttcgcccccaccatctcacgtccagcgtcgcgaactcgcgatggcgggcgccgccactcctcctccgtcgtcgtcgtcgtcggcgtcgtgtggcacggacgctgcctacctgctgttccgcggggagacgctgctccccgacggcgtccacgcctccctctacgccgtcgctctcgcgtactgcttcgtggggctgtccgcggtcacggcccgcttcttcaaatccatggagcagatcatgaggcactcccgggaggtggtggtcggcgtggacccgcgcaccggggcgcccgtcgtgaggcgcgacaaggtgtggaactacaccgtcgcggacattgctctcctcgccttcggcaccagcttccctcagatctccctcgccaccatcgacgccatccgtaacctcggtcaactcacagcaggaggtctaggtccaggcacacttgtcggctctgcggcgtttgatctgtttccgatccacgctgtctgtgtgcttatgccaagggcgggatcaaagaagaagatctcggacctgggcgtttggttagtcgagctcttctggtctttctgggcatatatctggctctatgtcatcttagaggtgtggacgcctagagtgatcaccctctgggaggcatcgctgacagtcctgcagtatgggctgcttctactccatgcgtatgcgcaggataaacgatgtccatttgtgtcgatcccgtttgcgagaggtgagaggcctgaagattgggttccaccagaagatgtttctgctgtttattacgccaaatgtgatggcattgacgagacactccctatgggtgctgacgggaacgatgggattgtagacatcttctctgcacattcctactacgatgcagcagagtacagtcaacttgcagaagaggatatggaaggatcgtcaacaatggatcaagttgtaaagaacacacaagataacatgtcctggctttctatttggtggcaacaatttgttgatgcttcaatgttggagagccctgagtcaatgaagatggattctgtctgcctgagcactggccgctggaacctcatggccagatctagttgctagcaagatagctgctgagcgtcaagtcaccgcggactctgcaatagccaacatcacttgcagtaactcggtgaacatatatgttggcattggtgttccatggttgattgatacagtgtacaacttcttcgtttaccgggaaccattgtacatagataatgctgccggtctcagcttctcccttctagtcttcttcgcgacatcatttggatgcataacggttttggttctgcgtcgtattatactcggtgctgagcttggaggccctaggctatgggcttgggttacatcagtctacttcatgatcctttgggttgtttttgttgtgttttcctctttaagagtatctggagtaatatagacaggaattaaaaaaaaaaggtagtgggggcttcgattttccataaattttgttgcaattggttttcatatccacaaagaaaacaactattgcgggtgaaaattagggtctgtgaattagggattatagatacaagtgcttgttctatataatgattactgatgaagccaacaatatattgtgtagtataattgaagttattgtatcagaaagaagggagaacagttggatagctcttaaattttttattcaatcagagtgttgcattatcaatcatacatgtaaatatcgaggcttatgttttgctagcattgtactactactattatgtttttatgggttaacaacagtacattggacataggctgcctcacattcatatgttttgctagtaactagagactgtataaggatatagaattcttaattcttgcactccctccgtttctttttattagtcgctgg

SEQ ID NO: 38541 - DNA, 2180 bp, Zea Mays
actggtggctgacgcttcccctcccgcgatcccgtgggcccgcctcgctcactactggtctgcttgctgcttctggaatcccccctcccctccgccacccataacttccatcgccatcgctccaccaaagctggggacgcctccccgcccgaccagcgccgacgccgacgacgagcatcccatccgccagtgaccgaaatttcacaccaggcgctgcaagcgactgcaatggctatgtaccagcgctccaagcgggcagccgggaactagctcatcagtcattactgacggcgtaatcttcatccgagtggtcagtggcgtctacagtcgcagcagcttgtgcgcgcatggctagcaacatgtacggcaccacggtggcctgtaggatgtgctacagagaccagtacaggccgccgccgcgcgacttcacttgcgaggccaggaaatcggaggccaggaggtggggaaacgggtaccacctcatccccaggctctgccagtggaagcccagaggcagcaagtctgatggctcactgctcggcgacggccacggtggccgcgatgctcgctgccactcttgtggttcccataacagctgcgagtgcgaaactagagactgcgatgctatggaagatgctgctgcgagctcttaccgagatttcaagcaacattcaaggggaaatcctcaattttcagatgatcaagtttcatcgaagaataagtcagcctatgctagtcaagggttggctgaagcctgcaaatttgtttacaatgatgctaagtttgtaaatgaaagggctcaaaatgacattctattactttcacgtggcataacaaggctgaacaaacgcgcatgccaggatgctgctgttttgggcctggggtttctcaaacttgatgctcgtgcacggaaggatactcaaaagattgaccacacagtgaaggagagagcagcgcttcttaaccattttgccagagcatttaaggagcgagctcagtcagacttgaagaaagctgcagacaaacattggagtgatggtgccttggagacctgcgacgagctgacttggttgttaaacgacgtgccatggaagacgctttcatggcattgaagtttgttcaggatatccatgacatgatggtgaacagattatatgagcagcttccgaaggacggttcatcttctcgtacaaattcaacagggtttattacgcttgagaagaacgggaaggctcttgaactgtttcctggtgaagtttctgctgatcagatttatgccatagaggaagcataccagagtatggcatctgccttttctgaagctgatggtattgactacacagatcctgaggagcttgaattgttggtagcaactctaattgacctggatgccatggatgggaaaaggagtgtttccttgattgctgaatgttcaagctctccagatgttaatactaggaaagccctagctaatgcattggctacagctccatctatgtggactcttgggaatgctggcatgggtgcattgcagaggctggctcaagatcccaactacgccgtagctagggctgcatcaagagccattgatgaactcaagaagcagtgggaacttgaagaaggtgacagtctgaggtttgtgatgaaccagaatctggcctccagggatactgaggatgacaattcaccagcggatgatgccgcatgagtcataaacaagatgaaagattccagtttcagtggcaatggatcaaagcacaaggaaccaccatgggcagcacataagcattcccattttacgtttaggactgaaaatcagatagatgtgttctagttgaggggggggggggggggggggatgtgttctggaacttgggtaaatgggggaattatgaaaacagtgtaaatagaagtctgctccctttggatattgttcatgcatgaagcaaaatgttatatctgaaaagcgcgtaccttgtaccagagtatctagtcttaggtgctccttgtttttatatatagtactgtaatatggcaaaaattatgtatctggataacacatgtagcttggttttgtcggcactgcatattgaggattgagtatgacttgtaccagcaattaataagtacctttattcgggtaacaattgcacacaggaacatggatccgttataggatg

SEQ ID NO: 38542 - DNA, 2171 bp, Zea Mays
cgcttcccctcccgcgatcccgtgggcccgcctcgctcactactggtctgcttgctgcttctggaatcccccctcccctccgccacccataacttccatcgccatcgctccaccaaagctggggacgcctccccgcccgaccagcgccgacgccgacgacgagcatcccatccgccagtgaccgaaatttcacaccaggcgctgcaagcgactgcaatggctatgtaccagcgctccaagcgggcagccgggaactagctcatcagtcattactgacggcgtaatcttcatccgagtggtcagtggcgtctacagtcgcagcagcttgtgcgcgcatggctagcaacatgtacggcaccacggtggcctgtaggatgtgctacagagaccagtacaggccgccgccgcgcgacttcacttgcgaggccaggaaatcggaggccaggaggtggggaaacgggtaccacctcatccccaggctctgccagtggaagcccagaggcagcaagtctgatggctcactgctcggcgacggccacggtggccgcgatgctcgctgccactcttgtggttcccataacagctgcgagtgcgaaactagagactgcgatgctatggaagatgctgctgcgagctcttaccgagatttcaagcaacattcaaggggaaatcctcaattttcagatgatcaagtttcatcgaagaataagtcagcctatgctagtcaagggttggctgaagcctgcaaatttgtttacaatgatgctaagtttgtaaatgaaagggctcaaaatgacattctattactttcacgtggcataacaaggctgaacaaacgcgcatgccaggatgctgctgttttgggcctggggtttctcaaacttgatgctcgtgcacggaaggatactcaaaagattgaccacacagtgaaggagagagcagcgcttcttaaccattttgccagagcatttaaggagcgagctcagtcagacttgaagaaagctgcagacaaacattggagtgatggtgccttggaggcagacctgcgacgagctgacttggttgttaaacgacgtgccatggaagacgctttcatggcattgaagtttgttcaggatatccatgacatgatggtgaacagattatatgagcagcttccgaaggacggttcatcttctcgtacaaattcaacagggtttattacgcttgagaagaacgggaaggctcttgaactgtttcctggtgaagtttctgctgatcagatttatgccatagagaagcataccagagtatggcatctgccttttctgaagctgatggtattgactacacagatcctgaggagcttgaattgttggtagcaactctaattgacctggatgccatggatgggaaaaggagtgtttccttgattgctgaatgttcaagctctccagatgttaatactaggaaagccctagctaatgcattggctacagctccatctatgtggactcttgggaatgctggcatgggtgcattgcagaggctggctcaagatcccaactacgccgtagctagggctgcatcaagagccattgatgaactcaagaagcagtgggaacttgaagaaggtgacagtctgaggtttgtgatgaaccagaatctggcctccagggatactgaggatgacaattcaccagcggatgatgccgcatgagtcataaacaagatgaaagattccagtttcagtggcaatggatcaaagcacaaggaaccaccatgggcagcacataagcattcccattttacgtttaggactgaaaatcagatagatgtgttctagttgaggggggggggggggggggggatgtgttctggaacttgggtaaatgggggaattatgaaaacagtgtaaatagaagtctgctccctttggatattgttcatgcatgaagcaaaatgttatatctgaaaagcgcgtaccttgtaccagagtatctagtcttaggtgctccttgtttttatatatagtactgtaatatggcaaaaattatgtatctggataacacatgtagcttggttttgtcggcactgcatattgaggattgagtatgacttgtaccagcaattaataagtacctttattcgggtaacaattgcacacaggaacatggatccgttataggatg

SEQ ID NO: 38543 - DNA, 2110 bp, Zea Mays
gtgggcccgcctcgctcactactggtctgcttgctgcttctggaatcccccctcccctccgccacccataacttccatcgccatcgctccaccaaagctggggacgcctccccgcccgaccagcgccgacgccgacgacgagcatcccatccgccagtgaccgaaatttcacaccaggcgctgcaagcgactgcaatggctatgtaccagcgctccaagcgggcagccgggaactagctcatcagtcattactgacggcgtaatcttcatccgagtggtcagtggcgtctacagtcgcagcagcttgtgcgcgcatggctagcaacatgtacggcaccacggtggcctgtaggatgtgctacagagaccagtacaggccgccgccgcgcgacttcacttgcgaggccaggaaatcggaggccaggaggtggggaaacgggtaccacctcatccccaggctctgccagtggaagcccagaggcagcaagtctgatggctcactgctcggcgacggccacggtggccgcgatgctcgctgccactcttgtggttcccataacagctgcgagtgcgaaactagagactgcgatgctatggaagatgctgctgcgagctcttaccgagatttcaagcaacattcaaggggaaatcctcaattttcagatgatcaagtttcatcgaagaataagtcagcctatgctagtcaagggttggctgaagcctgcaaatttgtttacaatgatgctaagtttgtaaatgaaagggctcaaaatgacattctattactttcacgtggcataacaaggctgaacaaacgcgcatgccaggatgctgctgttttgggcctggggtttctcaaacttgatgctcgtgcacggaaggatactcaaaagattgaccacacagtgaaggagagagcagcgcttcttaaccattttgccagagcatttaaggagcgagctcagtcagacttgaagaaagctgcagacaaacattggagtgatggtgccttggaggcagacctgcgacgagctgacttggttgttaaacgacgtgccatggaagacgctttcatggcattgaagtttgttcaggatatccatgacatgatggtgaacagattatatgagcaggtttattacgcttgagaagaacgggaaggctcttgaactgtttcctggtgaagtttctgctgatcagatttatgccatagaggaagcataccagagtatggcatctgccttttctgaagctgatggtattgactacacagatcctgaggagcttgaattgttggtagcaactctaattgacctggatgccatggatgggaaaaggagtgtttccttgattgctgaatgttcaagctctccagatgttaatactaggaaagccctagctaatgcattggctacagctccatctatgtggactcttgggaatgctggcatgggtgcattgcagaggctggctcaagatcccaactacgccgtagctagggctgcatcaagagccattgatgaactcaagaagcagtgggaacttgaagaaggtgacagtctgaggtttgtgatgaaccagaatctggcctccagggatactgaggatgacaattcaccagcggatgatgccgcatgagtcataaacaagatgaaagattccagtttcagtggcaatggatcaaagcacaaggaaccaccatgggcagcacataagcattcccattttacgtttaggactgaaaatcagatagatgtgttctagttgaggggggggggggggggggggatgtgttctggaacttgggtaaatgggggaattatgaaaacagtgtaaatagaagtctgctccctttggatattgttcatgcatgaagcaaaatgttatatctgaaaagcgcgtaccttgtaccagagtatctagtcttaggtgctccttgtttttatatatagtactgtaatatggcaaaaattatgtatctggataacacatgtagcttggttttgtcggcactgcatattgaggattgagtatgacttgtaccagcaattaataagtacctttattcgggtaacaattgcacacaggaacatggatccgttataggatg

SEQ ID NO: 38544 - DNA, 2120 bp, Zea Mays
ctgcttgctgcttctggaatcccccctcccctccgccacccataacttccatcgccatcgctccaccaaagctggggacgcctccccgcccgaccagcgccgacgccgacgacgagcatcccatccgccagtgaccgaaatttcacaccaggcgctgcaagcgactgcaatggctatgtaccagcgctccaagcgggcagccgggaactagctcatcagtcattactgacggcgtaatcttcatccgagtggtcagtggcgtctacagtcgcagcagcttgtgcgcgcatggctagcaacatgtacggcaccacggtggcctgtaggatgtgctacagagaccagtacaggccgccgccgcgcgacttcacttgcgaggccaggaaatcggaggccaggaggtggggaaacgggtaccacctcatccccaggctctgccagtggaagcccagaggcagcaagtctgatggctcactgctcggcgacggccacggtggccgcgatgctcgctgccactcttgtggttcccataacagctgcgagtgcgaaactagagactgcgatgctatggaagatgctgctgcgagctcttaccgagatttcaagcaacattcaaggggaaatcctcaattttcagatgatcaagtttcatcgaagaataagtcagcctatgctagtcaagggttggctgaagcctgcaaatttgtttacaatgatgctaagtttgtaaatgaaagggctcaaaatgacattctattactttcacgtggcataacaaggctgaacaaacgcgcatgccaggatgctgctgttttgggcctggggtttctcaaacttgatgctcgtgcacggaaggatactcaaaagattgaccacacagtgaaggagagagcagcgcttcttaaccattttgccagagcatttaaggagcgagctcagtcagacttgaagaaagctgcagacaaacattggagtgatggtgccttggaggcagacctgcgacgagctgacttggttgttaaacgacgtgccatggaagacgctttcatggcattgaagtttgttcaggatatccatgacatgatggtgaacagattatatgagcagcttccgaaggacggttcatcttctcgtacaaattcaacagggtttattacgcttgagaagaacgggaaggctcttgaactgtttcctggtgaagtttctgctgatcagatttatgccatagaggaagcataccagagtatggcatctgccttttctgaagctgatggtattgactacacagatcctgaggagcttgaattgttggtagcaactctaattgacctggatgccatggatgggaaaaggagtgtttccttgattgctgaatgttcaagctctccagatgttaatactagccctagctaatgcattggctacagctccatctatgtggactcttgggaatgctggcatgggtgcattgcagaggctggctcaagatcccaactacgccgtagctagggctgcatcaagagccattgatgaactcaagaagcagtgggaacttgaagaaggtgacagtctgaggtttgtgatgaaccagaatctggcctccagggatactgaggatgacaattcaccagcggatgatgccgcatgagtcataaacaagatgaaagattccagtttcagtggcaatggatcaaagcacaaggaaccaccatgggcagcacataagcattcccattttacgtttaggactgaaaatcagatagatgtgttctagttgaggggggggggggggggggggatgtgttctggaacttgggtaaatgggggaattatgaaaacagtgtaaatagaagtctgctccctttggatattgttcatgcatgaagcaaaatgttatatctgaaaagcgcgtaccttgtaccagagtatctagtcttaggtgctccttgtttttatatatagtactgtaatatggcaaaaattatgtatctggataacacatgtagcttggttttgtcggcactgcatattgaggattgagtatgacttgtaccagcaattaataagtacctttattcgggtaacaattgcacacaggaacatggatccgttataggatg

SEQ ID NO: 38545 - DNA, 2099 bp, Zea Mays
cttctggaatcccccctcccctccgccacccataacttccatcgccatcgctccaccaaagctggggacgcctccccgcccgaccagcgccgacgccgacgacgagcatcccatccgccagtgaccgaaatttcacaccaggcgctgcaagcgactgcaatggctatgtaccagcgctccaagcgggcagccgggaactagctcatcagtcattactgacggcgtaatcttcatccgagtggtcagtggcgtctacagtcgcagcagcttgtgcgcgcatggctagcaacatgtacggcaccacggtggcctgtaggatgtgctacagagaccagtacaggccgccgccgcgcgacttcacttgcgaggccaggaaatcggaggccaggaggtggggaaacgggtaccacctcatccccaggctctgccagtggaagcccagaggcagcaagtctgatggctcactgctcggcgacggccacggtggccgcgatgctcgctgccactcttgtggttcccataacagctgcgagtgcgaaactagagactgcgatgctatggaagatgctgctgcgagctcttaccgagatttcaagcaacattcaaggggaaatcctcaattttcagatgatcaagtttcatcgaagaataagtcagcctatgctagtcaagggttggctgaagcctgcaaatttgtttacaatgatgctaagtttgtaaatgaaagggctcaaaatgacattctattactttcacgtggcataacaaggctgaacaaacgcgcatgccaggatgctgctgttttgggcctggggtttctcaaacttgatgctcgtgcacggaaggatactcaaaagattgaccacacagtgaaggagagagcagcgcttcttaaccattttgccagagcatttaaggagcgagctcagtcagacttgaagaaagctgcagacaaacattggagtgatggtgccttggaggcagacctgcgacgagctgacttggttgttaaacgacgtgccatggaagacgctttcatggcattgaagtttgttcaggatatccatgacatgatggtgaacagattatatgagcagcttccgaaggacggttcatcttctcgtacaaattcaacagggtttattacgcttgagaagaacgggaaggctcttgaactgtttcctggtgaagtttctgctgatcagatttatgccatagaggaagcataccagagtatggcatctgccttttctgaagctgatggtattgactacacagatcctgaggagcaactctaattgacctggatgccatggatgggaaaaggagtgtttccttgattgctgaatgttcaagctctccagatgttaatactaggaaagccctagctaatgcattggctacagctccatctatgtggactcttgggaatgctggcatgggtgcattgcagaggctggctcaagatcccaactacgccgtagctagggctgcatcaagagccattgatgaactcaagaagcagtgggaacttgaagaaggtgacagtctgaggtttgtgatgaaccagaatctggcctccagggatactgaggatgacaattcaccagcggatgatgccgcatgagtcataaacaagatgaaagattccagtttcagtggcaatggatcaaagcacaaggaaccaccatgggcagcacataagcattcccattttacgtttaggactgaaaatcagatagatgtgttctagttgaggggggggggggggggggggatgtgttctggaacttgggtaaatgggggaattatgaaaacagtgtaaatagaagtctgctccctttggatattgttcatgcatgaagcaaaatgttatatctgaaaagcgcgtaccttgtaccagagtatctagtcttaggtgctccttgtttttatatatagtactgtaatatggcaaaaattatgtatctggataacacatgtagcttggttttgtcggcactgcatattgaggattgagtatgacttgtaccagcaattaataagtacctttattcgggtaacaattgcacacaggaacatggatccgttataggatg

SEQ ID NO: 38546 - DNA, 2113 bp, Zea Mays
cccctcccctccgccacccataacttccatcgccatcgctccaccaaagctggggacgcctccccgcccgaccagcgccgacgccgacgacgagcatcccatccgccagtgaccgaaatttcacaccaggcgctgcaagcgactgcaatggctatgtaccagcgctccaagcgggcagccgggaactagctcatcagtcattactgacggcgtaatcttcatccgagtggtcagtggcgtctacagtcgcagcagcttgtgcgcgcatggctagcaacatgtacggcaccacggtggcctgtaggatgtgctacagagaccagtacaggccgccgccgcgcgacttcacttgcgaggccaggaaatcggaggccaggaggtggggaaacgggtaccacctcatccccaggctctgccagtggaagcccagaggcagcaagtctgatggctcactgctcggcgacggccacggtggccgcgatgctcgctgccactcttgtggttcccataacagctgcgagtgcgaaactagagactgcgatgctatggaagatgctgctgcgagctcttaccgagatttcaagcaacattcaaggggaaatcctcaattttcagatgatcaagtttcatcgaagaataagtcagcctatgctagtcaagggttggctgaagcctgcaaatttgtttacaatgatgctaagtttgtaaatgaaagggctcaaaatgacattctattactttcacgtggcataacaaggctgaacaaacgcgcatgccaggatgctgctgttttgggcctggggtttctcaaacttgatgctcgtgcacggaaggatactcaaaagattgaccacacagtgaaggagagagcagcgcttcttaaccattttgccagagtatgtatctgcatttaaggagcgagctcagtcagacttgaagaaagctgcagacaaacattggagtgatggtgccttggaggcagacctgcgacgagctgacttggttgttaaacgacgtgccatggaagacgctttcatggcattgaagtttgttcaggatatccatgacatgatggtgaacagattatatgagcagcttccgaaggacggttcatcttctcgtacaaattcaacagggtttattacgcttgagaagaacgggaaggctcttgaactgtttcctggtgaagtttctgctgatcagatttatgccatagaggaagcataccagagtatggcatctgccttttctgaagctgatggtattgactacacagatcctgaggagcttgaattgttggtagcaactctaattgacctggatgccatggatgggaaaaggagtgtttccttgattgctgaatgttcaagctctccagatgttaatactaggaaagccctagctaatgcattggctacagctccatctatgtggactcttgggaatgctggcatgggtgcattgcagaggctggctcaagatcccaactacgccgtagctagggctgcatcaagagccattgatgaactcaagaagcagtgggaacttgaagaaggtgacagtctgaggtttgtgatgaaccagaatctggcctccagggatactgaggatgacaattcaccagcggatgatgccgcatgagtcataaacaagatgaaagattccagtttcagtggcaatggatcaaagcacaaggaaccaccatgggcagcacataagcattcccattttacgtttaggactgaaaatcagatagatgtgttctagttgaggggggggggggggggggggatgtgttctggaacttgggtaaatgggggaattatgaaaacagtgtaaatagaagtctgctccctttggatattgttcatgcatgaagcaaaatgttatatctgaaaagcgcgtaccttgtaccagagtatctagtcttaggtgctccttgtttttatatatagtactgtaatatggcaaaaattatgtatctggataacacatgtagcttggttttgtcggcactgcatattgaggattgagtatgacttgtaccagcaattaataagtacctttattcgggtaacaattgcacacaggaacatggatccgttataggatg

SEQ ID NO: 38547 - DNA, 2091 bp, Zea Mays
cccctcccctccgccacccataacttccatcgccatcgctccaccaaagctggggacgcctccccgcccgaccagcgccgacgccgacgacgagcatcccatccgccagtgaccgaaatttcacaccaggcgctgcaagcgactgcaatggctatgtaccagcgctccaagcgggcagccgggaactagctcatcagtcattactgacggcgtaatcttcatccgagtggtcagtggcgtctacagtcgcagcagcttgtgcgcgcatggctagcaacatgtacggcaccacggtggcctgtaggatgtgctacagagaccagtacaggccgccgccgcgcgacttcacttgcgaggccaggaaatcggaggccaggaggtggggaaacgggtaccacctcatccccaggctctgccagtggaagcccagaggcagcaagtctgatggctcactgctcggcgacggccacggtggccgcgatgctcgctgccactcttgtggttcccataacagctgcgagtgcgaaactagagactgcgatgctatggaagatgctgctgcgagctcttaccgagatttcaagcaacattcaaggggaaatcctcaattttcagatgatcaagtttcatcgaagaataagtcagcctatgctagtcaagggttggctgaagcctgcaaatttgtttacaatgatgctaagtttgtaaatgaaagggctcaaaatgacattctattactttcacggctgaacaaacgcgcatgccaggatgctgctgttttgggcctggggtttctcaaacttgatgctcgtgcacggaaggatactcaaaagattgaccacacagtgaaggagagagcagcgcttcttaaccattttgccagagcatttaaggagcgagctcagtcagacttgaagaaagctgcagacaaacattggagtgatggtgccttggaggcagacctgcgacgagctgacttggttgttaaacgacgtgccatggaagacgctttcatggcattgaagtttgttcaggatatccatgacatgatggtgaacagattatatgagcagcttccgaaggacggttcatcttctcgtacaaattcaacagggtttattacgcttgagaagaacgggaaggctcttgaactgtttcctggtgaagtttctgctgatcagatttatgccatagaggaagcataccagagtatggcatctgccttttctgaagctgatggtattgactacacagatcctgaggagcttgaattgttggtagcaactctaattgacctggatgccatggatgggaaaaggagtgtttccttgattgctgaatgttcaagctctccagatgttaatactaggaaagccctagctaatgcattggctacagctccatctatgtggactcttgggaatgctggcatgggtgcattgcagaggctggctcaagatcccaactacgccgtagctagggctgcatcaagagccattgatgaactcaagaagcagtgggaacttgaagaaggtgacagtctgaggtttgtgatgaaccagaatctggcctccagggatactgaggatgacaattcaccagcggatgatgccgcatgagtcataaacaagatgaaagattccagtttcagtggcaatggatcaaagcacaaggaaccaccatgggcagcacataagcattcccattttacgtttaggactgaaaatcagatagatgtgttctagttgaggggggggggggggggggggatgtgttctggaacttgggtaaatgggggaattatgaaaacagtgtaaatagaagtctgctccctttggatattgttcatgcatgaagcaaaatgttatatctgaaaagcgcgtaccttgtaccagagtatctagtcttaggtgctccttgtttttatatatagtactgtaatatggcaaaaattatgtatctggataacacatgtagcttggttttgtcggcactgcatattgaggattgagtatgacttgtaccagcaattaataagtacctttattcgggtaacaattgcacacaggaacatggatccgttataggatg

SEQ ID NO: 38548 - DNA, 2024 bp, Zea Mays
atggcaaaattgcaaatggctcctattctgtgaccgaaatttcacaccaggcgctgcaagcgactgcaatggctatgtaccagcgctccaagcgggcagccgggaactagctcatcagtcattactgacggcgtaatcttcatccgagtggtcagtggcgtctacagtcgcagcagcttgtgcgcgcatggctagcaacatgtacggcaccacggtggcctgtaggatgtgctacagagaccagtacaggccgccgccgcgcgacttcacttgcgaggccaggaaatcggaggccaggaggtggggaaacgggtaccacctcatccccaggctctgccagtggaagcccagaggcagcaagtctgatggctcactgctcggcgacggccacggtggccgcgatgctcgctgccactcttgtggttcccataacagctgcgagtgcgaaactagagactgcgatgctatggaagatgctgctgcgagctcttaccgagatttcaagcaacattcaaggggaaatcctcaattttcagatgatcaagtttcatcgaagaataagtcagcctatgctagtcaagggttggctgaagcctgcaaatttgtttacaatgatgctaagtttgtaaatgaaagggctcaaaatgacattctattactttcacgtggcataacaaggctgaacaaacgcgcatgccaggatgctgctgttttgggcctggggtttctcaaacttgatgctcgtgcacggaaggatactcaaaagattgaccacacagtgaaggagagagcagcgcttcttaaccattttgccagagcatttaaggagcgagctcagtcagacttgaagaaagctgcagacaaacattggagtgatggtgccttggaggcagacctgcgacgagctgacttggttgttaaacgacgtgccatggaagacgctttcatggcattgaagtttgttcaggatatccatgacatgatggtgaacagattatatgagcagcttccgaaggacggttcatcttctcgtacaaattcaacagggtttattacgcttgagaagaacgggaaggctcttgaactgtttcctggtgaagtttctgctgatcagatttatgccatagaggaagcataccagagtatggcatctgccttttctgaagctgatggtattgactacacagatcctgaggagcttgaattgttggtagcaactctaattgacctggatgccatggatgggaaaaggagtgtttccttgattgctgaatgttcaagctctccagatgttaatactaggaaagccctagctaatgcattggctacagctccatctatgtggactcttgggaatgctggcatgggtgcattgcagaggctggctcaagatcccaactacgccgtagctagggctgcatcaagagccattgatgaactcaagaagcagtgggaacttgaagaaggtgacagtctgaggtttgtgatgaaccagaatctggcctccagggatactgaggatgacaattcaccagcggatgatgccgcatgagtcataaacaagatgaaagattccagtttcagtggcaatggatcaaagcacaaggaaccaccatgggcagcacataagcattcccattttacgtttaggactgaaaatcagatagatgtgttctagttgaggggggggggggggggggggatgtgttctggaacttgggtaaatgggggaattatgaaaacagtgtaaatagaagtctgctccctttggatattgttcatgcatgaagcaaaatgttatatctgaaaagcgcgtaccttgtaccagagtatctagtcttaggtgctccttgtttttatatatagtactgtaatatggcaaaaattatgtatctggataacacatgtagcttggttttgtcggcactgcatattgaggattgagtatgacttgtaccagcaattaataagtacctttattcgggtaacaattgcacacaggaacatggatccgttataggatg

SEQ ID NO: 38549 - DNA, 1101 bp, Zea Mays
cacaccagaagttattcaacgcaacatgccaacatcgaagtttgttcaggatatccatgacatgatggtgaacagattatatgagcagcttccgaaggacggttcatcttctcgtacaaattcaacagggtttattacgcttgagaagaacgggaaggctcttgaactgtttcctggtgaagtttctgctgatcagatttatgccatagaggaagcataccagagtatggcatctgccttttctgaagctgatggtattgactacacagatcctgaggagcttgaattgttggtagcaactctaattgacctggatgccatggatgggaaaaggagtgtttccttgattgctgaatgttcaagctctccagatgttaatactagccctagctaatgcattggctacagctccatctatgtggactcttgggaatgctggcatgggtgcattgcagaggctggctcaagatcccaactacgccgtagctagggctgcatcaagagccattgatgaactcaagaagcagtgggaacttgaagaaggtgacagtctgaggtttgtgatgaaccagaatctggcctccagggatactgaggatgacaattcaccagcggatgatgccgcatgagtcataaacaagatgaaagattccagtttcagtggcaatggatcaaagcacaaggaaccaccatgggcagcacataagcattcccattttacgtttaggactgaaaatcagatagatgtgttctagttgaggggggggggggggggggggatgtgttctggaacttgggtaaatgggggaattatgaaaacagtgtaaatagaagtctgctccctttggatattgttcatgcatgaagcaaaatgttatatctgaaaagcgcgtaccttgtaccagagtatctagtcttaggtgctccttgtttttatatatagtactgtaatatggcaaaaattatgtatctggataacacatgtagcttggttttgtcggcactgcatattgaggattgagtatgacttgtaccagcaattaataagtacctttattcgggtaacaattgcacacaggaacatggatccgttataggatg

SEQ ID NO: 38550 - DNA, 1083 bp, Zea Mays
ttattcaacgcaacatgccaacatcgaagtttgttcaggatatccatgacatgatggtgaacagattatatgagcagcttccgaaggacggttcatcttctcgtacaaattcaacagggtttattacgcttgagaagaacgggaaggctcttgaactgtttcctggtgaagtttctgctgatcagatttatgccatagagagtatggcatctgccttttctgaagctgatggtattgactacacagatcctgaggagcttgaattgttggtagcaactctaattgacctggatgccatggatgggaaaaggagtgtttccttgattgctgaatgttcaagctctccagatgttaatactaggaaagccctagctaatgcattggctacagctccatctatgtggactcttgggaatgctggcatgggtgcattgcagaggctggctcaagatcccaactacgccgtagctagggctgcatcaagagccattgatgaactcaagaagcagtgggaacttgaagaaggtgacagtctgaggtttgtgatgaaccagaatctggcctccagggatactgaggatgacaattcaccagcggatgatgccgcatgagtcataaacaagatgaaagattccagtttcagtggcaatggatcaaagcacaaggaaccaccatgggcagcacataagcattcccattttacgtttaggactgaaaatcagatagatgtgttctagttgaggggggggggggggggggggatgtgttctggaacttgggtaaatgggggaattatgaaaacagtgtaaatagaagtctgctccctttggatattgttcatgcatgaagcaaaatgttatatctgaaaagcgcgtaccttgtaccagagtatctagtcttaggtgctccttgtttttatatatagtactgtaatatggcaaaaattatgtatctggataacacatgtagcttggttttgtcggcactgcatattgaggattgagtatgacttgtaccagcaattaataagtacctttattcgggtaacaattgcacacaggaacatggatccgttataggatg

SEQ ID NO: 38551 - DNA, 2362 bp, Zea Mays
ccctcccattctctcagtctctctccatccaccacccgacccgatagtgtcctagacgccgctaccgccgccaaccaaccactcttctcctacgccgccgccgccgccgatcccgtcgcgatgagccacgacaccggcgccggcgtggagtccctctcgctggacctgctggcccacgcgctggcggccgtgcgcgacccgcgggaccgcaagtcgtgccgcctcgccagccgcgccttcgcgcgcgccgaggccgcgtcccgccgcgccgcgcgggtgctgcgccgggacgcgctgccgcgggcgctgcgcgccttcccggcgctgtcctcgctcgacctctccgcgtgcgcggggctcgacgacgcctccctcgccgccgcgctgcccgaggagccgctgcccgtccgccgggtgcgcctcgcgcgggccagcggcgtcggctggcgcggcctcgacgcgctcgtggcggcgtgcccgagcctcgaggccgtcgacctctcgcactgcgtcgccgccggcgacagggagatggccgcgctcgccgccgccgccgggctcagggacctcgtcatggacaagtgcctcggcgtcaccgacgtcgggctcgccaaggtcgccgtcggatgcccgggcctccagagcctcagcctcaagtggtgccgcgagatctccgacatcggcgtcgacctgctcgccaagaagtgcccccaactgcgcagcctcgatatctcctacctcaaggtgaccaatgaatcccttagatcactctccacccttgagaagctagaggacatagcaatggtcagctgcttgtttgtagacgatgatggcctacagatgctaagtatgtgcagctcgctgcagagtattgatgtagccaggtgccaccatgtgtcttctttgggcttagcttcactcatggatggtcaaagatctctccggaaaataaatgtcgcacacagtttgcatgagatagaggcttgtgttctgagcaagttatcaacaataggagaaaccttgactgttttaagactcgacggcctcgaaatcttcgcctcgaatctccaggcaattggttctacctgcaagaatctggtcgagattgggcttagcaaatgcaatggcgttacggatgatggtatcgtttcgctagttgctcgttgccgcgacttaaggactatcgacgtgacgtgctgccatcttcttacaaatgctgcccttgctgcaatcgccgagaactgtagaaagattgaatgccttcggcttgaatcctgccctttcgtaagcgagaagggactagagtcgatcgcaactctctgttccgaccttaaggagattgacctcaccgattgtcgtattaatgacgcagttggcaagttgctcggaactgctgatcttgaagcttggcctatgctctagcatttccgacgaaggccttgtttacatcagtgcaaactgcggaaagcttgtagagctcgacctataccgctgcagcgctgtaactgatgacgggctggcagccgtagcgagcgggtgcaagaagatgaggatgctgaacctatgctactgcacccaaatcacggacggcggtctgaagcacgtaggcggtctggaagagctggcgaacctagagctgaggtgcctggtgcgcgtcacgggcgtcgggatcacgtccatcgccgtgggttgcagtagcctggtagagctggacctcaaacgctgttactccgtggatgatgccggcctgtgggctctctcaagatactcccagaaccttagacagcttactgtgtcctactgccaagtgactgggctggggctgtgccatctgctggggtcgctgaggtgcctccaggacgtgaagatggtgcacctctcctgggtctccatcgaagggttcgagatggcgctgcgggccgcgtgtgggaggctgaagaagctgaagctgctgggcgggctgaggtccgtgctctccaccgagctgctcctgacgctgcaggcctgcggctgccgcgtccgctgggtcgacaagccgctggtctacaagggatgagcatgagcatgagcttgagcgggcctctggccaatcaaggagactgagacatgcatcattgagagagcagagggaagacgacgctggtcattagcggtgtgccctgcttcctttcttgcgacagtacgtagaagagtagctgcgatgcgagtctgtctgtctgtaacagtaacacctgtccttcagtgcaattactgtctaaactttcggagtttccgcaatatgatgactgcccatcttgtaagctcatttcttgagtggatagcagacacagcacggtctattccaataaactatagatagatc

SEQ ID NO: 38552 - DNA, 2365 bp, Zea Mays
ccctcccattctctcagtctctctccatccaccacccgacccgatagtgtcctagacgccgctaccgccgccaaccaaccactcttctcctacgccgccgccgccgccgatcccgtcgcgatgagccacgacaccggcgccggcgtggagtccctctcgctggacctgctggcccacgcgctggcggccgtgcgcgacccgcgggaccgcaagtcgtgccgcctcgccagccgcgccttcgcgcgcgccgaggccgcgtcccgccgcgccgcgcgggtgctgcgccgggacgcgctgccgcgggcgctgcgcgccttcccggcgctgtcctcgctcgacctctccgcgtgcgcggggctcgacgacgcctccctcgccgccgcgctgcccgaggagccgctgcccgtccgccgggtgcgcctcgcgcgggccagcggcgtcggctggcgcggcctcgacgcgctcgtggcggcgtgcccgagcctcgaggccgtcgacctctcgcactgcgtcgccgccggcgacagggagatggccgcgctcgccgccgccgccgggctcagggacctcgtcatggacaagtgcctcggcgtcaccgacgtcgggctcgccaaggtcgccgtcggatgcccgggcctccagagcctcagcctcaagtggtgccgcgagatctccgacatcggcgtcgacctgctcgccaagaagtgcccccaactgcgcagcctcgatatctcctacctcaaggtgaccaatgaatcccttagatcactctccacccttgagaagctagaggacatagcaatggtcagctgcttgtttgtagacgatgatggcctacagatgctaagtatgtgcagctcgctgcagagtattgatgtagccaggtgccaccatgtgtcttctttgggcttagcttcactcatggatggtcaaagatctctccggaaaataaatgtcgcacacagtttgcatgagatagaggcttgtgttctgagcaagttatcaacaataggagaaaccttgactgttttaagactcgacggcctcgaaatcttcgcctcgaatctccaggcaattggttctacctgcaagaatctggtcgagattgggcttagcaaatgcaatggcgttacggatgatggtatcgtttcgctagttgctcgttgccgcgacttaaggactatcgacgtgacgtgctgccatcttcttacaaatgctgcccttgctgcaatcgccgagaactgtagaaagattgaatgccttcggcttgaatcctgccctttcgtaagcgagaagggactagagtcgatcgcaactctctgttccgaccttaaggagattgacctcaccgattgtcgtattaatgacgcagcagttggcaagttgctcggaactgctgatcttgaagcttggcctatgctctagcatttccgacgaaggccttgtttacatcagtgcaaactgcggaaagcttgtagagctcgacctataccgctgcagcgctgtaactgatgacgggctggcagccgtagcgagcgggtgcaagaagatgaggatgctgaacctatgctactgcacccaaatcacggacggcggtctgaagcacgtaggcggtctggaagagctggcgaacctagagctgaggtgcctggtgcgcgtcacgggcgtcgggatcacgtccatcgccgtgggttgcagtagcctggtagagctggacctcaaacgctgttactccgtggatgatgccggcctgtgggctctctcaagatactcccagaaccttagacagcttactgtgtcctactgccaagtgactgggctggggctgtgccatctgctggggtcgctgaggtgcctccaggacgtgaagatggtgcacctctcctgggtctccatcgaagggttcgagatggcgctgcgggccgcgtgtgggaggctgaagaagctgaagctgctgggcgggctgaggtccgtgctctccaccgagctgctcctgacgctgcaggcctgcggctgccgcgtccgctgggtcgacaagccgctggtctacaagggatgagcatgagcatgagcttgagcgggcctctggccaatcaaggagactgagacatgcatcattgagagagcagagggaagacgacgctggtcattagcggtgtgccctgcttcctttcttgcgacagtacgtagaagagtagctgcgatgcgagtctgtctgtctgtaacagtaacacctgtccttcagtgcaattactgtctaaactttcggagtttccgcaatatgatgactgcccatcttgtaagctcatttcttgagtggatagcagacacagcacggtctattccaataaactatagatagatc

SEQ ID NO: 38553 - DNA, 2367 bp, Zea Mays
ccctcccattctctcagtctctctccatccaccacccgacccgatagtgtcctagacgccgctaccgccgccaaccaaccactcttctcctacgccgccgccgccgccgatcccgtcgcgatgagccacgacaccggcgccggcgtggagtccctctcgctggacctgctggcccacgcgctggcggccgtgcgcgacccgcgggaccgcaagtcgtgccgcctcgccagccgcgccttcgcgcgcgccgaggccgcgtcccgccgcgccgcgcgggtgctgcgccgggacgcgctgccgcgggcgctgcgcgccttcccggcgctgtcctcgctcgacctctccgcgtgcgcggggctcgacgacgcctccctcgccgccgcgctgcccgaggagccgctgcccgtccgccgggtgcgcctcgcgcgggccagcggcgtcggctggcgcggcctcgacgcgctcgtggcggcgtgcccgagcctcgaggccgtcgacctctcgcactgcgtcgccgccggcgacagggagatggccgcgctcgccgccgccgccgggctcagggacctcgtcatggacaagtgcctcggcgtcaccgacgtcgggctcgccaaggtcgccgtcggatgcccgggcctccagagcctcagcctcaagtggtgccgcgagatctccgacatcggcgtcgacctgctcgccaagaagtgcccccaactgcgcagcctcgatatctcctacctcaaggtgaccaatgaatcccttagatcactctccacccttgagaagctagaggacatagcaatggtcagctgcttgtttgtagacgatgatggcctacagatgctaagtatgtgcagctcgctgcagagtattgatgtagccaggtgccaccatgtgtcttctttgggcttagcttcactcatggatggtcaaagatctctccggaaaataaatgtcgcacacagtttgcatgagatagaggcttgtgttctgagcaagttatcaacaataggagaaaccttgactgttttaagactcgacggcctcgaaatcttcgcctcgaatctccaggcaattggttctacctgcaagaatctggtcgagattgggcttagcaaatgcaatggcgttacggatgatggtatcgtttcgctagttgctcgttgccgcgacttaaggactatcgacgtgacgtgctgccatcttcttacaaatgctgcccttgctgcaatcgccgagaactgtagaaagattgaatgccttcggcttgaatcctgccctttcgtaagcgagaagggactagagtcgatcgcaactctctgttccgaccttaaggagattgacctcaccgattgtcgtattaatgacgcagctttgcagcagttggcaagttgctcggaactgctgatcttgaagcttggcctatgctctagcatttccgacgaaggccttgtttacatcagtgcaaactgcggaaagcttgtagagctcgacctataccgcgctgtaactgatgacgggctggcagccgtagcgagcgggtgcaagaagatgaggatgctgaacctatgctactgcacccaaatcacggacggcggtctgaagcacgtaggcggtctggaagagctggcgaacctagagctgaggtgcctggtgcgcgtcacgggcgtcgggatcacgtccatcgccgtgggttgcagtagcctggtagagctggacctcaaacgctgttactccgtggatgatgccggcctgtgggctctctcaagatactcccagaaccttagacagcttactgtgtcctactgccaagtgactgggctggggctgtgccatctgctggggtcgctgaggtgcctccaggacgtgaagatggtgcacctctcctgggtctccatcgaagggttcgagatggcgctgcgggccgcgtgtgggaggctgaagaagctgaagctgctgggcgggctgaggtccgtgctctccaccgagctgctcctgacgctgcaggcctgcggctgccgcgtccgctgggtcgacaagccgctggtctacaagggatgagcatgagcatgagcttgagcgggcctctggccaatcaaggagactgagacatgcatcattgagagagcagagggaagacgacgctggtcattagcggtgtgccctgcttcctttcttgcgacagtacgtagaagagtagctgcgatgcgagtctgtctgtctgtaacagtaacacctgtccttcagtgcaattactgtctaaactttcggagtttccgcaatatgatgactgcccatcttgtaagctcatttcttgagtggatagcagacacagcacggtctattccaataaactatagatagatc

SEQ ID NO: 38554 - DNA, 1493 bp, Zea Mays
gtacagagcattgtaaacgcatcccctcccctgcccctgcccctgccctgccgccgcagcttcggcttctcccgctcagctgcagcggcagcaggcggccgtctgttccgctcccctccgcctccgtttcttctcccggggtacctcagccgactcttccggaaacaaacaaaacaccctcccaccctttgcgctgcccgttgcggcctgtctgtctccccgtgacgtctcccggcggctcctggcatcggcgctctgccccgcctctcctcctgcggcggcggagagaggagggcgacggacggcatcatgaagcgcctagtagggcagggctcggtgattccagcgcctggcggcccggccgtgccggacttcgggatcttggtcagggaatgaatggcgggcgggccctgatcgccaccgctggagatcttgtggtgacggacggtggtcgtcctggcattggtgctggccgccgcgctcggcccggccacggccccggccccggcgcgcgcccagctgcggcgggaccaccaggcgccgccgggcccgcgcccgcacagcgtcaccatcaccgagttcggcgccgtcggggacggcaggacgctcaacacggtccccttccagaacgccgtcttctacgtccgctccttcgccgacaagggcggcgcgcagctgtacgtgcccaggggccgctggctcaccggcagcttcaacctcaccagccacctcaccctctacctggaggaaggcgccgtcatcgtcggcgcaaaggactcatcacaatggctgatcgttgaacctttgccatcttatggccaagggctagaccttcctggtcctagacatcaaagcttgatcagcggatacaacttaactgatgttgtcataactgggaacaatggagttattgatggccagggcttggtatggtggcagtggttgcgctcccatgagctgaaccatagccgacccaaccttctggagttcctgtattctgaagatattgtcatctcaaacttgacattcttaaattcaccagcctggagcatacacccggtgtactgcagtaatgtaaaggtccacaatgtgacgattaagacctcattggacgctccactgactgatggcatagttccagatggccagatgttctatggagattgtgagcactgcttatacccggcttcgggaaatgactaagccatgggcatggcttctccattcttctctcatgctttttggtgggttgacaaccctaatgttggcactgtactttgaaaaccccacacgtgttatgggcgctacttgaataattgcttccgctaaaattaatcactacggtgatgctacttgttatgtcacatttgggatttcgtgctgactaagttgtaataactctatttactctgatctaccttaaattctgtggaatgttgtatcacgtgatgcagtgaatgttaatttattacgatcttggttgcaaaggaaaa

SEQ ID NO: 38555 - DNA, 1607 bp, Zea Mays
gtacagagcattgtaaacgcatcccctcccctgcccctgcccctgccctgccgccgcagcttcggcttctcccgctcagctgcagcggcagcaggcggccgtctgttccgctcccctccgcctccgtttcttctcccggggtacctcagccgactcttccggaaacaaacaaaacaccctcccaccctttgcgctgcccgttgcggcctgtctgtctccccgtgacgtctcccggcggctcctggcatcggcgctctgccccgcctctcctcctgcggcggcggagagaggagggcgacggacggcatcatgaagcgcctagtagtcgtcctggcattggtgctggccgccgcgctcggcccggccacggccccggccccggcgcgcgcccagctgcggcgggaccaccaggcgccgccgggcccgcgcccgcacagcgtcaccatcaccgagttcggcgccgtcggggacggcaggacgctcaacacggtccccttccagaacgccgtcttctacgtccgctccttcgccgacaagggcggcgcgcagctgtacgtgcccaggggccgctggctcaccggcagcttcaacctcaccagccacctcaccctctacctggaggaaggcgccgtcatcgtcggcgcaaaggactcatcacaatggctgatcgttgaacctttgccatcttatggccaagggctagaccttcctggtcctagacatcaaagcttgatcagcggatacaacttaactgatgttgtcataactgggaacaatggagttattgatggccagggcttggtatggtggcagtggttgcgctcccatgagctgaaccatagccgacccaaccttctggagttcctgtattctgaagatattgtcatctcaaacttgacattcttaaattcaccagcctggagcatacacccggtgtactgcagtaatgtaaaggtccacaatgtgacgattaagacctcattggacgctccactgactgatggcatagttccagattcatgttcaaacttatgcattgaggacagcaccataagtgtcagccatgaagccatctccctgaaaagcgggtgggacaggtatggcatttccttcgggaggcctacctccgacattcgcatcagcagagtggacctgctatcatcttccggagccgctcttgcattcgggagtgagatgtctggtggtatctcagacattcatgttaaccacctccggatccacgactcctccaaagatggccagatgttctatggagattgtgagcactgcttatacccggcttcgggaaatgactaagccatgggcatggcttctccattcttctctcatgctttttggtgggttgacaaccctaatgttggcactgtactttgaaaaccccacacgtgttatgggcgctacttgaataattgcttccgctaaaattaatcactacggtgatgctacttgttatgtcacatttgggatttcgtgctgactaagttgtaataactctatttactctgatctaccttaaattctgtggaatgttgtatcacgtgatgcagtgaatgttaatttattacgatcttggttgcaaaggaaaa

SEQ ID NO: 38556 - DNA, 1395 bp, Zea Mays
ttattttgtatccgttttacataaaaaaaatagttgagttgtgacgcggcggaccgctcggatccaccccacgtacgcgcccatcgagccgctcgcaaccctaatctgaaccgccgtcattgtctccagatcgccatccgccctcatcccctcacgcccaaactaaaccctagtagatcgccgtcgtcccctcccgaatcgccatccgtgtattcctccccaccgcaagaccttcctctccctcccatctaccgatccattcctcccctccgccttccagccacaagagctccacctccacccgggctcgccgccggcggaggaccacatctgggagatgcaaagtggagcacgctgcgccactcaacatcgagatccgcttcttgggtcgacccttcgacagcgcccccctggcagacccgggcaacaacattgtgcttcgtggtgctgcagtggccgctggagacccgtcgacggggagccccccaagaccctctatcagctccaccgatgccatgagagcgcaagaaggctgaccccctatggctgcgaatagggccatggttgctgctggcactcgagcaagccgacgccgactatgaccatgtccccatgagtcaacagactggtgactacgccgctgggagcacctcgccaggaacatgcatacctccctcccgtgtctccttcaacccgccatgaatttcttggtttcactcgctggctgatcgactaacagagaaaaaattgcagcagggcagtggagttgaggctccgtgcctctgccatgcttgtatgtaggtgtagatcctatatctctgataatagcacatattgcagctttggaatgtttgccaccggagggtgtgatagatttgtgaatgtgtgggatgacattaataagaaaatactatatcaactgcggcgagctgggatggatcaagcacttgggtgagagttcttcgcgcagggctggagtgctacttccagtattgcttgcagctcgaggagttgatgagatgcaacggcggaatgccaaggaatcataaaagcatacggaggaactatgtataagctacaaaagaagcactacaaaagaagcataaaaaagaatttttatagcataagccaagtgtttctgatgattttgttttttcaaattgtattttctgttattggttcagcatgcacatatattgacatgatttatggcatggcatctgtcatctttgttatatttatgacatcattcttgattgatgtgtgcgacatgaaatgatggatctttttaacatcctgaccatcattgtgtcgctcaattatcgttattttgtatatcatttatagggttcacagatatgaaacgatagatttcttatttttgagatctgaaac

SEQ ID NO: 38557 - DNA, 2281 bp, Zea Mays
aagcatagatccctttcaaattccatcgtcaccaaaccaaaccagttttgggtgagtggtcagggaacgagcgaagtttgatgtattgagttcaaatgcgggtgactgcgaggcgcaacgtttttcatgtgacttgtagttgtctattgggttttctcgggtattatttttttcctgttcttttggcatgattttgggtgttctaaaaacctccttagcgccagctctcattctacctcttaaaaaatcggcagtgatgagcccacccacggtgtacaagcgagttgatgcaccaactaacgagttgaactgaatactcctacttgcatagtagttctcaatcacaaagccatgggcgaaaattaattaaattaacaactcggtaaaactcaaattgtcttgccactgtaaatggttcggatatgaatcgcatgatgcgtgagcccgtacgtgctgatattatatatacagagaagtaggaaggatcccaagcatccctcccgatcagatccctcgacaatggcactccaggcagcctacgagtacctgcagcaggccgtcggccatggcgcgtggtcgtccacgcagacgctgacgctgctgctcatcgccgtacccaccgtactactgctgctagcgtccctcgccaagagcacgtcgtcgtccggtaggggcaagccgccgctccctccctcgccgccgggcaccctccccatcgtggggcacctacaccacatcgggccccagacccacatctcgctccaggagctggtggccaagtacgggcacaacgggttcctgttcctccgcgccggcgccgtgcccaccctgatcgtgtcgtcgcccagcgccgccgaggccgtgatgcgcacccacgaccacatcttcgcgtcccggccgtggtccatggcctcccacatcctccgctacaacacctgcgacgtggccttctcgccgctcggcgaatactggcagcagaccaggaagctgatgaacacgcacctgctcagcaacaagaaggtctactccttccgccatggccgcgaggaagaggtgtgcctcgtcgtggacaacctccgcgaggcggccgccaagtcgccgtcgacggccgtggacatgagcgaggtgctggcggcgtacaccaacgacgtggtgagccggtcggtgctgggctcgacgcaccggaagaaaggccggaacacgctgttcagggagatgaccatgaccaacgtggacctcctggtggggttcaacctggagtactacatcccgcggtggccgctgacggacctgctcttcaggctcgtgtgctggaaggtcacgcgccacctcaagcgctgggacgccctgctggaggaggtgatccacgagcacgtggagatgaggaagctgtccggcgacaaggagaaggagtcggacgacttcatcgacatcttcctctccagatacgaggagtacggcttcaccatggataacgtcaagtccctcctcatgaacgtgttcgaggcagccatcgagacctcatatctggtgctggagtccgccatggccgagctcatgaaccacaggcgcgtcatgaagaagctgcaagcggaggtacgggcgtacggagcggagaagaagctggacatgatcagggaggacgacctgagcagcctgccgtacctaaaggcgtccatgaaggaagcgctgcggctgcacccaccggggcccctgctgctgccgcactactccaccgccgactgccagatcgacgggtaccacatccccgccaacacgcgcgtcctcgtgaacggctgggccaagtccaacagctacagcggccaggacttcaggtacctgccgttcgggtctgggcgccggatctgccccggggccaacttcgcgctcgcgaccatggagatcatgctcgccaacctcatgtaccatttcgactgggaggtccccaatgagaaggaagacggtggcgggaaggtgagcatggacgagacgttcgggctgatgcttcgcaggaacgagccgctctaccttgttcctagggccgtctagctagctagttactgtgccgccgccgcctcctatccaagaatgcatgagtcttagacgtgtggcagtaataattgcgtggggtgtagtaaaataataagcacgtttgttgagttgtaatggattcacattatgtgcattcgagacaggtccaaggaattgtatctctaaagtgaaaatttcctttttcaccacgatgaatgcatgtcatactctctcaccggtatacacagaa

SEQ ID NO: 38558 - DNA, 2068 bp, Zea Mays
ggactcttctagagcctccgcatcgcaactcacaggctcgactcttccagcctccgactccgcatccgcctccccggcggagcctctcgccaccgcacagcctagatccgcccagaggagctcaatctccccctcgaggccccaaaacgagatcctctgcattcctgcatagatgcagacggctgcttcgtttgggtatgcggcgggacggggacctcggaagcgagctacaacgacgtccccccccccccccccccccccccccccccccgcaccgatcgccgccgtggccctggctcgggtggccaccaggagatctgtcctccctccctcaaacgacgcctccatctcctcgcatttccttctccttttccccttttcaaacattcaggagccgaaggtgccagccaccctttgctcggcgcgtgtcccggcgtagctcacgacgcatcctcacctgcctgcaccgagccaaggagagtcgttggctatgcgcgttagctccgctgctgggtggtcaccatcgtccgagcacaacacagtgggtaccatcctctcactgaattacttataggaagcctcatcatgtagtttgtgcgctactagggcgagatccacctgttgtgatgatgctctatggcgcacatgtttcttttttatgggaacctcttcttagtaagtgggatggagagctttggtggagtttagcaggtggtcatctgatgattaggcgacgataaggaagtttttgatgagttgctaactgctaggtttgggagtttctctcatttcaggatgcagacagattgaggattctttgtttgtagaacgccatggatgagaggctgctcatgtttgatgtggttgatgacgtgtggacagtgctaacatgattgttcgagttggatgcacacgagagccttaggtggtttggacatgtcttcgagccaagagttgaaatcttgatgggattatgttggggcagatcttaactggaatacatatacggaacccggttggcagcagaggtagtgccccggtgcgccgcgcgcaggggcacgcgacagctacaaatattcggtggaggactggcttaggaaccttggatgcaaggtgattggaaggaaatttgttgaggtggagatggactagaccaaggctaatatcaaggggtacctgtgagggaacaggactacactggatttggctcccgtctcaagagtaaagtgtgtttcagcaacctgctagccggccaccaaaggaccaattatctatttttgttgatgttaatatattaaaatctggttatagtaaatatacataatatgctgtcatctagatcaatacacatatatgcctttgagacataaatatgtgtcatgattcaactttcatgaatagtttttctcaacgactcgcatactaatgatattagcaaattatttaaaataataaccatgatatacaacttatataaattattatgttatatttgtacattttagctaaactatttgacatctaatataattgtaagttcataagcgtagatatattttctagatatgagcttagcggtaggtaattttgcttatctattaccgtaataagcttgatgactgaggtagacatctgatttatatttaatctaactgtttctctatgtgaatggatacatatattaactcaggtagcactacaactagcaatgtatggatgaattgaaggaagtaaaagaaggcagacaatcttatagaaactctgcatattgaaaccgccatgattggcaaagaagttggatgcatctttgcattggtgtgttcttatcaccaagcagtaatgtgaagcaagttcatttgttgactaagaacggatcaacacaaattagtgaagattttgttcacaagagatgcaggatggagaggtggtagatttcaatatggctttgatactattttttccacttacaatattttgtatggaacaagaaaaaacaatgtatgtggttactattgtaattcaagaatttatttctaaataataaatatatttgtttatattttgttta

SEQ ID NO: 38559 - DNA, 1682 bp, Zea Mays
ggactcttctagagcctccgcatcgcaactcacaggctcgactcttccagcctccgactccgcatccgcctccccggcggagcctctcgccaccgcacagcctagatccgcccagaggagctcaatctccccctcgaggccccaaaacgagatcctctgcattcctgcatagatgcagacggctgcttcgtttgggtatgcggcgggacggggacctcggaagcgagctacaacgacgtccccccccccccccccccccccccccccccccgcaccgatcgccgccgtggccctggctcgggtggccaccaggagatctgtcctccctccctcaaacgacgcctccatctcctcgcatttccttctccttttccccttttcaaacattcaggagccgaaggtgccagccaccctttgctcggcgcgtgtcccggcgtagctcacgacgcatcctcacctgcctgcaccgagccaaggagagtcgttggctatgcgcgttagctccgctgctgggtggtcaccatcgtccgagcacaacacagtgggtaccatcctctcactgaattacttataggaagcctcatcatgtagtttgtgcgctactagggcgagatccacctgttgtgatgatgctctatggcgcacatgtttcttttttatgggaacctcttcttagtaagtgggatggagagctttggtggagtttagcaggtggtcatctgatgattaggcgacgataaggaagtttttgatgagttgctaactgctaggtttgggagtttctctcatttcaggatgcagacagattgaggattctttgtttgtagaacgccatggatgagaggctgctcatgtttgatgtggttgatgacgtgtggacagtgctaacatgattgttcgagttggatgcacacgagagccttaggtggtttggacatgtcttcgagccaagagttgaaatcttgatgggattatgttggggcagatcttaactggaatacatatacggaacccggttggcagcagaggtagtgccccggtgcgccgcgcgcaggggcacgcgacagctacaaatattcggtggaggactggcttaggaaccttggatgcaagtgagttttcaattctttgtaagagaattcgagttgtgttaatttttgctttgcagactccaaatgtcatggtggcagggtgattggaaggaaatttgttgaggtggagatggactagaccaaggctaatatcaaggggtacctgtgagggaacaggactacactggatttggctcccgtctcaagagtaaagtagcactacaactagcaatgtatggatgaattgaaggaagtaaaagaaggcagacaatcttatagaaactctgcatattgaaaccgccatgattggcaaagaagttggatgcatctttgcattggtgtgttcttatcaccaagcagtaatgtgaagcaagttcatttgttgactaagaacggatcaacacaaattagtgaagattttgttcacaagagatgcaggatggagaggtggtagatttcaatatggctttgatactattttttccacttacaatattttgtatggaacaagaaaaaacaatgtatgtggttactattgtaattcaagaatttatttctaaataataaatatatttgtttatattttgttta

SEQ ID NO: 38560 - DNA, 1446 bp, Zea Mays
ggactcttctagagcctccgcatcgcaactcacaggctcgactcttccagcctccgactccgcatccgcctccccggcggagcctctcgccaccgcacagcctagatccgcccagaggagctcaatctccccctcgaggccccaaaacgagatcctctgcattcctgcataggatgcagacagattgaggattctttgtttgtagaacgccatggatgagaggctgctcatgtttgatgtggttgatgacgtgtggacagtgctaacatgattgttcgagttggatgcacacgagagccttaggtggtttggacatgtcttcgagccaagagttgaaatcttgatgggattatgttggggcagatcttaactggaatacatatacggaacccggttggcagcagaggtagtgccccggtgcgccgcgcgcaggggcacgcgacagctacaaatattcggtggaggactggcttaggaaccttggatgcaaggtgattggaaggaaatttgttgaggtggagatggactagaccaaggctaatatcaaggggtacctgtgagggaacaggactacactggatttggctcccgtctcaagagtaaagtgtgtttcagcaacctgctagccggccaccaaaggaccaattatctatttttgttgatgttaatatattaaaatctggttatagtaaatatacataatatgctgtcatctagatcaatacacatatatgcctttgagacataaatatgtgtcatgattcaactttcatgaatagtttttctcaacgactcgcatactaatgatattagcaaattatttaaaataataaccatgatatacaacttatataaattattatgttatatttgtacattttagctaaactatttgacatctaatataattgtaagttcataagcgtagatatattttctagatatgagcttagcggtaggtaattttgcttatctattaccgtaataagcttgatgactgaggtagacatctgatttatatttaatctaactgtttctctatgtgaatggatacatatattaactcaggtagcactacaactagcaatgtatggatgaattgaaggaagtaaaagaaggcagacaatcttatagaaactctgcatattgaaaccgccatgattggcaaagaagttggatgcatctttgcattggtgtgttcttatcaccaagcagtaatgtgaagcaagttcatttgttgactaagaacggatcaacacaaattagtgaagattttgttcacaagagatgcaggatggagaggtggtagatttcaatatggctttgatactattttttccacttacaatattttgtatggaacaagaaaaaacaatgtatgtggttactattgtaattcaagaatttatttctaaataataaatatatttgtttatattttgttta

SEQ ID NO: 38561 - DNA, 1237 bp, Zea Mays
ggactcttctagagcctccgcatcgcaactcacaggctcgactcttccagcctccgactccgcatccgcctccccggcggagcctctcgccaccgcacagcctagatccgcccagaggagctcaatctccccctcgaggccccaaaacgagatcctctgcattcctgcatagatgcagacggctgcttcgtttgggtatgcggcgggacggggacctcggaagcgagctacaacgacgtccccccccccccccccccccccccccccccccgcaccgatcgccgccgtggccctggctcgggtggccaccaggagatctgtcctccctccctcaaacgacgcctccatctcctcgcatttccttctccttttccccttttcaaacattcaggagccgaaggtgccagccaccctttgctcggcgcgtgtcccggcgtagctcacgacgcatcctcacctgcctgcaccgagccaaggagagtcgttggctatgcgcgttagctccgctgctgggtggtcaccatcgtccgagcacaacacagatgcagacagattgaggattctttgtttgtagaacgccatggatgagaggctgctcatgtttgatgtggttgatgacgtgtggacagtgctaacatgattgttcgagttggatgcacacgagagccttaggtggtttggacatgtcttcgagccaagagttgaaatcttgatgggattatgttggggcagatcttaactggaatacatatacggaacccggttggcagcagaggtagtgccccggtgcgccgcgcgcaggggcacgcgacagctacaaatattcggtggaggactggcttaggaaccttggatgcaagtagcactacaactagcaatgtatggatgaattgaaggaagtaaaagaaggcagacaatcttatagaaactctgcatattgaaaccgccatgattggcaaagaagttggatgcatctttgcattggtgtgttcttatcaccaagcagtaatgtgaagcaagttcatttgttgactaagaacggatcaacacaaattagtgaagattttgttcacaagagatgcaggatggagaggtggtagatttcaatatggctttgatactattttttccacttacaatattttgtatggaacaagaaaaaacaatgtatgtggttactattgtaattcaagaatttatttctaaataataaatatatttgtttatattttgttta

SEQ ID NO: 38562 - DNA, 2083 bp, Zea Mays
gactcttctagagcctccgcatcgcaactcacaggctcgactcttccagcctccgactccgcatccgcctccccggcggagcctctcgccaccgcacagcctagatccgcccagaggagctcaatctccccctcgaggccccaaaacgagatcctctgcattcctgcataggcgcctcatcgttcctggcctagcacagatgcagacggctgcttcgtttgggtatgcggcgggacggggacctcggaagcgagctacaacgacgtccccccccccccccccccccccccccccccccgcaccgatcgccgccgtggccctggctcgggtggccaccaggagatctgtcctccctccctcaaacgacgcctccatctcctcgcatttccttctccttttccccttttcaaacattcaggagccgaaggtgccagccaccctttgctcggcgcgtgtcccggcgtagctcacgacgcatcctcacctgcctgcaccgagccaaggagagtcgttggctatgcgcgttagctccgctgctgggtggtcaccatcgtccgagcacaacacagtgggtaccatcctctcactgaattacttataggaagcctcatcatgtagtttgtgcgctactagggcgagatccacctgttgtgatgatgctctatggcgcacatgtttcttttttatgggaacctcttcttagtaagtgggatggagagctttggtggagtttagcaggtggtcatctgatgattaggcgacgataaggaagtttttgatgagttgctaactgctaggtttgggagtttctctcatttcaggatgcagacagattgaggattctttgtttgtagaacgccatggatgagaggctgctcatgtttgatgtggttgatgacgtgtggacagtgctaacatgattgttcgagttggatgcacacgagagccttaggtggtttggacatgtcttcgagccaagagttgaaatcttgatgggattatgttggggcagatcttaactggaatacatatacggaacccggttggcagcagaggtagtgccccggtgcgccgcgcgcaggggcacgcgacagctacaaatattcggtggaggactggcttaggaaccttggatgcaagaaatttgttgaggtggagatggactagaccaaggctaatatcaaggggtacctgtgagggaacaggactacactggatttggctcccgtctcaagagtaaagtgtgtttcagcaacctgctagccggccaccaaaggaccaattatctatttttgttgatgttaatatattaaaatctggttatagtaaatatacataatatgctgtcatctagatcaatacacatatatgcctttgagacataaatatgtgtcatgattcaactttcatgaatagtttttctcaacgactcgcatactaatgatattagcaaattatttaaaataataaccatgatatacaacttatataaattattatgttatatttgtacattttagctaaactatttgacatctaatataattgtaagttcataagcgtagatatattttctagatatgagcttagcggtaggtaattttgcttatctattaccgtaataagcttgatgactgaggtagacatctgatttatatttaatctaactgtttctctatgtgaatggatacatatattaactcaggtagcactacaactagcaatgtatggatgaattgaaggaagtaaaagaaggcagacaatcttatagaaactctgcatattgaaaccgccatgattggcaaagaagttggatgcatctttgcattggtgtgttcttatcaccaagcagtaatgtgaagcaagttcatttgttgactaagaacggatcaacacaaattagtgaagattttgttcacaagagatgcaggatggagaggtggtagatttcaatatggctttgatactattttttccacttacaatattttgtatggaacaagaaaaaacaatgtatgtggttactattgtaattcaagaatttatttctaaataataaatatatttgtttatattttgttta

SEQ ID NO: 38563 - DNA, 1628 bp, Zea Mays
ctcttctagagcctccgcatcgcaactcacaggctcgactcttccagcctccgactccgcatccgcctccccggcggagcctctcgccaccgcacagcctagatccgcccagaggagctcaatctccccctcgaggccccaaaacgagatcctctgcattcctgcataggcgcctcatcgttcctggcctagcacagatgcagacggctgcttcgtttgggtatgcggcgggacggggacctcggaagcgagctacaacgacgtccccccccccccccccccccccccccccccccgcaccgatcgccgccgtggccctggctcgggtggccaccaggagatctgtcctccctccctcaaacgacgcctccatctcctcgcatttccttctccttttccccttttcaaacattcaggagccgaaggtgccagccaccctttgctcggcgcgtgtcccggcgtagctcacgacgcatcctcacctgcctgcaccgagccaaggagagtcgttggctatgcgcgttagctccgctgctgggtggtcaccatcgtccgagcacaacacagtgggtaccatcctctcactgaattacttataggaagcctcatcatgtagtttgtgcgctactagggcgagatccacctgttgtgatgatgctctatggcgcacatgtttcttttttatgggaacctcttcttagtaagtgggatggagagctttggtggagtttagcaggtggtcatctgatgattaggcgacgataaggaagtttttgatgagttgctaactgctaggtttgggagtttctctcatttcaggatgcagacagattgaggattctttgtttgtagaacgccatggatgagaggctgctcatgtttgatgtggttgatgacgtgtggacagtgctaacatgattgttcgagttggatgcacacgagagccttaggtggtttggacatgtcttcgagccaagagttgaaatcttgatgggattatgttggggcagatcttaactggaatacatatacggaacccggttggcagcagaggtagtgccccggtgcgccgcgcgcaggggcacgcgacagctacaaatattcggtggaggactggcttaggaaccttggatgcaagtgattggaaggaaatttgttgaggtggagatggactagaccaaggctaatatcaaggggtacctgtgagggaacaggactacactggatttggctcccgtctcaagagtaaagtagcactacaactagcaatgtatggatgaattgaaggaagtaaaagaaggcagacaatcttatagaaactctgcatattgaaaccgccatgattggcaaagaagttggatgcatctttgcattggtgtgttcttatcaccaagcagtaatgtgaagcaagttcatttgttgactaagaacggatcaacacaaattagtgaagattttgttcacaagagatgcaggatggagaggtggtagatttcaatatggctttgatactattttttccacttacaatattttgtatggaacaagaaaaaacaatgtatgtggttactattgtaattcaagaatttatttctaaataataaatatatttgtttatattttgttta

SEQ ID NO: 38564 - DNA, 1839 bp, Zea Mays
ctcttctagagcctccgcatcgcaactcacaggctcgactcttccagcctccgactccgcatccgcctccccggcggagcctctcgccaccgcacagcctagatccgcccagaggagctcaatctccccctcgaggccccaaaacgagatcctctgcattcctgcataggcgcctcatcgttcctggcctagcacagatgcagacggctgcttcgtttgggtatgcggcgggacggggacctcggaagcgagctacaacgacgtccccccccccccccccccccccccccccccccgcaccgatcgccgccgtggccctggctcgggtggccaccaggagatctgtcctccctccctcaaacgacgcctccatctcctcgcatttccttctccttttccccttttcaaacattcaggagccgaaggtgccagccaccctttgctcggcgcgtgtcccggcgtagctcacgacgcatcctcacctgcctgcaccgagccaaggagagtcgttggctatgcgcgttagctccgctgctgggtggtcaccatcgtccgagcacaacacagatgcagacagattgaggattctttgtttgtagaacgccatggatgagaggctgctcatgtttgatgtggttgatgacgtgtggacagtgctaacatgattgttcgagttggatgcacacgagagccttaggtggtttggacatgtcttcgagccaagagttgaaatcttgatgggattatgttggggcagatcttaactggaatacatatacggaacccggttggcagcagaggtagtgccccggtgcgccgcgcgcaggggcacgcgacagctacaaatattcggtggaggactggcttaggaaccttggatgcaagtgattggaaggaaatttgttgaggtggagatggactagaccaaggctaatatcaaggggtacctgtgagggaacaggactacactggatttggctcccgtctcaagagtaaagtgtgtttcagcaacctgctagccggccaccaaaggaccaattatctatttttgttgatgttaatatattaaaatctggttatagtaaatatacataatatgctgtcatctagatcaatacacatatatgcctttgagacataaatatgtgtcatgattcaactttcatgaatagtttttctcaacgactcgcatactaatgatattagcaaattatttaaaataataaccatgatatacaacttatataaattattatgttatatttgtacattttagctaaactatttgacatctaatataattgtaagttcataagcgtagatatattttctagatatgagcttagcggtaggtaattttgcttatctattaccgtaataagcttgatgactgaggtagacatctgatttatatttaatctaactgtttctctatgtgaatggatacatatattaactcaggtagcactacaactagcaatgtatggatgaattgaaggaagtaaaagaaggcagacaatcttatagaaactctgcatattgaaaccgccatgattggcaaagaagttggatgcatctttgcattggtgtgttcttatcaccaagcagtaatgtgaagcaagttcatttgttgactaagaacggatcaacacaaattagtgaagattttgttcacaagagatgcaggatggagaggtggtagatttcaatatggctttgatactattttttccacttacaatattttgtatggaacaagaaaaaacaatgtatgtggttactattgtaattcaagaatttatttctaaataataaatatatttgtttatattttgttta

SEQ ID NO: 38565 - DNA, 1454 bp, Zea Mays
tctagagcctccgcatcgcaactcacaggctcgactcttccagcctccgactccgcatccgcctccccggcggagcctctcgccaccgcacagcctagatccgcccagaggagctcaatctccccctcgaggccccaaaacgagatcctctgcattcctgcataggcgcctcatcgttcctggcctagcacagatgcagacggctgcttcgtttgggtatgcggcgggacggggacctcggaagcgagctacaacgacgtccccccccccccccccccccccccccccccccgcaccgatcgccgccgtggccctggctcgggtggccaccaggagatctgtcctccctccctcaaacgacgcctccatctcctcgcatttccttctccttttccccttttcaaacattcaggagccgaaggtgccagccaccctttgctcggcgcgtgtcccggcgtagctcacgacgcatcctcacctgcctgcaccgagccaaggagagtcgttggctatgcgcgttagctccgctgctgggtggtcaccatcgtccgagcacaacacagtgggatgcagacagattgaggattctttgtttgtagaacgccatggatgagaggctgctcatgtttgatgtggttgatgacgtgtggacagtgctaacatgattgttcgagttggatgcacacgagagccttaggtggtttggacatgtcttcgagccaagagttgaaatcttgatgggattatgttggggcagatcttaactggaatacatatacggaacccggttggcagcagaggtagtgccccggtgcgccgcgcgcaggggcacgcgacagctacaaatattcggtggaggactggcttaggaaccttggatgcaagtgagttttcaattctttgtaagagaattcgagttgtgttaatttttgctttgcagactccaaatgtcatggtggcagggtgattggaaggaaatttgttgaggtggagatggactagaccaaggctaatatcaaggggtacctgtgagggaacaggactacactggatttggctcccgtctcaagagtaaagtagcactacaactagcaatgtatggatgaattgaaggaagtaaaagaaggcagacaatcttatagaaactctgcatattgaaaccgccatgattggcaaagaagttggatgcatctttgcattggtgtgttcttatcaccaagcagtaatgtgaagcaagttcatttgttgactaagaacggatcaacacaaattagtgaagattttgttcacaagagatgcaggatggagaggtggtagatttcaatatggctttgatactattttttccacttacaatattttgtatggaacaagaaaaaacaatgtatgtggttactattgtaattcaagaatttatttctaaataataaatatatttgtttatattttgttta

SEQ ID NO: 38566 - DNA, 1472 bp, Zea Mays
ctagagcctccgcatcgcaactcacaggctcgactcttccagcctccgactccgcatccgcctccccggcggagcctctcgccaccgcacagcctagatccgcccagaggagctcaatctccccctcgaggccccaaaacgagatcctctgcattcctgcataggatgcagacagattgaggattctttgtttgtagaacgccatggatgagaggctgctcatgtttgatgtggttgatgacgtgtggacagtgctaacatgattgttcgagttggatgcacacgagagccttaggtggtttggacatgtcttcgagccaagagttgaaatcttgatgggattatgttgcagaggtagtgccccggtgcgccgcgcgcaggggcacgcgacagctacaaatattcggtggaggactggcttaggaaccttggatgcaagtgagttttcaattctttgtaagagaattcgagttgtgttaatttttgctttgcagactccaaatgtcatggtggcagggtgattggaaggaaatttgttgaggtggagatggactagaccaaggctaatatcaaggggtacctgtgagggaacaggactacactggatttggctcccgtctcaagagtaaagtgtgtttcagcaacctgctagccggccaccaaaggaccaattatctatttttgttgatgttaatatattaaaatctggttatagtaaatatacataatatgctgtcatctagatcaatacacatatatgcctttgagacataaatatgtgtcatgattcaactttcatgaatagtttttctcaacgactcgcatactaatgatattagcaaattatttaaaataataaccatgatatacaacttatataaattattatgttatatttgtacattttagctaaactatttgacatctaatataattgtaagttcataagcgtagatatattttctagatatgagcttagcggtaggtaattttgcttatctattaccgtaataagcttgatgactgaggtagacatctgatttatatttaatctaactgtttctctatgtgaatggatacatatattaactcaggtagcactacaactagcaatgtatggatgaattgaaggaagtaaaagaaggcagacaatcttatagaaactctgcatattgaaaccgccatgattggcaaagaagttggatgcatctttgcattggtgtgttcttatcaccaagcagtaatgtgaagcaagttcatttgttgactaagaacggatcaacacaaattagtgaagattttgttcacaagagatgcaggatggagaggtggtagatttcaatatggctttgatactattttttccacttacaatattttgtatggaacaagaaaaaacaatgtatgtggttactattgtaattcaagaatttatttctaaataataaatatatttgtttatattttgttta

SEQ ID NO: 38567 - DNA, 2082 bp, Zea Mays
ctagagcctccgcatcgcaactcacaggctcgactcttccagcctccgactccgcatccgcctccccggcggagcctctcgccaccgcacagcctagatccgcccagaggagctcaatctccccctcgaggccccaaaacgagatcctctgcattcctgcataggcgcctcatcgttcctggcctagcacagatgcagacggctgcttcgtttgggtatgcggcgggacggggacctcggaagcgagctacaacgacgtccccccccccccccccccccccccccccccccgcaccgatcgccgccgtggccctggctcgggtggccaccaggagatctgtcctccctccctcaaacgacgcctccatctcctcgcatttccttctccttttccccttttcaaacattcaggagccgaaggtgccagccaccctttgctcggcgcgtgtcccggcgtagctcacgacgcatcctcacctgcctgcaccgagccaaggagagtcgttggctatgcgcgttagctccgctgctgggtggtcaccatcgtccgagcacaacacagtgggtaccatcctctcactgaattacttataggaagcctcatcatgtagtttgtgcgctactagggcgagatccacctgttgtgatgatgctctatggcgcacatgtttcttttttatgggaacctcttcttagtaagtgggatggagagctttggtggagtttagcaggtggtcatctgatgattaggcgacgataaggaagtttttgatgagttgctaactgctaggtttgggagtttctctcatttcaggatgcagacagattgaggattctttgtttgtagaacgccatggatgagaggctgctcatgtttgatgtggttgatgacgtgtggacagtgctaacatgattgttcgagttggatgcacacgagagccttaggtggtttggacatgtcttcgagccaagagttgaaatcttgatgggattatgttgatcttaactggaatacatatacggaacccggttggcagcagaggtagtgccccggtgcgccgcgcgcaggggcacgcgacagctacaaatattcggtggaggactggcttaggaaccttggatgcaaggtgattggaaggaaatttgttgaggtggagatggactagaccaaggctaatatcaaggggtacctgtgagggaacaggactacactggatttggctcccgtctcaagagtaaagtgtgtttcagcaacctgctagccggccaccaaaggaccaattatctatttttgttgatgttaatatattaaaatctggttatagtaaatatacataatatgctgtcatctagatcaatacacatatatgcctttgagacataaatatgtgtcatgattcaactttcatgaatagtttttctcaacgactcgcatactaatgatattagcaaattatttaaaataataaccatgatatacaacttatataaattattatgttatatttgtacattttagctaaactatttgacatctaatataattgtaagttcataagcgtagatatattttctagatatgagcttagcggtaggtaattttgcttatctattaccgtaataagcttgatgactgaggtagacatctgatttatatttaatctaactgtttctctatgtgaatggatacatatattaactcaggtagcactacaactagcaatgtatggatgaattgaaggaagtaaaagaaggcagacaatcttatagaaactctgcatattgaaaccgccatgattggcaaagaagttggatgcatctttgcattggtgtgttcttatcaccaagcagtaatgtgaagcaagttcatttgttgactaagaacggatcaacacaaattagtgaagattttgttcacaagagatgcaggatggagaggtggtagatttcaatatggctttgatactattttttccacttacaatattttgtatggaacaagaaaaaacaatgtatgtggttactattgtaattcaagaatttatttctaaataataaatatatttgtttatattttgttta

SEQ ID NO: 38568 - DNA, 1257 bp, Zea Mays
ctagagcctccgcatcgcaactcacaggctcgactcttccagcctccgactccgcatccgcctccccggcggagcctctcgccaccgcacagcctagatccgcccagaggagctcaatctccccctcgaggccccaaaacgagatcctctgcattcctgcataggcgcctcatcgttcctggcctagcacagatgcagacggctgcttcgtttgggtatgcggcgggacggggacctcggaagcgagctacaacgacgtccccccccccccccccccccccccccccccccgcaccgatcgccgccgtggccctggctcgggtggccaccaggagatctgtcctccctccctcaaacgacgcctccatctcctcgcatttccttctccttttccccttttcaaacattcaggagccgaaggtgccagccaccctttgctcggcgcgtgtcccggcgtagctcacgacgcatcctcacctgcctgcaccgagccaaggagagtcgttggctatgcgcgttagctccgctgctgggtggtcaccatcgtccgagcacaacacagatgcagacagattgaggattctttgtttgtagaacgccatggatgagaggctgctcatgtttgatgtggttgatgacgtgtggacagtgctaacatgattgttcgagttggatgcacacgagagccttaggtggtttggacatgtcttcgagccaagagttgaaatcttgatgggattatgttggggcagatcttaactggaatacatatacggaacccggttggcagcagaggtagtgccccggtgcgccgcgcgcaggggcacgcgacagctacaaatattcggtggaggactggcttaggaaccttggatgcaagtagcactacaactagcaatgtatggatgaattgaaggaagtaaaagaaggcagacaatcttatagaaactctgcatattgaaaccgccatgattggcaaagaagttggatgcatctttgcattggtgtgttcttatcaccaagcagtaatgtgaagcaagttcatttgttgactaagaacggatcaacacaaattagtgaagattttgttcacaagagatgcaggatggagaggtggtagatttcaatatggctttgatactattttttccacttacaatattttgtatggaacaagaaaaaacaatgtatgtggttactattgtaattcaagaatttatttctaaataataaatatatttgtttatattttgttta

SEQ ID NO: 38569 - DNA, 1802 bp, Zea Mays
ctagagcctccgcatcgcaactcacaggctcgactcttccagcctccgactccgcatccgcctccccggcggagcctctcgccaccgcacagcctagatccgcccagaggagctcaatctccccctcgaggccccaaaacgagatcctctgcattcctgcataggcgcctcatcgttcctggcctagcacagatgcagacggctgcttcgtttgggtatgcggcgggacggggacctcggaagcgagctacaacgacgtccccccccccccccccccccccccccccccccgcaccgatcgccgccgtggccctggctcgggtggccaccaggagatctgtcctccctccctcaaacgacgcctccatctcctcgcatttccttctccttttccccttttcaaacattcaggagccgaaggtgccagccaccctttgctcggcgcgtgtcccggcgtagctcacgacgcatcctcacctgcctgcaccgagccaaggagagtcgttggctatgcgcgttagctccgctgctgggtggtcaccatcgtccgagcacaacacaaacgccatggatgagaggctgctcatgtttgatgtggttgatgacgtgtggacagtgctaacatgattgttcgagttggatgcacacgagagccttaggtggtttggacatgtcttcgagccaagagttgaaatcttgatgggattatgttggggcagatcttaactggaatacatatacggaacccggttggcagcagaggtagtgccccggtgcgccgcgcgcaggggcacgcgacagctacaaatattcggtggaggactggcttaggaaccttggatgcaaggtgattggaaggaaatttgttgaggtggagatggactagaccaaggctaatatcaaggggtacctgtgagggaacaggactacactggatttggctcccgtctcaagagtaaagtgtgtttcagcaacctgctagccggccaccaaaggaccaattatctatttttgttgatgttaatatattaaaatctggttatagtaaatatacataatatgctgtcatctagatcaatacacatatatgcctttgagacataaatatgtgtcatgattcaactttcatgaatagtttttctcaacgactcgcatactaatgatattagcaaattatttaaaataataaccatgatatacaacttatataaattattatgttatatttgtacattttagctaaactatttgacatctaatataattgtaagttcataagcgtagatatattttctagatatgagcttagcggtaggtaattttgcttatctattaccgtaataagcttgatgactgaggtagacatctgatttatatttaatctaactgtttctctatgtgaatggatacatatattaactcaggtagcactacaactagcaatgtatggatgaattgaaggaagtaaaagaaggcagacaatcttatagaaactctgcatattgaaaccgccatgattggcaaagaagttggatgcatctttgcattggtgtgttcttatcaccaagcagtaatgtgaagcaagttcatttgttgactaagaacggatcaacacaaattagtgaagattttgttcacaagagatgcaggatggagaggtggtagatttcaatatggctttgatactattttttccacttacaatattttgtatggaacaagaaaaaacaatgtatgtggttactattgtaattcaagaatttatttctaaataataaatatatttgtttatattttgttta

SEQ ID NO: 38570 - DNA, 2086 bp, Zea Mays
tagagcctccgcatcgcaactcacaggctcgactcttccagcctccgactccgcatccgcctccccggcggagcctctcgccaccgcacagcctagatccgcccagaggagctcaatctccccctcgaggccccaaaacgagatcctctgcattcctgcataggcgcctcatcgttcctggcctagcacagatgcagacggctgcttcgtttgggtatgcggcgggacggggacctcggaagcgagctacaacgacgtccccccccccccccccccccccccccccccccgcaccgatcgccgccgtggccctggctcgggtggccaccaggagatctgtcctccctccctcaaacgacgcctccatctcctcgcatttccttctccttttccccttttcaaacattcaggagccgaaggtgccagccaccctttgctcggcgcgtgtcccggcgtagctcacgacgcatcctcacctgcctgcaccgagccaaggagagtcgttggctatgcgcgttagctccgctgctgggtggtcaccatcgtccgagcacaacacagtgggtaccatcctctcactgaattacttataggaagcctcatcatgtagtttgtgcgctactagggcgagatccacctgttgtgatgatgctctatggcgcacatgtttcttttttatgggaacctcttcttagtaagtgggatggagagctttggtggagtttagcaggtggtcatctgatgattaggcgacgataaggaagtttttgatgagttgctaactgctaggtttgggagtttctctcatttcaggatgcagacagattgaggattctttgtttgtagaacgccatggatgagaggctgctcatgtttgatgtggttgatgacgtgtggacagtgctaacatgattgttcgagttggatgcacacgagagccttaggtggtttggacatgtcttcgagccaagagttgaaatcttgatgggattatgttggggcagatcttaactggaatacatatacggaacccggttggcagcagaggtagtgccccggtgcgccgcgcgcaggggcacgcgacagctacaaatattcggtggaggactggcttaggaaccttggatgcaagtgattggaaggaaatttgttgaggtggagatggactagaccaaggctaatatcaaggggtacctgtgagggaacaggactacactggatttggctcccgtctcaagagtaaagtgtgtttcagcaacctgctagccggccaccaaaggaccaattatctatttttgttgatgttaatatattaaaatctggttatagtaaatatacataatatgctgtcatctagatcaatacacatatatgcctttgagacataaatatgtgtcatgattcaactttcatgaatagtttttctcaacgactcgcatactaatgatattagcaaattatttaaaataataaccatgatatacaacttatataaattattatgttatatttgtacattttagctaaactatttgacatctaatataattgtaagttcataagcgtagatatattttctagatatgagcttagcggtaggtaattttgcttatctattaccgtaataagcttgatgactgaggtagacatctgatttatatttaatctaactgtttctctatgtgaatggatacatatattaactcaggtagcactacaactagcaatgtatggatgaattgaaggaagtaaaagaaggcagacaatcttatagaaactctgcatattgaaaccgccatgattggcaaagaagttggatgcatctttgcattggtgtgttcttatcaccaagcagtaatgtgaagcaagttcatttgttgactaagaacggatcaacacaaattagtgaagattttgttcacaagagatgcaggatggagaggtggtagatttcaatatggctttgatactattttttccacttacaatattttgtatggaacaagaaaaaacaatgtatgtggttactattgtaattcaagaatttatttctaaataataaatatatttgtttatattttgttta

SEQ ID NO: 38571 - DNA, 741 bp, Zea Mays
caactcacaggctcgactcttccagcctccgactccgcatccgcctccccggcggagcctctcgccaccgcacagcctagatccgcccagaggagctcaatctccccctcgaggccccaaaacgagatcctctgcattcctgcataggcgcctcatcgttcctggcctagcacagatgcagacggctgcttcgtttgggtatgcggcgggacggggacctcggaagcgagctacaacgacgtccccccccccccccccccccccccccccccccgcaccgatcgccgccgtggccctggctcgggtggccaccaggagatctgtcctccctccctcaaacgacgcctccatctcctcgcatttccttctccttttccccttttcaaacattcaggagccgaaggtgccagccaccctttgctcggcgcgtgtcccggcgtagctcacgacgcatcctcacctgcctgcaccgagccaaggagagtcgttggctatgcgcgttagctccgctgctgggtggtcaccatcgtccgagcacaacacagatgcagacagattgaggattctttgtttgtagaacgccatggatgagaggctgctcatgtttgatgtggttgatgacgtgtggacagtgctaacatgattgttcgagttggatgcacacgagagccttaggtggtttggacatgtcttcgagccaagagttgaaatcttgatgggattatgttgaaagacttgcgc

SEQ ID NO: 38572 - DNA, 1822 bp, Zea Mays
caactcacaggctcgactcttccagcctccgactccgcatccgcctccccggcggagcctctcgccaccgcacagcctagatccgcccagaggagctcaatctccccctcgaggccccaaaacgagatcctctgcattcctgcataggcgcctcatcgttcctggcctagcacagatgcagacggctgcttcgtttgggtatgcggcgggacggggacctcggaagcgagctacaacgacgtccccccccccccccccccccccccccccccccgcaccgatcgccgccgtggccctggctcgggtggccaccaggagatctgtcctccctccctcaaacgacgcctccatctcctcgcatttccttctccttttccccttttcaaacattcaggagccgaaggtgccagccaccctttgctcggcgcgtgtcccggcgtagctcacgacgcatcctcacctgcctgcaccgagccaaggagagtcgttggctatgcgcgttagctccgctgctgggtggtcaccatcgtccgagcacaacacagtgggatgcagacagattgaggattctttgtttgtagaacgccatggatgagaggctgctcatgtttgatgtggttgatgacgtgtggacagtgctaacatgattgttcgagttggatgcacacgagagccttaggtggtttggacatgtcttcgagccaagagttgaaatcttgatgggattatgttggggcagatcttaactggaatacatatacggaacccggttggcagcagaggtagtgccccggtgcgccgcgcgcaggggcacgcgacagctacaaatattcggtggaggactggcttaggaaccttggatgcaaggtgattggaaggaaatttgttgaggtggagatggactagaccaaggctaatatcaaggggtacctgtgagggaacaggactacactggatttggctcccgtctcaagagtaaagtgtgtttcagcaacctgctagccggccaccaaaggaccaattatctatttttgttgatgttaatatattaaaatctggttatagtaaatatacataatatgctgtcatctagatcaatacacatatatgcctttgagacataaatatgtgtcatgattcaactttcatgaatagtttttctcaacgactcgcatactaatgatattagcaaattatttaaaataataaccatgatatacaacttatataaattattatgttatatttgtacattttagctaaactatttgacatctaatataattgtaagttcataagcgtagatatattttctagatatgagcttagcggtaggtaattttgcttatctattaccgtaataagcttgatgactgaggtagacatctgatttatatttaatctaactgtttctctatgtgaatggatacatatattaactcaggtagcactacaactagcaatgtatggatgaattgaaggaagtaaaagaaggcagacaatcttatagaaactctgcatattgaaaccgccatgattggcaaagaagttggatgcatctttgcattggtgtgttcttatcaccaagcagtaatgtgaagcaagttcatttgttgactaagaacggatcaacacaaattagtgaagattttgttcacaagagatgcaggatggagaggtggtagatttcaatatggctttgatactattttttccacttacaatattttgtatggaacaagaaaaaacaatgtatgtggttactattgtaattcaagaatttatttctaaataataaatatatttgtttatattttgttta

SEQ ID NO: 38573 - DNA, 1952 bp, Zea Mays
caactcacaggctcgactcttccagcctccgactccgcatccgcctccccggcggagcctctcgccaccgcacagcctagatccgcccagaggagctcaatctccccctcgaggccccaaaacgagatcctctgcattcctgcataggcgcctcatcgttcctggcctagcacagatgcagacggctgcttcgtttgggtatgcggcgggacggggacctcggaagcgagctacaacgacgtccccccccccccccccccccccccccccccccgcaccgatcgccgccgtggccctggctcgggtggccaccaggagatctgtcctccctccctcaaacgacgcctccatctcctcgcatttccttctccttttccccttttcaaacattcaggagccgaaggtgccagccaccctttgctcggcgcgtgtcccggcgtagctcacgacgcatcctcacctgcctgcaccgagccaaggagagtcgttggctatgcgcgttagctccgctgctgggtggtcaccatcgtccgagcacaacacagtgggtaccatcctctcactgaattacttataggaagcctcatcatgtagtttgtgcgctactagggcgagatccacctgttgtgatgatgctctatggcgcacatgtttcttttttatgggaacctcttcttagatgcagacagattgaggattctttgtttgtagaacgccatggatgagaggctgctcatgtttgatgtggttgatgacgtgtggacagtgctaacatgattgttcgagttggatgcacacgagagccttaggtggtttggacatgtcttcgagccaagagttgaaatcttgatgggattatgttggggcagatcttaactggaatacatatacggaacccggttggcagcagaggtagtgccccggtgcgccgcgcgcaggggcacgcgacagctacaaatattcggtggaggactggcttaggaaccttggatgcaaggtgattggaaggaaatttgttgaggtggagatggactagaccaaggctaatatcaaggggtacctgtgagggaacaggactacactggatttggctcccgtctcaagagtaaagtgtgtttcagcaacctgctagccggccaccaaaggaccaattatctatttttgttgatgttaatatattaaaatctggttatagtaaatatacataatatgctgtcatctagatcaatacacatatatgcctttgagacataaatatgtgtcatgattcaactttcatgaatagtttttctcaacgactcgcatactaatgatattagcaaattatttaaaataataaccatgatatacaacttatataaattattatgttatatttgtacattttagctaaactatttgacatctaatataattgtaagttcataagcgtagatatattttctagatatgagcttagcggtaggtaattttgcttatctattaccgtaataagcttgatgactgaggtagacatctgatttatatttaatctaactgtttctctatgtgaatggatacatatattaactcaggtagcactacaactagcaatgtatggatgaattgaaggaagtaaaagaaggcagacaatcttatagaaactctgcatattgaaaccgccatgattggcaaagaagttggatgcatctttgcattggtgtgttcttatcaccaagcagtaatgtgaagcaagttcatttgttgactaagaacggatcaacacaaattagtgaagattttgttcacaagagatgcaggatggagaggtggtagatttcaatatggctttgatactattttttccacttacaatattttgtatggaacaagaaaaaacaatgtatgtggttactattgtaattcaagaatttatttctaaataataaatatatttgtttatattttgttta

SEQ ID NO: 38574 - DNA, 1894 bp, Zea Mays
caactcacaggctcgactcttccagcctccgactccgcatccgcctccccggcggagcctctcgccaccgcacagcctagatccgcccagaggagctcaatctccccctcgaggccccaaaacgagatcctctgcattcctgcataggcgcctcatcgttcctggcctagcacagatgcagacggctgcttcgtttgggtatgcggcgggacggggacctcggaagcgagctacaacgacgtccccccccccccccccccccccccccccccccgcaccgatcgccgccgtggccctggctcgggtggccaccaggagatctgtcctccctccctcaaacgacgcctccatctcctcgcatttccttctccttttccccttttcaaacattcaggagccgaaggtgccagccaccctttgctcggcgcgtgtcccggcgtagctcacgacgcatcctcacctgcctgcaccgagccaaggagagtcgttggctatgcgcgttagctccgctgctgggtggtcaccatcgtccgagcacaacacagtgggatgcagacagattgaggattctttgtttgtagaacgccatggatgagaggctgctcatgtttgatgtggttgatgacgtgtggacagtgctaacatgattgttcgagttggatgcacacgagagccttaggtggtttggacatgtcttcgagccaagagttgaaatcttgatgggattatgttgatcttaactggaatacatatacggaacccggttggcagcagaggtagtgccccggtgcgccgcgcgcaggggcacgcgacagctacaaatattcggtggaggactggcttaggaaccttggatgcaagtgagttttcaattctttgtaagagaattcgagttgtgttaatttttgctttgcagactccaaatgtcatggtggcagggtgattggaaggaaatttgttgaggtggagatggactagaccaaggctaatatcaaggggtacctgtgagggaacaggactacactggatttggctcccgtctcaagagtaaagtgtgtttcagcaacctgctagccggccaccaaaggaccaattatctatttttgttgatgttaatatattaaaatctggttatagtaaatatacataatatgctgtcatctagatcaatacacatatatgcctttgagacataaatatgtgtcatgattcaactttcatgaatagtttttctcaacgactcgcatactaatgatattagcaaattatttaaaataataaccatgatatacaacttatataaattattatgttatatttgtacattttagctaaactatttgacatctaatataattgtaagttcataagcgtagatatattttctagatatgagcttagcggtaggtaattttgcttatctattaccgtaataagcttgatgactgaggtagacatctgatttatatttaatctaactgtttctctatgtgaatggatacatatattaactcaggtagcactacaactagcaatgtatggatgaattgaaggaagtaaaagaaggcagacaatcttatagaaactctgcatattgaaaccgccatgattggcaaagaagttggatgcatctttgcattggtgtgttcttatcaccaagcagtaatgtgaagcaagttcatttgttgactaagaacggatcaacacaaattagtgaagattttgttcacaagagatgcaggatggagaggtggtagatttcaatatggctttgatactattttttccacttacaatattttgtatggaacaagaaaaaacaatgtatgtggttactattgtaattcaagaatttatttctaaataataaatatatttgtttatattttgttta

SEQ ID NO: 38575 - DNA, 1808 bp, Zea Mays
caactcacaggctcgactcttccagcctccgactccgcatccgcctccccggcggagcctctcgccaccgcacagcctagatccgcccagaggagctcaatctccccctcgaggccccaaaacgagatcctctgcattcctgcataggcgcctcatcgttcctggcctagcacagatgcagacggctgcttcgtttgggtatgcggcgggacggggacctcggaagcgagctacaacgacgtccccccccccccccccccccccccccccccccgcaccgatcgccgccgtggccctggctcgggtggccaccaggagatctgtcctccctccctcaaacgacgcctccatctcctcgcatttccttctccttttccccttttcaaacattcaggagccgaaggtgccagccaccctttgctcggcgcgtgtcccggcgtagctcacgacgcatcctcacctgcctgcaccgagccaaggagagtcgttggctatgcgcgttagctccgctgctgggtggtcaccatcgtccgagcacaacacatgctaacatgattgttcgagttggatgcacacgagagccttaggtggtttggacatgtcttcgagccaagagttgaaatcttgatgggattatgttggggcagatcttaactggaatacatatacggaacccggttggcagcagaggtagtgccccggtgcgccgcgcgcaggggcacgcgacagctacaaatattcggtggaggactggcttaggaaccttggatgcaagtgagttttcaattctttgtaagagaattcgagttgtgttaatttttgctttgcagactccaaatgtcatggtggcagggtgattggaaggaaatttgttgaggtggagatggactagaccaaggctaatatcaaggggtacctgtgagggaacaggactacactggatttggctcccgtctcaagagtaaagtgtgtttcagcaacctgctagccggccaccaaaggaccaattatctatttttgttgatgttaatatattaaaatctggttatagtaaatatacataatatgctgtcatctagatcaatacacatatatgcctttgagacataaatatgtgtcatgattcaactttcatgaatagtttttctcaacgactcgcatactaatgatattagcaaattatttaaaataataaccatgatatacaacttatataaattattatgttatatttgtacattttagctaaactatttgacatctaatataattgtaagttcataagcgtagatatattttctagatatgagcttagcggtaggtaattttgcttatctattaccgtaataagcttgatgactgaggtagacatctgatttatatttaatctaactgtttctctatgtgaatggatacatatattaactcaggtagcactacaactagcaatgtatggatgaattgaaggaagtaaaagaaggcagacaatcttatagaaactctgcatattgaaaccgccatgattggcaaagaagttggatgcatctttgcattggtgtgttcttatcaccaagcagtaatgtgaagcaagttcatttgttgactaagaacggatcaacacaaattagtgaagattttgttcacaagagatgcaggatggagaggtggtagatttcaatatggctttgatactattttttccacttacaatattttgtatggaacaagaaaaaacaatgtatgtggttactattgtaattcaagaatttatttctaaataataaatatatttgtttatattttgttta

SEQ ID NO: 38576 - DNA, 1466 bp, Zea Mays
caactcacaggctcgactcttccagcctccgactccgcatccgcctccccggcggagcctctcgccaccgcacagcctagatccgcccagaggagctcaatctccccctcgaggccccaaaacgagatcctctgcattcctgcatagaacgccatggatgagaggctgctcatgtttgatgtggttgatgacgtgtggacagtgctaacatgattgttcgagttggatgcacacgagagccttaggtggtttggacatgtcttcgagccaagagttgaaatcttgatgggattatgttggggcagatcttaactggaatacatatacggaacccggttggcagcagaggtagtgccccggtgcgccgcgcgcaggggcacgcgacagctacaaatattcggtggaggactggcttaggaaccttggatgcaagtgagttttcaattctttgtaagagaattcgagttgtgttaatttttgctttgcagactccaaatgtcatggtggcagggtgattggaaggaaatttgttgaggtggagatggactagaccaaggctaatatcaaggggtacctgtgagggaacaggactacactggatttggctcccgtctcaagagtaaagtgtgtttcagcaacctgctagccggccaccaaaggaccaattatctatttttgttgatgttaatatattaaaatctggttatagtaaatatacataatatgctgtcatctagatcaatacacatatatgcctttgagacataaatatgtgtcatgattcaactttcatgaatagtttttctcaacgactcgcatactaatgatattagcaaattatttaaaataataaccatgatatacaacttatataaattattatgttatatttgtacattttagctaaactatttgacatctaatataattgtaagttcataagcgtagatatattttctagatatgagcttagcggtaggtaattttgcttatctattaccgtaataagcttgatgactgaggtagacatctgatttatatttaatctaactgtttctctatgtgaatggatacatatattaactcaggtagcactacaactagcaatgtatggatgaattgaaggaagtaaaagaaggcagacaatcttatagaaactctgcatattgaaaccgccatgattggcaaagaagttggatgcatctttgcattggtgtgttcttatcaccaagcagtaatgtgaagcaagttcatttgttgactaagaacggatcaacacaaattagtgaagattttgttcacaagagatgcaggatggagaggtggtagatttcaatatggctttgatactattttttccacttacaatattttgtatggaacaagaaaaaacaatgtatgtggttactattgtaattcaagaatttatttctaaataataaatatatttgtttatattttgttta

SEQ ID NO: 38577 - DNA, 1344 bp, Zea Mays
caactcacaggctcgactcttccagcctccgactccgcatccgcctccccggcggagcctctcgccaccgcacagcctagatccgcccagaggagctcaatctccccctcgaggccccaaaacgagatcctctgcattcctgcataggcgcctcatcgttcctggcctagcacagatgcagacggctgcttcgtttgggtatgcggcgggacggggacctcggaagcgagctacaacgacgtccccccccccccccccccccccccccccccccgcaccgatcgccgccgtggccctggctcgggtggccaccaggagatctgtcctccctccctcaaacgacgcctccatctcctcgcatttccttctccttttccccttttcaaacattcaggagccgaaggtgccagccaccctttgctcggcgcgtgtcccggcgtagctcacgacgcatcctcacctgcctgcaccgagccaaggagagtcgttggctatgcgcgttagctccgctgctgggtggtcaccatcgtccgagcacaacacatgctaacatgattgttcgagttggatgcacacgagagccttaggtggtttggacatgtcttcgagccaagagttgaaatcttgatgggattatgttggggcagatcttaactggaatacatatacggaacccggttggcagcagaggtagtgccccggtgcgccgcgcgcaggggcacgcgacagctacaaatattcggtggaggactggcttaggaaccttggatgcaagtgagttttcaattctttgtaagagaattcgagttgtgttaatttttgctttgcagactccaaatgtcatggtggcagggtgattggaaggaaatttgttgaggtggagatggactagaccaaggctaatatcaaggggtacctgtgagggaacaggactacactggatttggctcccgtctcaagagtaaagtagcactacaactagcaatgtatggatgaattgaaggaagtaaaagaaggcagacaatcttatagaaactctgcatattgaaaccgccatgattggcaaagaagttggatgcatctttgcattggtgtgttcttatcaccaagcagtaatgtgaagcaagttcatttgttgactaagaacggatcaacacaaattagtgaagattttgttcacaagagatgcaggatggagaggtggtagatttcaatatggctttgatactattttttccacttacaatattttgtatggaacaagaaaaaacaatgtatgtggttactattgtaattcaagaatttatttctaaataataaatatatttgtttatattttgttta

SEQ ID NO: 38578 - DNA, 1421 bp, Zea Mays
gagatccttatcttcctggttggcctcatcttcaagctgccattctcagccgatctctatcctctaccactctctctccctcagctcgcggagctctctcctcctagcgagcgcgtctgcgccctgctcggcctccagctctggcgcccggccgagtttctccccgagctccctgccatggccgccgtgccctctgttcctccagctccagcgtcgcggcccttcccccagctcccttgtctccatggccgctcgtcctagctgcgaccccgtcgtggagctctgcacgccgagcttctccctggtctcccatggcgcccagctcagatctcgccctgttcctcagcgcgcagctccctgacgcgttttcctccctatgccgcacgctctgctcgcccggggtcagaattcgtcgactgctctctgttcctcgcttcggtggctgcactcatctccatccatggatgtcgccatctctgcgccctgctccatgcttgctgctcgccgattttccctgcgcgaccagccggagctcgttccatgggcgcggcttccagctcgccggcgttcggaccgcgctcctccctccagctcgtcgagcttctccctgcatccatggccactgcgcgcgccctctgctccatcgcggtggttttctcctgccggtgcccagcccagccaagcccctccacgcggccgtcgatcagcctccctgctcctcccatcgtggacatcaccgaccatggacatctgattccccgatgcgctccacatgttcactgttttgttccacccgtggacaatggcactcgccactctagacatcgatattatgttcgtcgtcgcgtcgtcaccgtcaacctgctcggatccatgcctcgccatcgactctgacgtcgcgacgttcctgtgccgtgttggttgtgcgccaaccgctcaacaagatgtgttgttggcctcctcgccgagcactgtattgccatggcgcggatgcccgcattcgccccatcttcgcgtcttctggatgtcagcacaacccctccgcgtcgtcgggctcatcggcacgctgcttgtttatatttcacgcgtccgcgacgtcgtcacatgtctcctcgccagcagtgaacgcccaggagagaaaatcccataaggtgcgataattaatcacgtgatgcggaagacgaccccaagttgacccaggataatgcagagattggacatctccgcaagacgacgtcgtcagtcgaatcaacctgaagatggttaaatcaagcaagtgctcgaccgagggataatcgtcaagtggacatcgcctaacaacactaacctagtgttatccaggcaagccccggtgcatgcaacccctttccttgtgttttaaatactttttgcacacttaagtctagtgaaatgtgcattag

SEQ ID NO: 38579 - DNA, 1430 bp, Zea Mays
gagatccttatcttcctggttggcctcatcttcaagctgccattctcagccgatctctatcctctaccactctctctccctcagctcgcggagctctctcctcctagcgagcgcgtctgcgccctgctcggcctccagctctggcgcccggccgagtttctccccgagctccctgccatggccgccgtgccctctgttcctccagctccagcgtcgcggcccttcccccagctcccttgtctccatggccgctcgtcctagctgcgaccccgtcgtggagctctgcacgccgagcttctccctggtctcccatggcgcccagctcagatctcgccctgttcctcagcgcgcagctccctgacgcgttttcctccctatgccgcacgctctgctcgcccggggtcagaattcgtcgactgctctctgttcctcgcttcggtggctgcactcatctccatccatggatgtcgccatctctgcgccctgctccatgcttgctgctcgccgattttccctgcgcgaccagccggagctcgttccatgggcgcggcttccagctcgccggcgttcggaccgcgctcctccctccagctcgtcgagcttctccctgcatccatggccactgcgcgcgccctctgctccatcgcggtggttttctcctgccggtgcccagcccagccaagcccctccacgcggccgtcgatcagcctccctgctcctcccatcgtggacatcaccgaccatggacatctgattccccgatgcgctccacatgttcactgttttgttccacccgtggacaatggcactcgccactctagacatcgatattatgttcgtcgtcgcgtcgtcaccgtcaacctgctcggatccatgcctcgccatcgactctgacgtcgcgacgttcctgtgccgtgttggttgtgcgccaaccgctcaacaagatgtgttgttggcctcctcgccgagcactgtattgccatggcgcggatgcccgcattcgccccatcttcgcgtcttctggatgtcagcacaacccctccgcgtcgtcgggctcatcggcacgctgcttgtttatatttcacgcgtccgcgacgtcgtcacatgtctcctcgccagcagtgaacgcccaggagagaaaatcccataaggtttgtatggtgcgataattaatcacgtgatgcggaagacgaccccaagttgacccaggataatgcagagattggacatctccgcaagacgacgtcgtcagtcgaatcaacctgaagatggttaaatcaagcaagtgctcgaccgagggataatcgtcaagtggacatcgcctaacaacactaacctagtgttatccaggcaagccccggtgcatgcaacccctttccttgtgttttaaatactttttgcacacttaagtctagtgaaatgtgcattag

SEQ ID NO: 38580 - DNA, 2208 bp, Zea Mays
gagatccttatcttcctggttggcctcatcttcaagctgccattctcagccgatctctatcctctaccactctctctccctcagctcgcggagctctctcctcctagcgagcgcgtctgcgccctgctcggcctccagctctggcgcccggccgagtttctccccgagctccctgccatggccgccgtgccctctgttcctccagctccagcgtcgcggcccttcccccagctcccttgtctccatggccgctcgtcctagctgcgaccccgtcgtggagctctgcacgccgagcttctccctggtctcccatggcgcccagctcagatctcgccctgttcctcagcgcgcagctccctgacgcgttttcctccctatgccgcacgctctgctcgcccggggtcagaattcgtcgactgctctctgttcctcgcttcggtggctgcactcatctccatccatggatgtcgccatctctgcgccctgctccatgcttgctgctcgccgattttccctgcgcgaccagccggagctcgttccatgggcgcggcttccagctcgccggcgttcggaccgcgctcctccctccagctcgtcgagcttctccctgcatccatggccactgcgcgcgccctctgctccatcgcggtggttttctcctgccggtgcccagcccagccaagcccctccacgcggccgtcgatcagcctccctgctcctcccatcgtggacatcaccgaccatggacatctgattccccgatgcgctccacatgttcactgttttgttccacccgtggacaatggcactcgccactctagacatcgatattatgttcgtcgtcgcgtcgtcaccgtcaacctgctcggatccatgcctcgccatcgactctgacgtcgcgacgttcctgtgccgtgttggttgtgcgccaaccgctcaacaagatgtgttgttggcctcctcgccgagcactgtattgccatggcgcggatgcccgcattcgccccatcttcgcgtcttctggatgtcagcacaacccctccgcgtcgtcgggctcatcggcacgctgcttgtttatatttcacgcgtccgcgacgtcgtcacatgtctcctcgccagcagtgaacgcccaggagagaaaatcccataaggtttgtatggtaagggcaacccctatgctacgaagcctgtctagtgttcgacgatgcatgaactagtgaacgtcttggttcttgcaaaaatctaagttcaacttagtctggtgagctaattcattgttctagctatttagtttaaattaatggattgaatatacatagcagtcacgctggtccttatagtttagcaagagagatgcgtggtggtttagtcgcatcgtatcgaattgacagttcgtagaatatgtgaataatgctccggtgggggtatatgttcaaaataggtaaaaaggttctatgtgggtgaaaagtggtggtattaaatgttgcaaaatgtttctttcatttagtgatggggtggagttaatattatgaagagtgctatggttctatttaggttatgtctaattatgttaatacatgtgtacactaggtgttgtcgaggttgcaaaggaaaattaattgtgcttctgtgttgaagtcaataatttgctttaggagtcttataataggaagcctaagttcattaatctttgggtgtattctttagctaagaaaaatatagtctttatacataattgtagttcttgttaaagttaacttcagttaagctagagtaacttgatttattgtgtttagttgtttagctgcatctagtgtgtgactatgagtgatgtattgtgcttcgccattaagtaattaattatctattatgtagcattatttagattggtaatatttctgtctatatgcattcatatgcataatgcatttcattcaggtgcgataattaatcacgtgatgcggaagacgaccccaagttgacccaggataatgcagagattggacatctccgcaagacgacgtcgtcagtcgaatcaacctgaagatggttaaatcaagcaagtgctcgaccgagggataatcgtcaagtggacatcgcctaacaacactaacctagtgttatccaggcaagccccggtgcatgcaacccctttccttgtgttttaaatactttttgcacacttaagtctagtgaaatgtgcattag

SEQ ID NO: 38581 - DNA, 7000 bp, Zea Mays
caagtagcaagtattgggatctaaccactagagttcattaccatttgtgatataaaaagaataaatattgtaaatattatattatacaaagtatagatattgtaaatatatgtatactaataatttagaaataaaaaataatcatgtcacactaagtcggctctgtgggctaagaaggcggccctagcaccgcccagttctcagatcgaaacgacacaggtccactttgaatcttggcgggctagtttatgccactattaaattggtcgtgcctcggaccggcccgccagacacgactcgtttcgtcatctatagtccagtacatccatcctcatagtttctgatctcgtgagcctggaaaaaaagcaagagaaaaaactttatcacgtctcacccccacaccatatacctcgccacacgtctctgcctctctcctcaccatatcgtcgtccgtcgtctcaagggcaaaatcgtaggtgtaccatgaggtgtagcccactccgtgtgatccaaaccgtggagcacgcatttagatccgcgtgaggcgaactactgcatcctgccgcacgcgatagggatcaagacaataattcagaaaatccttgtcggctaggtaccgaagggaataagtatgtcaccgaagggaattaataattctcgtcagtattaggctaattctttccgatacatggctaatgaggagtggtattagtgattaattaattcccgtcaaccaccaaagagaattaattaatactcgtcggtcatgtgtagtcgacatttaacactagactgcgcaaactcctgtcggtcccgcccttggatgacctggattataagtacgtagatattgcttgtggccaacggcaattaagacattatccccgtcggcttagatagctgacgggaattaccccacgatcaataactctcgttggctatggtcaagccgacgggagttatcctatgttgttgcaaaccagtagcctattttactaatttctcatctaaccacacaaacaacaagcttatattgtatatcaattcccatacatcacaaacaccattcacaattcacatacatcacatcatcaaatacttcacattacaaattcttcaaacaaacacatagaagcacatattcatttcaaatcacaacaacgagacaagttaaatattttgttcaccaaagcacataaaatttagtttaacacacaccattcatcatccataaccaaagacaaaccacaagtccaaatataaaaaaatagcatacaatggtttagggacaaccacttggatggttcgagctttggtcactgccaccaccaggaggagggtacacaaagagggactcaacaaaagtcgatccagctggttcagttacactcccacccattcctagtgtagcctatgtaagaatgcaaatatcaacaagttaagtatacaaatgtatcaaatcataagaatatttcgagagttacaaaacgtatctggtcttcagttgcaggtatatatgtgggggtgatgattgttgcatccccgatccctatttaatcgacatttgattaagtttagatacaattcatgtgttgctataataactagatgaaattatacattagacaatgttataatagaatttgctaaagattaccatattttaccaatttctcatacaattcacacaaacaacaagaatataatgtatatccatccacatgcatcacaaacaccattcacaactcacttacatcacatcatcaaatacttcacattacaaattcctcaaacaaacacatagaaacacatattcattttgtcggtgttttggaccaggggtcctcaaccaactagtgaaacgatattgcgtgccctagacccagatggtgatttgagttgacacaagcgatttatcctggtttggactacgagaggccatacttccagcagaggtgggatgatgcttatattactcacacaaaagtgctcgtggtaggggttacaagcatagcgggagaggggtggatcctaagtcccagctggtgattgaggcaagtcccaataccaggtaggggagaagaatgatcaagtgttcgcctgccttgtgtctccctgttccttgtggagccgtgaactatcctatttataagctcggggagagttgccttgtagatgggagccaactacatgctgtgaaggggtgtcttcataacctatagacaatatggccttgtactttgccgttgacttgggcttgcttgttttctgctgagagcagaggccgaggctgagggcttggtcacgtacccgagccccctggcgtgggatttcccataccgtagtggttgacatagtgcctgtcatgggaaaaagcttcttatgggatgcgtcagctctactatttctgatgatgttgggaagtcctctgccataggtatcgagggaagaactgagctcgggcaaggcggaggtccgtctgaggttgcgaccgagtcttgtcttgagatttgatgacgtgtgccacactcgatggagtggccttccacgggattcacaggggacaggtagccgaggctgggttcgagcgaggcggagcctacgcccaaggtcgagttctgtattgggcgaggcgaaacttgcgcccgaggtcttggtccgcatcatgtcatattacgcgtcccatcaagggttatcaagcggcatgcacatgcgtaatgatgttggtgaatctttgataagaccgcggtcctgttgaacgattcgcctgtagcccaacgtgaggtaggtgtccgcattgaatgcggttgtctcccaacggccctcgggaaagttttgtctttatcgcctaaggcgggcacggacaaggtggacatggctgccctaggatgagggagcctcagccgggacgaagattctcccgagcttacatctcgcccgagacaggcctcgggcgaggcggagttttgggaagacccctgaggggaacctcaggggagacagagttttggttccttattctaggaggacataccttgatagagtccttaggattttaggtgcgttttaggggcctaatctgggtacccctaattatcgtacccgacagtagcccccgagccttccaaagaagtgtttcgacacttgtttagaggttcttctgttctttgtgcgagtacactatcttttcctaaggagtggaagattttttacttatgggtgcacgcgagcgcacctgtcggttgtagcccccgaggccctgaaggagtagttgactccttcagggtctttgtttttacctctataggcatggtggactctgtttgtcacctgccacagcctaggcgcgaagggagcccccgagcattctatgtcattttgtaggagtttccaacaaatttgccacatcatgggttgcaagggtagtcccaagcctttgcgtgggtctagaggacgatcggtgggcgccttgacttttttggttatacgcctctttgtcgcctctccggaaagaggaagagggggacgacgcgatgctgctctcggtgggcaacgagcatgacgtctccagtgagctgctaacgggtaacccgagcgaaggcccgatctccgtttgataggagtcgactagtggtccagagacgtgccccaaaagtacctgtgggtgattcgcctggtcccgatcccatttgatggggtccaagggctcgattgcctccccccgatgggataccatcacgaatctctctcaagggtctcggatatgtcttagggtatctcgggatcatagcctgagcctttgatgtttacgaacatacccatagtcatccctgactatgttctggggcgattgtgatatccttccgaggggcgaaccttcgaaccactgatcaataacgggcctagagcccatgtgttctagggcaatctcccgagccttaccgggggcttgaccttctaacccctaagcagtaggtgaggtctctcctcttctttctcgaggaaggaagcccgaggtggagacaccctcttctgctacctgcaaagtggaaaaggaggcacatgagagagtgggagaggggtgcatcttttgatgcgttatgtgaagcggtgctagctggctgacgtcaggaagagtgggtatttaatgcaacgggaagcttcggcccgtaggccgatcgttgcggcacgcgtgcacgtggatttcgaagcgacctagcccattcctggtttggactcaggatggctcagcccacgcctcggtgattctgctcgcccctataaattcacccgagaggggctcttcggttctttacttccctctcttgctttcctaccctagcctccttctgccttagccgcaaaaaactcatgcgctcttctcccatcttcttcgttagctacgatggctaagaagttgagcgttctccctccttgcgacccatggctcatttcctcagttaccgacgaggatctagaggcgttggtggatgtcgggctacttcgcccccgctcccatggcctgcagcccaagtggaatgcgccgggcgacatcgctttccacgagcgggggttctgggtgccagcgagtcgcttcatgtgggcgctcctacactactacggggtggagctccacaaattcaaccctagctccacctcttccacacagaggcgttctccctctcctccaacgtgaagaaggtgcgccacatggctcgggctggtggctgcatgctcctgccgcgctcagatcgagcgtaactgtacatccctgccatcctcacctcatcaaacaaggggtggcagagttgatggttctacctccccaacgacgatgggcggctgccggcatatacgcagcgtgttgtctttgcgatggcagaacactggcggtggggctcccctcgagagcttcaggcccagctgaacccgctgttggacgccttgcgtaggctccaggagcgtggtcttactatggccggggtcgtcatcgctttctactggaggagggtattgccgctgaccgagtgtcggcttcgtctggatgagatgacgtcggatgcctctgtcgaaagctctcggatggcctcggccaccctctccaccaatgaactcctccggtgggtgaaaggggcggtggggaggactacaccactcccgtcctgatgtgccccgaccaaagctacgtgtccctaggattgcgggactatcgaaccgcctgaccccggttctggaggacgcgactggtagggcggtgcgttgcttggctatcgaggagaagaagaaagatgcagacaagaagtgggcccataaaaagatgctagcccacgacacattggagaagtgccgcatggcacaggcaagggaggggatgctacgggaggcctctcccagcatagagtatgatgatgacgatgatgacaatgagggcatggaggtccgactgggcttcagcctcgaggctgaactttggtctgcgttagcctcggcaggcccattcattggcgcagacgtacccacgcaggggctgacagcgtccctatccgaggcgcggacgtcagccaagtcggaccccatcctcatagccatagatgaggcatgggccatggaggagagaccgctaccctgcctcaggtgcctgccatggggatcgtggaggaaaaagtcatcgtaccgctccaagtgcccaccacggggcaaaggggcccaaggagccggaagccgagggtggacgtggatgtcgtacctcggtccgggcactaagcgccgagcccacaagccgaccttaaccgctaccaatgcggtgaagcgcaacattaggacgtcgaccagggccacatcccgctcccacgtgtggctcgacgctgccaaggaaaggaggccatccaacagggtgccgaagcgacccggattgtcctcagtgggtaggccgggtaggatgctactgtcgcagaggcggccatggcccctccggcgccactggtcgaggccatcctagtgatctctaccgaggaggcggcgggggtggcagacgcaacgtcgaccatggcatcgcccaccgtctcggacctcctacgcggcatccccgacaccccagatgccacccggagccccgaggcggctaacttcgagggggcccagtccctcgaggcgacctggggaatcagtcgaggagcatatcatcccacccccatcatcggggtgggtggtgaccttgttcgcgctggactatacctctcgacgtgggaagggccgaccctgacatagatggcactgagggcaacccctacttggtcctcgatgacgcaaaggagaagtagatgtggtcagaattccgaacaatagatcgggggcttatgcgaagtccgcgaccaagtcgattttcattcatcgtgagcgcgacgtctgggccgtgttgcaacaccatcaggccatgttgtgtcgttcaaacgaacaactggctttgaagagtgtcgaggcgatggacctattgtcactatgcgcggaattaaaggacgaggtcgtggccacatgcgggagggtggtgccactacaagaggaggtgcgactgctgaatgagagagtggcgctgctggatcaggaggcgatgaagtcgctgagggagagggtggtcccgctggaggaggaggtgcgacgactgaaggaaagtcttctagcggtggccggtgaacgagatgagtctcggcgccaagccatcgatgcctttctccgtgctgactcccttgcgagggatctggagaccgagcgatctgcccaaagcctaagggcctagatggaagaaggatttggacatctccatccagacctctaagacgctctcccaggccgtggaccaaataatggccgagctgaaggagttgtccgaccttggtgccgtggatgtcccctcaggtgagtgctcgcagagccatacgcaagccctgagtggctacgtgcagagtgaactctgcgaggaaatccacctcagggtgaagcgggc

SEQ ID NO: 38582 - DNA, 585 bp, Zea Mays
atcttgcatatatagtcgaccgcaactcattctacacaattacgtacgtcccagttgcgaaatacgtttgcatcgcatcgcgtcgaataatattacaaattacagtagctccggcacctactacagttacattacatcactgaatgaatctacagcagatctatcgctcaaaaactctacacgcctgcaccctaccctacgcattctgaggctttcttggtgctgcgggtgacctcccttccatcgtctgcaggcgctgcttcagatgaaagacttcaacctggcagagcccaaggcatgaacaaaaaaaagaaagaaagaaagtctagcatgataaggtcttacctgaagctggaatgcccgtgcgcgttctcctgcaagaactccgcgagtcgagtgcagttcctgatcacagacgaaaaaccgaaagccaatcagtacggcaaccaaccgtcacagagagagagagagagagagagagagagagagagagagcagcggcggcggcggaggagaacggggcatggctaagagagtaactctcttgccttctgggtctcgtccatgacggccttcaggaacgcc

SEQ ID NO: 38583 - DNA, 340 bp, Zea Mays
gttccacctcgggcgcagaccgccagctgaaacagtgctcgttttgcagcaccactagtacttcaaccttcaaaaaacacaaagtaacgtcagtttctcatgtactgaaactgatcatagaaatgttcctggtgtttctattgcaaaaaaatatgtggaaggcagaataactaatcctgaaataatgtcaccaaatgagctttccatttctcaatgagattcagttccttcaccttgtcggatggttcctttttgttccctccaaaagcaacaagcacgatcttgtccctgtagtacaatggaaccatgctgaaaccctgcaaaaagttttgggttcaat

SEQ ID NO: 38584 - DNA, 1234 bp, Zea Mays
ccggccggacgatggcagcagcagagcgcgaccgcgagcgatggatcctgcccggcgcgacggcgctggtcaccggcgggagcaaggggatcgggcacgcgatcgtggaggagctggcggcgctgggcgcgcgcgtgcacacgtgctcccgcaacgccgcggagctggaggagtgccgccggaggtgggcagagaagggcggcggcctgctgcagcaggtgaccgtctccgtctgcgacgtcgccgtgcgcgccgacagggaggcgctcatggccaccgtcagggatgtcttcggcggcaagctggacatcctcgtgaataacgcggcgcaggtggtcttcaagccggcggtggagtgcaccggggaggagtacacgcggatcatggcgaccaacctggagtcctgcttccacctcagccagctcgcgcacccgctgctccgcgacgcctccctcgccggcggcgggagcgtcgtgcacatctcctccaccgcgggcctcctcggctttcgaggggcggtgctttacagcactgcgaaaggaggagtgaaccagctcacgaggagcctggctgctgagtgggcctgtgacaagattcgtgtcaactcggtcgcgccaggaatcgtcatgactgacatggttaagaaccaagctcggaggccgtcgagcaagaaacttcacggattccgctgcggcgggccggcgagccggcagaggtggcgtccgtggtgtcgtttctgtgcatgccggcggccgcctacgtcaccggccaagtcatctacgttgacggtggccgaaccataagagcttgacgatgaccagcatcatcatcatctacgtctacgtggaatctaacaaacgcactccatccacaaacctagctacagtggcccgggatttcacatatatgtagccacacacatgcatgacacatgtgtgtgtgataaataaaagaattctttatgcgtgcatatcaccaacgacaaaagtaaataacaagcaggaaagaaaaaataaataaaaccatggagaaatcttgtttcatgcgcacaggcttgggccggggcaaaaaacccgtaacccgaagccgaaatacttgaacctgaacccgaaatacccaaaatccgaattttgttcgggaatttcgggtagcaacttgcaaaaccccgaatttatttcgggtaattcgggtatcacaatcgggtatccgaactacccgaattacccaaactttc

SEQ ID NO: 38585 - DNA, 3111 bp, Zea Mays
ccaagcaccgctcaccggttctcacgccgtaggtaggtaggggtcgatcccaactccttccttcccctttgctgctgctttaattccttgcgcgaagatccctcttcttcttcttcgtttacagccgttctttgctctaacctctggactttagccgctcccacacggcctccatctttcggcatcgagagatccaataacatcaggaccaagaaagtaaaaagacgcaatcattaggaactactttctctccgtttctttttaattgtcgctggatagttcaattttgcactatccagcgacaaataaaacgaaacgctacttatctgcattgcgcagattctctgctagctaggctgttggctcgctccttcaattctcctctcctctccttccgcactccaccccctcctccgtagtagtagcagcatagcatctggtggtgtggtggtcaaggttcaagaacaaattcagctggaggccggcggagattattttattcattcccctccgagaggctgcatcgaaaaggggagatcaaggatccccggaggcttgtagccgcaacaaccacaagggaggcggagggcgagaggcttcttctctgaccagcgaccggctcgccgtccagagaagaagaagaagaagaggaggaggaggaggaagaagaagaagaagcgctcttgggctccgtcgtcgcatgaagaaggaaaccatggaggggcatgtgccattgccattgccattgctcccggacggagaaactgcggtgggctacagcaaggacgacgcctcctcgcctctgcaagaggagatttcgagcctgcggtcaaggcagcggcgtgttgacaggagacggcgggaggcgctcgacaggctcgttgaactgaaaggaagcgttagggtcttctgccgggtccggccgctggctcacacgaacagcttgcatgcccagtcatcacctgttaccgtcgagcaggagaggatcacggtcaagcagccgggatcaagagggagttcggcgctgatagggttttcggccaggagtccacgcaagaggatgtgttcgaagaagtgaaaccgatcctcaggtctgcactcgacggccacaacgtctgcatcctcgcgtacggccagaccgggacggggaagacctacacaatggaaggaaccggcggtaataagctcggcgtcgtgcctcgggctatccaggagctgttctctcgcgcttcggaggacggctcatgcgcctactctttctccatgagcatgcttgaggtctacctggggagtctcagggacttgctggcagcaccgaggcagcctctcttcaggcgaacagagtgcaaagcagcggcgtggtaaataagacttagtagtagcctcagcatactggcaacgaaaggtggcgccgtggaagtggaggggctgacggacgtctcgacgccggacctcaagaacgccagccagtggtaccgcagagggcggcgagcccggtcgacggcctggacgaacgtcaacgacgcctccagccggtcgcactgcctgacgaggatcaccataaggagaaggatgaggcatggaggaggaggaggagtcagcaagctctggctcgtcgacctcggcggcagcgagcggctgctcaagaccggcgcgtccgggctcaccatggacgagggcaaggccatcaacctctccctgtcggcgctcggagacgtcattgctgcgctcaggaggaagaggccccatgttccttataggtaacaggtgatccttcttcagtgtgtcatgccgtgttgggttttctaaactatcggtttcaaaaactacggcatttttcaaatttcaatcatactggagtttgctcgtcagtagtgttttcagttcatatatatttgtatcttctttttttcccctttaaccatgtgcagaaacagcaagcttacccagattctcagcgactcgctcggcgatggttcgaaagttgtaatggtggtgcacgtcagcctatccgaggacgacgtcggcgagacggtctgctcgctgaacctggcgaaacgagccagatcgatcgagccgaacagagaaatcccacaggatctgaaaacgctgaagcagaagagggtcgcagagctggacagggagatccgcgccgccgaggaagagctgaagcgtctcgacgagcagataaggagagcggaggagaaggagatctcactcgaggaggaggaggaggaggaggaggagaagaagctcttcgcctcgtcggtctgccaggctctcagcgacgacgagaaggggtcgccgaggagcactctggtggtggtggggcacaccgatgccgcggagagcccgcgcgcgacgacggagaaggcgaagggcaggaggccgccgccggctcgtggccatggtggctcagcagctccccacttcatgtcctccacggtgtgcagccggcagagacggtgcgcgggaggctaccattctgtcggtaacggtaagccgaggctgacggcggtgtcggtgaacaggtacccgccgccggctgctgagctgagtgggagccagaacgcggcggccagggctagcaggtcggcgtcagtggcactctcgtccggtgtgcacaagttgaggtgcttgcgtgtcaacaagtccgatcaggtcaacgtaataagcaacagcagcgtcgactcgaccgctgcgtcggcaccgccgccgcggcggagggaaagctgcttcggctccaggccggttctacaaagagcggcagcgcccctgcatctgcacaggaggaggatgtctagcctgacatgaacaccgattgcacagttatgatttttcttaacttaattgtttttattagtggtgaaagggttctgaaagatgtttgtgtatgtatggttgttagcttcgtagttcttgactgctgtaactattggttggaggccccttgggcttttgttttttttttgggtttggcttggaaggggcaaaatgatgcgaggaataattgttgatacatggaataatggaatttacctgtggttctggttgcgatggattttgaatggaatttgcgaggtagcaaaacaatctaacaagttacgtagg

SEQ ID NO: 38586 - DNA, 3000 bp, Zea Mays
ccaagcaccgctcaccggttctcacgccgtaggtaggtaggggtcgatcccaactccttccttcccctttgctgctgctttaattccttgcgcgaagatccctcttcttcttcttcgtttacagccgttctttgctctaacctctggactttagccgctcccacacggcctccatctttcggcatcgagagatccaataacatcaggaccaagaaagtaaaaagacgcaatcattaggaactactttctctccgtttctttttaattgtcgctggatagttcaattttgcactatccagcgacaaataaaacgaaacgctacttatctgcattgcgcagattctctgctagctaggctgttggctcgctccttcaattctcctctcctctccttccgcactccaccccctcctccgtagtagtagcagcatagcatctggtggtgtggtggtcaaggttcaagaacaaattcagctggaggccggcggagattattttattcattcccctccgagaggctgcatcgaaaaggggagatcaaggatccccggaggcttgtagccgcaacaaccacaagggaggcggagggcgagaggcttcttctctgaccagcgaccggctcgccgtccagagaagaagaagaagaagaggaggaggaggaggaagaagaagaagaagcgctcttgggctccgtcgtcgcatgaagaaggaaaccatggaggggcatgtgccattgccattgccattgctcccggacggagaaactgcggtgggctacagcaaggacgacgcctcctcgcctctgcaaggttggaactgtttgaaagaccaggtcaggagatttcgagcctgcggtcaaggcagcggcgtgttgacaggagacggcgggaggcgctcgacaggctcgttgaactgaaaggaagcgttagggtcttctgccgggtccggccgctggctcacacgaacagcttgcatgcccagtcatcacctgttaccgtcgagcaggagaggatcacggtcaagcagccgggatcaagagggagttcggcgctgatagggttttcggccaggagtccacgcaaggaaggaaccggcggtaataagctcggcgtcgtgcctcgggctatccaggagctgttctctcgcgcttcggaggacggctcatgcgcctactctttctccatgagcatgcttgaggtctacctggggagtctcagggacttgctggcagcaccgaggcagcctctcttcaggcgaacagagtgcaaagcagcggcgtgtagtagtagcctcagcatactggcaacgaaaggtggcgccgtggaagtggaggggctgacggacgtctcgacgccggacctcaagaacgccagccagtggtaccgcagagggcggcgagcccggtcgacggcctggacgaacgtcaacgacgcctccagccggtcgcactgcctgacgaggatcaccataaggagaaggatgaggcatggaggaggaggaggagtcagcaagctctggctcgtcgacctcggcggcagcgagcggctgctcaagaccggcgcgtccgggctcaccatggacgagggcaaggccatcaacctctccctgtcggcgctcggagacgtcattgctgcgctcaggaggaagaggccccatgttccttataggtaacaggtgatccttcttcagtgtgtcatgccgtgttgggttttctaaactatcggtttcaaaaactacggcatttttcaaatttcaatcatactggagtttgctcgtcagtagtgttttcagttcatatatatttgtatcttctttttttcccctttaaccatgtgcagaaacagcaagcttacccagattctcagcgactcgctcggcgatggttcgaaagttgtaatggtggtgcacgtcagcctatccgaggacgacgtcggcgagacggtctgctcgctgaacctggcgaaacgagccagatcgatcgagccgaacagagaaatcccacagcagaagagggtcgcagagctggacagggagatccgcgccgccgaggaagagctgaagcgtctcgacgagcagataaggagagcggaggagaaggagatctcactcgaggaggaggaggaggaggaggaggagaagaagctcttcgcctcgtcggtctgccaggctctcagcgacgacgagaaggggtcgccgaggagcactctggtggtggtggggcacaccgatgccgcggagagcccgcgcgcgacgacggagaaggcgaagggcaggaggccgccgccggctcgtggccatggtggctcagcagctccccacttcatgtcctccacggtgtgcagccggcagagacggtgcgcgggaggctaccattctgtcggtaacggtaagccgaggctgacggcggtgtcggtgaacaggtacccgccgccggctgctgagctgagtgggagccagaacgcggcggccagggctagcaggtcggcgtcagtggcactctcgtccggtgtgcacaagttgaggtgcttgcgtgtcaacaagtccgatcaggtcaacgtaataagcaacagcagcgtcgactcgaccgctgcgtcggcaccgccgccgcggcggagggaaagctgcttcggctccaggccggttctacaaagagcggcagcgcccctgcatctgcacaggaggaggatgtctagcctgacatgaacaccgattgcacagttatgatttttcttaacttaattgtttttattagtggtgaaagggttctgaaagatgtttgtgtatgtatggttgttagcttcgtagttcttgactgctgtaactattggttggaggccccttgggcttttgttttttttttgggtttggcttggaaggggcaaaatgatgcgaggaataattgttgatacatggaataatggaatttacctgtggttctggttgcgatggattttgaatggaatttgcgaggtagcaaaacaatctaacaagttacgtagg

SEQ ID NO: 38587 - DNA, 2907 bp, Zea Mays
ccaagcaccgctcaccggttctcacgccgtaggtaggtaggggtcgatcccaactccttccttcccctttgctgctgctttaattccttgcgcgaagatccctcttcttcttcttcgtttacagccgttctttgctctaacctctggactttagccgctcccacacggcctccatctttcggcatcgagagatccaataacatcaggaccaagaaagtaaaaagacgcaatcattaggaactactttctctccgtttctttttaattgtcgctggatagttcaattttgcactatccagcgacaaataaaacgaaacgctacttatctgcattgcgcagattctctgctagctaggctgttggctcgctccttcaattctcctctcctctccttccgcactccaccccctcctccgtagtagtagcagcatagcatctggtggtgtggtggtcaaggttcaagaacaaattcagctggaggccggcggagattattttattcattcccctccgagaggctgcatcgaaaaggggagatcaaggatccccggaggcttgtagccgcaacaaccacaagggaggcggagggcgagaggcttcttctctgaccagcgaccggctcgccgtccagagaagaagaagaagaagaggaggaggaggaggaagaagaagaagaagcgctcttgggctccgtcgtcgcatgaagaaggaaaccatggaggggcatgtgccattgccattgccattgctcccggacggagaaactgcggtgggctacagcaaggacgacgcctcctcgcctctgcaagaggagatttcgagcctgcggtcaaggcagcggcgtgttgacaggagacggcgggaggcgctcgacaggctcgttgaactgaaaggaagcgttagggtcttctgccgggtccggccgctggctcacacgaacagcttgcatgcccagtcatcacctgttaccgtcgagcaggagaggatcacggtcaagcagccgggatcaagagggagttcggcgctgatagggttttcggccaggagtccacgcaagaggatgtgttcgaagaagtgaaaccgatcctcaggtctgcactcgacggccacaacgtctgcatcctcgcgtacggccagaccgggacggggaagacctacacaatggaaggaaccggcggtaataagctcggcgtcgtgcctcgggctatccaggagctgttctctcgcgcttcggaggacggctcatgcgcctactctttctccatgagcatgcttgaggtctacctggggagtctcagggacttgctggcagcaccgaggcagcctctcttcaggcgaacagagtgcaaagcagcggcgtgtagtagtagcctcagcatactggcaacgaaaggtggcgccgtggaagtggaggggctgacggacgtctcgacgccggacctcaagaacgccagccagtggtaccgcagagggcggcgagcccggtcgacggcctggacgaacgtcaacgacgcctccagccggtcgcactgcctgacgaggatcaccataaggagaaggatgaggcatggaggaggaggaggagtcagcaagctctggctcgtcgacctcggcggcagcgagcggctgctcaagaccggcgcgtccgggctcaccatggacgagggcaaggccatcaacctctccctgtcggcgctcggagacgtcattgctgcgctcaggaggaagaggccccatgttccttatagaaacagcaagcttacccagattctcagcgactcgctcggcgatggttcgaaagttgtaatggtggtgcacgtcagcctatccgaggacgacgtcggcgagacggtctgctcgctgaacctggcgaaacgagccagatcgatcgagccgaacagagaaatcccacagaagagggtcgcagagctggacagggagatccgcgccgccgaggaagagctgaagcgtctcgacgagcagataaggagagcggaggagaaggagatctcactcgaggaggaggaggaggaggaggaggagaagaagctcttcgcctcgtcggtctgccaggctctcagcgacgacgagaaggggtcgccgaggagcactctggtggtggtggggcacaccgatgccgcggagagcccgcgcgcgacgacggagaaggcgaagggcaggaggccgccgccggctcgtggccatggtggctcagcagctccccacttcatgtcctccacggtgtgcagccggcagagacggtgcgcgggaggctaccattctgtcggtaacggtaagccgaggctgacggcggtgtcggtgaacaggtacccgccgccggctgctgagctgagtgggagccagaacgcggcggccagggctagcaggtcggcgtcagtggcactctcgtccggtgtgcacaagttgaggtgcttgcgtgtcaacaagtccgatcaggtcaacgtaataagcaacagcagcgtcgactcgaccgctgcgtcggcaccgccgccgcggcggagggaaagctgcttcggctccaggccggttctacaaagagcggcagcgcccctgcatctgcacaggaggaggatgtctagcctgacatgaacaccgattgcacagttatgatttttcttaacttaattgtttttattagtggtgaaagggttctgaaagatgtttgtgtatgtatggttgttagcttcgtagttcttgactgctgtaactattggttggaggccccttgggcttttgttttttttttgggtttggcttggaaggggcaaaatgatgcgaggaataattgttgatacatggaataatggaatttacctgtggttctggttgcgatggattttgaatggaatttgcgaggtagcaaaacaatctaacaagttacgtagg

SEQ ID NO: 38588 - DNA, 2974 bp, Zea Mays
ccaagcaccgctcaccggttctcacgccgtaggtaggtaggggtcgatcccaactccttccttcccctttgctgctgctttaattccttgcgcgaagatccctcttcttcttcttcgtttacagccgttctttgctctaacctctggactttagccgctcccacacggcctccatctttcggcatcgagagatccaataacatcaggaccaagaaagtaaaaagacgcaatcattaggaactactttctctccgtttctttttaattgtcgctggatagttcaattttgcactatccagcgacaaataaaacgaaacgctacttatctgcattgcgcagattctctgctagctaggctgttggctcgctccttcaattctcctctcctctccttccgcactccaccccctcctccgtagtagtagcagcatagcatctggtggtgtggtggtcaaggttcaagaacaaattcagctggaggccggcggagattattttattcattcccctccgagaggctgcatcgaaaaggggagatcaaggatccccggaggcttgtagccgcaacaaccacaagggaggcggagggcgagaggcttcttctctgaccagcgaccggctcgccgtccagagaagaagaagaagaagaggaggaggaggaggaagaagaagaagaagcgctcttgggctccgtcgtcgcatgaagaaggaaaccatggaggggcatgtgccattgccattgccattgctcccggacggagaaactgcggtgggctacagcaaggacgacgcctcctcgcctctgcaagaggagatttcgagcctgcggtcaaggcagcggcgtgttgacaggagacggcgggaggcgctcgacaggctcgttgaactgaaaggaagcgttagggtcttctgccgggtccggccgctggctcacacgaacagcttgcatgcccagtcatcacctgttaccgtcgagcaggagaggatcacggtcaagcagccgggatcaagagggagttcggcgctgatagggttttcggccaggagtccacgcaaggaaggaaccggcggtaataagctcggcgtcgtgcctcgggctatccaggagctgttctctcgcgcttcggaggacggctcatgcgcctactctttctccatgagcatgcttgaggtctacctggggagtctcagggacttgctggcagcaccgaggcagcctctcttcaggcgaacagagtgcaaagcagcggcgtgtagtagtagcctcagcatactggcaacgaaaggtggcgccgtggaagtggaggggctgacggacgtctcgacgccggacctcaagaacgccagccagtggtaccgcagagggcggcgagcccggtcgacggcctggacgaacgtcaacgacgcctccagccggtcgcactgcctgacgaggatcaccataaggagaaggatgaggcatggaggaggaggaggagtcagcaagctctggctcgtcgacctcggcggcagcgagcggctgctcaagaccggcgcgtccgggctcaccatggacgagggcaaggccatcaacctctccctgtcggcgctcggagacgtcattgctgcgctcaggaggaagaggccccatgttccttataggtaacaggtgatccttcttcagtgtgtcatgccgtgttgggttttctaaactatcggtttcaaaaactacggcatttttcaaatttcaatcatactggagtttgctcgtcagtagtgttttcagttcatatatatttgtatcttctttttttcccctttaaccatgtgcagaaacagcaagcttacccagattctcagcgactcgctcggcgatggttcgaaagttgtaatggtggtgcacgtcagcctatccgaggacgacgtcggcgagacggtctgctcgctgaacctggcgaaacgagccagatcgatcgagccgaacagagaaatcccacagcagaagagggtcgcagagctggacagggagatccgcgccgccgaggaagagctgaagcgtctcgacgagcagataaggagagcggaggagaaggagatctcactcgaggaggaggaggaggaggaggaggagaagaagctcttcgcctcgtcggtctgccaggctctcagcgacgacgagaaggggtcgccgaggagcactctggtggtggtggggcacaccgatgccgcggagagcccgcgcgcgacgacggagaaggcgaagggcaggaggccgccgccggctcgtggccatggtggctcagcagctccccacttcatgtcctccacggtgtgcagccggcagagacggtgcgcgggaggctaccattctgtcggtaacggtaagccgaggctgacggcggtgtcggtgaacaggtacccgccgccggctgctgagctgagtgggagccagaacgcggcggccagggctagcaggtcggcgtcagtggcactctcgtccggtgtgcacaagttgaggtgcttgcgtgtcaacaagtccgatcaggtcaacgtaataagcaacagcagcgtcgactcgaccgctgcgtcggcaccgccgccgcggcggagggaaagctgcttcggctccaggccggttctacaaagagcggcagcgcccctgcatctgcacaggaggaggatgtctagcctgacatgaacaccgattgcacagttatgatttttcttaacttaattgtttttattagtggtgaaagggttctgaaagatgtttgtgtatgtatggttgttagcttcgtagttcttgactgctgtaactattggttggaggccccttgggcttttgttttttttttgggtttggcttggaaggggcaaaatgatgcgaggaataattgttgatacatggaataatggaatttacctgtggttctggttgcgatggattttgaatggaatttgcgaggtagcaaaacaatctaacaagttacgtagg

SEQ ID NO: 38589 - DNA, 2924 bp, Zea Mays
ccaagcaccgctcaccggttctcacgccgtaggtaggtaggggtcgatcccaactccttccttcccctttgctgctgctttaattccttgcgcgaagatccctcttcttcttcttcgtttacagccgttctttgctctaacctctggactttagccgctcccacacggcctccatctttcggcatcgagagatccaataacatcaggaccaagaaagtaaaaagacgcaatcattaggaactactttctctccgtttctttttaattgtcgctggatagttcaattttgcactatccagcgacaaataaaacgaaacgctacttatctgcattgcgcagattctctgctagctaggctgttggctcgctccttcaattctcctctcctctccttccgcactccaccccctcctccgtagtagtagcagcatagcatctggtggtgtggtggtcaaggttcaagaacaaattcagctggaggccggcggagattattttattcattcccctccgagaggctgcatcgaaaaggggagatcaaggatccccggaggcttgtagccgcaacaaccacaagggaggcggagggcgagaggcttcttctctgaccagcgaccggctcgccgtccagagaagaagaagaagaagaggaggaggaggaggaagaagaagaagaagcgctcttgggctccgtcgtcgcatgaagaaggaaaccatggaggggcatgtgccattgccattgccattgctcccggacggagaaactgcggtgggctacagcaaggacgacgcctcctcgcctctgcaagaggagatttcgagcctgcggtcaaggcagcggcgtgttgacaggagacggcgggaggcgctcgacaggctcgttgaactgaaaggaagcgttagggtcttctgccgggtccggccgctggctcacacgaacagcttgcatgcccagtcatcacctgttaccgtcgagcaggagaggatcacggtcaagcagccgggatcaagagggagttcggcgctgatagggttttcggccaggagtccacgcaagaggaaccggcggtaataagctcggcgtcgtgcctcgggctatccaggagctgttctctcgcgcttcggaggacggctcatgcgcctactctttctccatgagcatgcttgaggtctacctggggagtctcagggacttgctggcagcaccgaggcagcctctcttcaggcgaacagagtgcaaagcagcggcgtgtagtagtagcctcagcatactggcaacgaaaggtggcgccgtggaagtggaggggctgacggacgtctcgacgccggacctcaagaacgccagccagtggtaccgcagagggcggcgagcccggtcgacggcctggacgaacgtcaacgacgcctccagccggtcgcactgcctgacgaggatcaccataaggagaaggatgaggcatggaggaggaggaggagtcagcaagctctggctcgtcgacctcggcggcagcgagcggctgctcaagaccggcgcgtccgggctcaccatggacgagggcaaggccatcaacctctccctgtcggcgctcggagacgtcattgctgcgctcaggaggaagaggccccatgttccttataggtaacaggtgatccttcttcagtgtgtcatgccgtgttgggttttctaaactatcggtttcaaaaactacggcatttttcaaatttcaatcatactggagtttgctcgtcagtagtgttttcagttcatatatatttgtatcttctttttttcccctttaaccatgtgcagaaacagcaagcttacccagattctcagcgactcgctcggcgatggttcgaaagttgtaatggtggtgcacgtcagcctatccgaggacgacgtcggcgagacggtctgctcgctgaacctggcgaaacgagccagatcgatcgagccgaacagagaaatcccacaggatctgaaaacgctgaagcagaagagggtcgcagagctggacagggagatccgcgccgccgaggaagagctgaagcgtctcgacgagcagataaggagagcggaggagaaggagatctcactcgaggaggaggaggaggaggaggaggagaagaagctcttcgcctcgtcggtctgccaggctctcagcgacgacgagaaggggtcgccgaggagcactctggtggtggtggggcacaccgatgccgcggagagcccgcgcgcgacgacggagaaggcgaagggcaggaggccgccgccggctcgtggccatggtggctcagcagctccccacttcatgtcctccacggtgtgcagccggcagagacggtacccgccgccggctgctgagctgagtgggagccagaacgcggcggccagggctagcaggtcggcgtcagtggcactctcgtccggtgtgcacaagttgaggtgcttgcgtgtcaacaagtccgatcaggtcaacgtaataagcaacagcagcgtcgactcgaccgctgcgtcggcaccgccgccgcggcggagggaaagctgcttcggctccaggccggttctacaaagagcggcagcgcccctgcatctgcacaggaggaggatgtctagcctgacatgaacaccgattgcacagttatgatttttcttaacttaattgtttttattagtggtgaaagggttctgaaagatgtttgtgtatgtatggttgttagcttcgtagttcttgactgctgtaactattggttggaggccccttgggcttttgttttttttttgggtttggcttggaaggggcaaaatgatgcgaggaataattgttgatacatggaataatggaatttacctgtggttctggttgcgatggattttgaatggaatttgcgaggtagcaaaacaatctaacaagttacgtagg

SEQ ID NO: 38590 - DNA, 2821 bp, Zea Mays
ccaagcaccgctcaccggttctcacgccgtaggtaggtaggggtcgatcccaactccttccttcccctttgctgctgctttaattccttgcgcgaagatccctcttcttcttcttcgtttacagccgttctttgctctaacctctggactttagccgctcccacacggcctccatctttcggcatcgagagatccaataacatcaggaccaagaaagtaaaaagacgcaatcattaggaactactttctctccgtttctttttaattgtcgctggatagttcaattttgcactatccagcgacaaataaaacgaaacgctacttatctgcattgcgcagattctctgctagctaggctgttggctcgctccttcaattctcctctcctctccttccgcactccaccccctcctccgtagtagtagcagcatagcatctggtggtgtggtggtcaaggttcaagaacaaattcagctggaggccggcggagattattttattcattcccctccgagaggctgcatcgaaaaggggagatcaaggatccccggaggcttgtagccgcaacaaccacaagggaggcggagggcgagaggcttcttctctgaccagcgaccggctcgccgtccagagaagaagaagaagaagaggaggaggaggaggaagaagaagaagaagcgctcttgggctccgtcgtcgcatgaagaaggaaaccatggaggggcatgtgccattgccattgccattgctcccggacggagaaactgcggtgggctacagcaaggacgacgcctcctcgcctctgcaagaggagatttcgagcctgcggtcaaggcagcggcgtgttgacaggagacggcgggaggcgctcgacaggctcgttgaactgaaaggaagcgttagggtcttctgccgggtccggccgctggctcacacgaacagcttgcatgcccagtcatcacctgttaccgtcgagcaggagaggatcacggtcaagcagccgggatcaagagggagttcggcgctgatagggttttcggccaggagtccacgcaaggaaggaaccggcggtaataagctcggcgtcgtgcctcgggctatccaggagctgttctctcgcgcttcggaggacggctcatgcgcctactctttctccatgagcatgcttgaggtctacctggggagtctcagggacttgctggcagcaccgaggcagcctctcttcaggcgaacagagtgcaaagcagcggcgtgtagtagtagcctcagcatactggcaacgaaaggtggcgccgtggaagtggaggggctgacggacgtctcgacgccggacctcaagaacgccagccagtggtaccgcagagggcggcgagcccggtcgacggcctggacgaacgtcaacgacgcctccagccggtcgcactgcctgacgaggatcaccataaggagaaggatgaggcatggaggaggaggaggagtcagcaagctctggctcgtcgacctcggcggcagcgagcggctgctcaagaccggcgcgtccgggctcaccatggacgagggcaaggccatcaacctctccctgtcggcgctcggagacgtcattgctgcgctcaggaggaagaggccccatgttccttatagaaacagcaagcttacccagattctcagcgactcgctcggcgatggttcgaaagttgtaatggtggtgcacgtcagcctatccgaggacgacgtcggcgagacggtctgctcgctgaacctggcgaaacgagccagatcgatcgagccgaacagagaaatcccacaggatctgaaaacgctgaagcagaagagggtcgcagagctggacagggagatccgcgccgccgaggaagagctgaagcgtctcgacgagcagataaggagagcggaggagaaggagatctcactcgaggaggaggaggaggaggaggaggagaagaagctcttcgcctcgtcggtctgccaggctctcagcgacgacgagaaggggtcgccgaggagcactctggtggtggtggggcacaccgatgccgcggagagcccgcgcgcgacgacggagaaggcgaagggcaggaggccgccgccggctcgtggccatggtggctcagcagctccccacttcatgtcctccacggtgtgcagccggcagagacggtgcgcgggaggctaccattctgtcggtaacggtaagccgaggctgacggcggtgtcggtgaacaggtacccgccgccggctgctgagctgagtgggagccagaacgcggcggccagggctagcaggtcggcgtcagtggcactctcgtccggtgtgcacaagttgaggtgcttgcgtgtcaacaagtccgatcaggtcaacgtaataagcaacagcagcgtcgactcgaccgctgcgtcggcaccgccgccgcggcggagggaaagctgcttcggctccaggccggttctacaaagagcggcagcgcccctgcatctgcacaggaggaggatgtctagcctgacatgaacaccgattgcacagttatgatttttcttaacttaattgtttttattagtggtgaaagggttctgaaagatgtttgtgtatgtatggttgttagcttcgtagttcttgactgctgtaactattggttggaggccccttgggcttttgttttttttttgggtttggcttggaaggggcaaaatgatgcgaggaataattgttgatacatggaataatggaatttacctgtggttctggttgcgatggattttgaatggaatttgcgaggtagcaaaacaatctaacaagttacgtagg

SEQ ID NO: 38591 - DNA, 2744 bp, Zea Mays
ccaagcaccgctcaccggttctcacgccgtaggtagccgctcccacacggcctccatctttcggcatcgagagatccaataacatcaggaccaagaaagtaaaaagacgcaatcattaggaactactttctctccgtttctttttaattgtcgctggatagttcaattttgcactatccagcgacaaataaaacgaaacgctacttatctgcattgcgcagattctctgctagctaggctgttggctcgctccttcaattctcctctcctctccttccgcactccaccccctcctccgtagtagtagcagcatagcatctggtggtgtggtggtcaaggttcaagaacaaattcagctggaggccggcggagattattttattcattcccctccgagaggctgcatcgaaaaggggagatcaaggatccccggaggcttgtagccgcaacaaccacaagggaggcggagggcgagaggcttcttctctgaccagcgaccggctcgccgtccagagaagaagaagaagaagaggaggaggaggaggaagaagaagaagaagcgctcttgggctccgtcgtcgcatgaagaaggaaaccatggaggggcatgtgccattgccattgccattgctcccggacggagaaactgcggtgggctacagcaaggacgacgcctcctcgcctctgcaagaggagatttcgagcctgcggtcaaggcagcggcgtgttgacaggagacggcgggaggcgctcgacaggctcgttgaactgaaaggaagcgttagggtcttctgccgggtccggccgctggctcacacgaacagcttgcatgcccagtcatcacctgttaccgtcgagcaggagaggatcacggtcaagcagccgggatcaagagggagttcggcgctgatagggttttcggccaggagtccacgcaagaggatgtgttcgaagaagtgaaaccgatcctcaggtctgcactcgacggccacaacgtctgcatcctcgcgtacggccagaccgggacggggaagacctacacaatggaaggaaccggcggtaataagctcggcgtcgtgcctcgggctatccaggagctgttctctcgcgcttcggaggacggctcatgcgcctactctttctccatgagcatgcttgaggtctacctggggagtctcagggacttgctggcagcaccgaggcagcctctcttcaggcgaacagagtgcaaagcagcggcgtgtagtagtagcctcagcatactggcaacgaaaggtggcgccgtggaagtggaggggctgacggacgtctcgacgccggacctcaagaacgccagccagtggtaccgcagagggcggcgagcccggtcgacggcctggacgaacgtcaacgacgcctccagccggtcgcactgcctgacgaggatcaccataaggagaaggatgaggcatggaggaggaggaggagtcagcaagctctggctcgtcgacctcggcggcagcgagcggctgctcaagaccggcgcgtccgggctcaccatggacgagggcaaggccatcaacctctccctgtcggcgctcggagacgtcattgctgcgctcaggaggaagaggccccatgttccttatagaaacagcaagcttacccagattctcagcgactcgctcggcgatggttcgaaagttgtaatggtggtgcacgtcagcctatccgaggacgacgtcggcgagacggtctgctcgctgaacctggcgaaacgagccagatcgatcgagccgaacagagaaatcccacaggatctgaaaacgctgaagcagaagagggtcgcagagctggacagggagatccgcgccgccgaggaagagctgaagcgtctcgacgagcagataaggagagcggaggagaaggagatctcactcgaggaggaggaggaggaggaggaggagaagaagctcttcgcctcgtcggtctgccaggctctcagcgacgacgagaaggggtcgccgaggagcactctggtggtggtggggcacaccgatgccgcggagagcccgcgcgcgacgacggagaaggcgaagggcaggaggccgccgccggctcgtggccatggtggctcagcagctccccacttcatgtcctccacggtgtgcagccggcagagacggtacccgccgccggctgctgagctgagtgggagccagaacgcggcggccagggctagcaggtcggcgtcagtggcactctcgtccggtgtgcacaagttgaggtgcttgcgtgtcaacaagtccgatcaggtcaacgtaataagcaacagcagcgtcgactcgaccgctgcgtcggcaccgccgccgcggcggagggaaagctgcttcggctccaggccggttctacaaagagcggcagcgcccctgcatctgcacaggaggaggatgtctagcctgacatgaacaccgattgcacagttatgatttttcttaacttaattgtttttattagtggtgaaagggttctgaaagatgtttgtgtatgtatggttgttagcttcgtagttcttgactgctgtaactattggttggaggccccttgggcttttgttttttttttgggtttggcttggaaggggcaaaatgatgcgaggaataattgttgatacatggaataatggaatttacctgtggttctggttgcgatggattttgaatggaatttgcgaggtagcaaaacaatctaacaagttacgtagg

SEQ ID NO: 38592 - DNA, 2202 bp, Zea Mays
cgctcaccggttctcacgccgtagggaggcggagggcgagaggcttcttctctgaccagcgaccggctcgccgtccagagaagaagaagaagaagaggaggaggaggaggaagaagaagaagaagcgctcttgggctccgtcgtcgcatgaagaaggaaaccatggaggggcatgtgccattgccattgccattgctcccggacggagaaactgcggtgggctacagcaaggacgacgcctcctcgcctctgcaagaggagatttcgagcctgcggtcaaggcagcggcgtgttgacaggagacggcgggaggcgctcgacaggctcgttgaactgaaaggaagcgttagggtcttctgccgggtccggccgctggctcacacgaacagcttgcatgcccagtcatcacctgttaccgtcgagcaggagaggatcacggtcaagcagccgggatcaagagggagttcggcgctgatagggttttcggccaggagtccacgcaaggaaggaaccggcggtaataagctcggcgtcgtgcctcgggctatccaggagctgttctctcgcgcttcggaggacggctcatgcgcctactctttctccatgagcatgcttgaggtctacctggggagtctcagggacttgctggcagcaccgaggcagcctctcttcaggcgaacagagtgcaaagcagcggcgtgtagtagtagcctcagcatactggcaacgaaaggtggcgccgtggaagtggaggggctgacggacgtctcgacgccggacctcaagaacgccagccagtggtaccgcagagggcggcgagcccggtcgacggcctggacgaacgtcaacgacgcctccagccggtcgcactgcctgacgaggatcaccataaggagaaggatgaggcatggaggaggaggaggagtcagcaagctctggctcgtcgacctcggcggcagcgagcggctgctcaagaccggcgcgtccgggctcaccatggacgagggcaaggccatcaacctctccctgtcggcgctcggagacgtcattgctgcgctcaggaggaagaggccccatgttccttatagaaacagcaagcttacccagattctcagcgactcgctcggcgatggttcgaaagttgtaatggtggtgcacgtcagcctatccgaggacgacgtcggcgagacggtctgctcgctgaacctggcgaaacgagccagatcgatcgagccgaacagagaaatcccacaggatctgaaaacgctgaagcagaagagggtcgcagagctggacagggagatccgcgccgccgaggaagagctgaagcgtctcgacgagcagataaggagagcggaggagaaggagatctcactcgaggaggaggaggaggaggaggaggagaagaagctcttcgcctcgtcggtctgccaggctctcagcgacgacgagaaggggtcgccgaggagcactctggtggtggtggggcacaccgatgccgcggagagcccgcgcgcgacgacggagaaggcgaagggcaggaggccgccgccggctcgtggccatggtggctcagcagctccccacttcatgtcctccacggtgtgcagccggcagagacggtacccgccgccggctgctgagctgagtgggagccagaacgcggcggccagggctagcaggtcggcgtcagtggcactctcgtccggtgtgcacaagttgaggtgcttgcgtgtcaacaagtccgatcaggtcaacgtaataagcaacagcagcgtcgactcgaccgctgcgtcggcaccgccgccgcggcggagggaaagctgcttcggctccaggccggttctacaaagagcggcagcgcccctgcatctgcacaggaggaggatgtctagcctgacatgaacaccgattgcacagttatgatttttcttaacttaattgtttttattagtggtgaaagggttctgaaagatgtttgtgtatgtatggttgttagcttcgtagttcttgactgctgtaactattggttggaggccccttgggcttttgttttttttttgggtttggcttggaaggggcaaaatgatgcgaggaataattgttgatacatggaataatggaatttacctgtggttctggttgcgatggattttgaatggaatttgcgaggtagcaaaacaatctaacaagttacgtagg

SEQ ID NO: 38593 - DNA, 2375 bp, Zea Mays
cgctcaccggttctcacgccgtagggaggcggagggcgagaggcttcttctctgaccagcgaccggctcgccgtccagagaagaagaagaagaagaggaggaggaggaggaagaagaagaagaagcgctcttgggctccgtcgtcgcatgaagaaggaaaccatggaggggcatgtgccattgccattgccattgctcccggacggagaaactgcggtgggctacagcaaggacgacgcctcctcgcctctgcaagaggagatttcgagcctgcggtcaaggcagcggcgtgttgacaggagacggcgggaggcgctcgacaggctcgttgaactgaaaggaagcgttagggtcttctgccgggtccggccgctggctcacacgaacagcttgcatgcccagtcatcacctgttaccgtcgagcaggagaggatcacggtcaagcagccgggatcaagagggagttcggcgctgatagggttttcggccaggagtccacgcaagaggatgtgttcgaagaagtgaaaccgatcctcaggtctgcactcgacggccacaacgtctgcatcctcgcgtacggccagaccgggacggggaagacctacacaatggaaggaaccggcggtaataagctcggcgtcgtgcctcgggctatccaggagctgttctctcgcgcttcggaggacggctcatgcgcctactctttctccatgagcatgcttgaggtctacctggggagtctcagggacttgctggcagcaccgaggcagcctctcttcaggcgaacagagtgcaaagcagcggcgtgtagtagtagcctcagcatactggcaacgaaaggtggcgccgtggaagtggaggggctgacggacgtctcgacgccggacctcaagaacgccagccagtggtaccgcagagggcggcgagcccggtcgacggcctggacgaacgtcaacgacgcctccagccggtcgcactgcctgacgaggatcaccataaggagaaggatgaggcatggaggaggaggaggagtcagcaagctctggctcgtcgacctcggcggcagcgagcggctgctcaagaccggcgcgtccgggctcaccatggacgagggcaaggccatcaacctctccctgtcggcgctcggagacgtcattgctgcgctcaggaggaagaggccccatgttccttatagaaacagcaagcttacccagattctcagcgactcgctcggcgatggttcgaaagttgtaatggtggtgcacgtcagcctatccgaggacgacgtcggcgagacggtctgctcgctgaacctggcgaaacgagccagatcgatcgagccgaacagagaaatcccacaggatctgaaaacgctgaagcagaagagggtcgcagagctggacagggagatccgcgccgccgaggaagagctgaagcgtctcgacgagcagataaggagagcggaggagaaggagatctcactcgaggaggaggaggaggaggaggaggagaagaagctcttcgcctcgtcggtctgccaggctctcagcgacgacgagaaggggtcgccgaggagcactctggtggtggtggggcacaccgatgccgcggagagcccgcgcgcgacgacggagaaggcgaagggcaggaggccgccgccggctcgtggccatggtggctcagcagctccccacttcatgtcctccacggtgtgcagccggcagagacggtgcgcgggaggctaccattctgtcggtaacggtaagccgaggctgacggcggtgtcggtgaacaggtacccgccgccggctgctgagctgagtgggagccagaacgcggcggccagggctagcaggtcggcgtcagtggcactctcgtccggtgtgcacaagttgaggtgcttgcgtgtcaacaagtccgatcaggtcaacgtaataagcaacagcagcgtcgactcgaccgctgcgtcggcaccgccgccgcggcggagggaaagctgcttcggctccaggccggttctacaaagagcggcagcgcccctgcatctgcacaggaggaggatgtctagcctgacatgaacaccgattgcacagttatgatttttcttaacttaattgtttttattagtggtgaaagggttctgaaagatgtttgtgtatgtatggttgttagcttcgtagttcttgactgctgtaactattggttggaggccccttgggcttttgttttttttttgggtttggcttggaaggggcaaaatgatgcgaggaataattgttgatacatggaataatggaatttacctgtggttctggttgcgatggattttgaatggaatttgcgaggtagcaaaacaatctaacaagttacgtagg

SEQ ID NO: 38594 - DNA, 2549 bp, Zea Mays
ctcaccggttctcacgccgtaggtagggaggcggagggcgagaggcttcttctctgaccagcgaccggctcgccgtccagagaagaagaagaagaagaggaggaggaggaggaagaagaagaagaagcgctcttgggctccgtcgtcgcatgaagaaggaaaccatggaggggcatgtgccattgccattgccattgctcccggacggagaaactgcggtgggctacagcaaggacgacgcctcctcgcctctgcaaggttggaactgtttgaaagaccaggtcgtcgttgcagttcttccacctgttgttattgttactcgcctgtgaattaaccttgcgacgacgacgacacgacaacacctgcctgacggaacggaactatctctcaatctcaacccccgcccacactgcacgtctttgtgttccagaggagatttcgagcctgcggtcaaggcagcggcgtgttgacaggagacggcgggaggcgctcgacaggctcgttgaactgaaaggaagcgttagggtcttctgccgggtccggccgctggctcacacgaacagcttgcatgcccagtcatcacctgttaccgtcgagcaggagaggatcacggtcaagcagccgggatcaagagggagttcggcgctgatagggttttcggccaggagtccacgcaagaggatgtgttcgaagaagtgaaaccgatcctcaggtctgcactcgacggccacaacgtctgcatcctcgcgtacggccagaccgggacggggaagacctacacaatggaaggaaccggcggtaataagctcggcgtcgtgcctcgggctatccaggagctgttctctcgcgcttcggaggacggctcatgcgcctactctttctccatgagcatgcttgaggtctacctggggagtctcagggacttgctggcagcaccgaggcagcctctcttcaggcgaacagagtgcaaagcagcggcgtgtagtagtagcctcagcatactggcaacgaaaggtggcgccgtggaagtggaggggctgacggacgtctcgacgccggacctcaagaacgccagccagtggtaccgcagagggcggcgagcccggtcgacggcctggacgaacgtcaacgacgcctccagccggtcgcactgcctgacgaggatcaccataaggagaaggatgaggcatggaggaggaggaggagtcagcaagctctggctcgtcgacctcggcggcagcgagcggctgctcaagaccggcgcgtccgggctcaccatggacgagggcaaggccatcaacctctccctgtcggcgctcggagacgtcattgctgcgctcaggaggaagaggccccatgttccttatagaaacagcaagcttacccagattctcagcgactcgctcggcgatggttcgaaagttgtaatggtggtgcacgtcagcctatccgaggacgacgtcggcgagacggtctgctcgctgaacctggcgaaacgagccagatcgatcgagccgaacagagaaatcccacaggatctgaaaacgctgaagcagaagagggtcgcagagctggacagggagatccgcgccgccgaggaagagctgaagcgtctcgacgagcagataaggagagcggaggagaaggagatctcactcgaggaggaggaggaggaggaggaggagaagaagctcttcgcctcgtcggtctgccaggctctcagcgacgacgagaaggggtcgccgaggagcactctggtggtggtggggcacaccgatgccgcggagagcccgcgcgcgacgacggagaaggcgaagggcaggaggccgccgccggctcgtggccatggtggctcagcagctccccacttcatgtcctccacggtgtgcagccggcagagacggtgcgcgggaggctaccattctgtcggtaacggtaagccgaggctgacggcggtgtcggtgaacaggtacccgccgccggctgctgagctgagtgggagccagaacgcggcggccagggctagcaggtcggcgtcagtggcactctcgtccggtgtgcacaagttgaggtgcttgcgtgtcaacaagtccgatcaggtcaacgtaataagcaacagcagcgtcgactcgaccgctgcgtcggcaccgccgccgcggcggagggaaagctgcttcggctccaggccggttctacaaagagcggcagcgcccctgcatctgcacaggaggaggatgtctagcctgacatgaacaccgattgcacagttatgatttttcttaacttaattgtttttattagtggtgaaagggttctgaaagatgtttgtgtatgtatggttgttagcttcgtagttcttgactgctgtaactattggttggaggccccttgggcttttgttttttttttgggtttggcttggaaggggcaaaatgatgcgaggaataattgttgatacatggaataatggaatttacctgtggttctggttgcgatggattttgaatggaatttgcgaggtagcaaaacaatctaacaagttacgtagg

SEQ ID NO: 38595 - DNA, 1603 bp, Zea Mays
gtagctgatatgttgtcatgttccaagtgaagaagaaacagttctttcgaaacttcattactattacactgtttggtgcagttggcaccttgatctcttttactgtaatatcccttggcgctctaggactaatatcaaggcttaatatcggcgcacttgaactgggagactatcttggtgttaagccaagatgagacaccattcttgtacagcctcgtgtttggtgaaggtgttgtcaatgacgcaacttctgttgtgttgttcaatgcaatccagaactttgatcctggaaatatcagcagtgccaaattactgaacttcattggcagtttcctttatctgttcggctccagcaccattcttggagtagcttctggacttcttagtgcttataccattaagaagttgtacttcggcaggcattcaaccgatcgtgaagtttccattatgatgctaatggcttatttatcttacatgctagctgaattgctcgatttgagtggcattctcactgtgtttttctgcggtatcgtaaatgtcacactatacttggcacaatgtaacagaaaagttcgagggtcacaaccaagcatgcctttgcaacattgtcgtttatctccgagacttttctgtttctttatgttggtatggatgcattggatatagagaagtggaagattgtcggtcaaacttatagcccggtaaagtctatcgctttgagcagcaccattttagccttggtgctggtttcaagagctgcttttgttttcccactatcctttgtatcaaatttgaccaaaaaaactccaaatggaaagatatcttttaggcagcaggttattgtttggtgggcgggtctcatgagaggtgctgtgtctattgcgttggcttacaataagttcacaagatcaggccatactcaacaacctagcaatgctatcatgatcacaagcacaatcagcgttgttcttttcagcacaattgtctttgggctgctgacgaagccactgatcaggctcttgatcccgtcaaggcacctatccagggaaccaagcgccctttctgaaccttccagcccgaagtctttctttgagcagctggccgccaacagccctggacacccggatcttgagaatggcataagcctacgacgcccggcgagcctccgttttctcctagtaagcccggcacggtccgtccaccattactggcgcaagttcgatgacagtttcatgcggccggtgtttggtggccgtggcttcgttcccttcgtccctggttcacccactgagagcagcttgccattgcttcctggcaatgagaactgaaaccagcgtatcgaggggctttaattcagcagaagttttgtaaattggcttcgcttatggttataatatttggtgtaaatctaggtttgtagattcaacttggtagcatgtacatgttgatgtaggctagttaactgaccagcgaccaaacggctgtgcatattgatatctcgtcgctatcaatgagttcgtatttataaaatactctgtacatcggatcactatatatgtatcgtctccaacttaataaatactcatccgttctaaaataatat

SEQ ID NO: 38596 - DNA, 1573 bp, Zea Mays
ctgatatgttgtcatgttccaagtgaagaagaaacagttctttcgaaacttcattactattacactgtttggtgcagttggcaccttgatctcttttactgtaatatcccttggcgctctaggactaatatcaaggcttaatatcggcgcacttgaactgggagactatcttgcacttggggcaatattctcggccacagactcggtttgcaccttgcaggtgttaagccaagatgagacaccattcttgtacagcctcgtgtttggtgaagtgccaaattactgaacttcattggcagtttcctttatctgttcggctccagcaccattcttggagtagcttctggacttcttagtgcttataccattaagaagttgtacttcggcaggcattcaaccgatcgtgaagtttccattatgatgctaatggcttatttatcttacatgctagctgaattgctcgatttgagtggcattctcactgtgtttttctgcggtatcgtaaatgtcacactatacttggcacaatgtaacagaaaagttcgagggtcacaaccaagcatgcctttgcaacattgtcgtttatctccgagacttttctgtttctttatgttggtatggatgcattggatatagagaagtggaagattgtcggtcaaacttatagcccggtaaagtctatcgctttgagcagcaccattttagccttggtgctggtttcaagagctgcttttgttttcccactatcctttgtatcaaatttgaccaaaaaaactccaaatggaaagatatcttttaggcagcaggttattgtttggtgggcgggtctcatgagaggtgctgtgtctattgcgttggcttacaataagttcacaagatcaggccatactcaacaacctagcaatgctatcatgatcacaagcacaatcagcgttgttcttttcagcacaattgtctttgggctgctgacgaagccactgatcaggctcttgatcccgtcaaggcacctatccagggaaccaagcgccctttctgaaccttccagcccgaagtctttctttgagcagctggccgccaacagccctggacacccggatcttgagaatggcataagcctacgacgcccggcgagcctccgttttctcctagtaagcccggcacggtccgtccaccattactggcgcaagttcgatgacagtttcatgcggccggtgtttggtggccgtggcttcgttcccttcgtccctggttcacccactgagagcagcttgccattgcttcctggcaatgagaactgaaaccagcgtatcgaggggctttaattcagcagaagttttgtaaattggcttcgcttatggttataatatttggtgtaaatctaggtttgtagattcaacttggtagcatgtacatgttgatgtaggctagttaactgaccagcgaccaaacggctgtgcatattgatatctcgtcgctatcaatgagttcgtatttataaaatactctgtacatcggatcactatatatgtatcgtctccaacttaataaatactcatccgttctaaaataatat

SEQ ID NO: 38597 - DNA, 3950 bp, Zea Mays
aaaagaaaaactcagtctcaggttgcagacctcccgacgccggccgtgccgcttccgtcctcgctttcctgtcaccgccgccgccgactgccacaacctctttcccatccctctcgtccccatcctctgccgccgcccccatcctcgccgcggctcggctggtgcggagcggacggacggagatccgccgacctcgggctccgctgcgtcatcgctacgccggctgaaggagtgaagatgatagacatggtgtctgctgttgaagagcttagtgggttaagctctaaagaacttaatgagatgctgaaggagtcagacaactttgttttgcagtccaaggcagaaggcggaggtccaaagcagacacttgtggacatggaaaaactcgtgtcctcgcttcctcttcatctcattgctgtatgtttggagcttcggcaaggccccgatttgacatatgtgcttcgtggcatgcgctttttgcatagtttgtctgacctagcatcccgccatactagactggagcaggttcttcttgatgatgtcaaattatctgaacaagtcatggatctgatattcttcttactttctattcttgctgaacagaagaaggagaataatgttggcgcttctccgcttgtgcatgcgtcacttgtagcagctagtcttcatctgctaacaagttacttctcttcccagtggcatgaacttgtccatattctgcttgcacatccaaaggttgatatctttgtggatgtggcctttgatagtttgcatgaagatgtgaggctgttaaatatcagattatcatcaatggacttcggtatctttcctgttggttctttggaatctcgtcttgctcacttcatctgccaacagtgtgaagcatcattgcaatttctcttgttgttgtgccagcaaaagctgtttcgagatcggattttaagaaataaggaactctctagaaatggaggcatactgtcactttctcacactatactgaagttagctgtccctgaatgtttgaagcaatcaaccgatcttgttgcttctatttccaggctcaaggcaaagatactttctattctgctgcaactttgtgaggctgaaagtgtctcttacctcgatgaagttgccactaattcaaacagcatgcggctagggcaaaccttggctctagaggttcttaatttgctgaagattgcatttggaaagaaaaaatacattacttctgattctcatgataaggttaagatttaccccatgggatctatgcttatcagtgcattgcgtcttgttgacgtcttctctgatgattcaaacttcagatcatcctttttgactaacactgttccgtttttaacccagattctagcaactcctcacggtgaatttgtttctagttggtgctctgtcaacttaccagcaattgaggaagatgcaagtctagattatgatccttttgttgcatctgaggtggcactgttagcttctaataatgtgttgactgaagctaaagctgactattcatgcccttttcgccctagcctgccttcagtggcatatgcacagacaagaacatcatgcgtagtgaaaataatagcaaatttgcatgtttttattccaaacatatgtgaagagcaagaaagggatctttttcttcagaactttcaaaagtacttggtgtctgggagttctaaactgtcagcagaccagccagcttctagtgattttgatgccactaaagtctgtagaaacttaggatctttgtctgattatgctaaaacattggttcctaatttgttaaatggggaagacttgttgttattaagtgatttttctgataagctacaatcttggtgtaaatcacaagttgcagtaaaggtggtacaaaatgatattccaccagaaagcatggaggacatgcacccaatgcagcagcccttgccaacacgggcaagcactccggactccaaaatgaataactttccaaagaacatggaagtgtctgcaccaatacccccaataaatcgggaaggaaatgataaggatgagactccaaagaacacagtctctagaaatggtggtttcctacagaatgcagttggtcaagacctagtccatcttggcgttgcaagaacagccagtggtggctcttcggccgtcacttccgttgttagcactggacaccagcgcagcaaaatggatcttgatccagcttccggtagcgtggacaatttcaaaacaccagaactcacaaaagaaaatggtctccagggggatgacaaaggagaaagtagtgtgtatgatgagaggcaacctaagagaaggaagcggaacattatgaatagtgagcaaatagatgaattagagaaggctctagtagatgagcctgagatgcacaggaaccctgttctattgcagggttggtcagagaagctaagtctgcagggcccagagatcacatcatcacaacttaaaaactggctgaacaatcggaaagctaagcttgctcgcattgcaaaagaaagagggacatttgagggagataatgctgataagccatctacccctcatcccggcgagtcttccgaaagtgctggggaggacaactatataccccctgcaagggtgatgactgctccatccaaaggcagactggtgagcccggacggcaatgagaaaacatcgcaggcagagctatcccccaacacgatgctgatccgcccattcacgagatccttctcactggagcccggtcggctcgtttcactagttgacagcgacgggaaggaggttggcaggggcaagatattccaagcgccagggaagagcccagccccagtggagagccgcatctgcacggttgatgtcaccgagctcaggaccgagaagtggagggagctcccacacccttctgaggcatctgggaggaccttccaggaggcggaggcgaggaatggtggaatcatgagggtctcttgggactccggcaggctgttgcctgtagtgtagcaaggcagaaacttttcgtcaggttgctgtataccgctaggcacaaggtgagcagagggagcctttggtttagggcgagagactggatcatgggattcttgggggcctaagtaacactgttaaaacctgtggttaactgtggtgtatccatcaactaattgtctcaagcaatgcaggtacggagtagttactaattttactgctggtgtttggtgtcacctgcaacgtgacgtggtaaaccaatgctgagcgatggagttgcatgtaaataattcagcactagaggaaaccaaaggggctgcataatgaactttagcttttattgtgggaaaaaaggtgatagcgttcttcatgttcgatcaattaaacagcaccagtaaattgatcatagggatgtggacttgctgaggcttgagtatatatggtgttcctcgagcttccttaaacaagcatgaagtttgtaggcacttcatcacttgttggtgagctacagtaatcttgagcccgaccctataaataacatggttcttaggctcgttaccaaaatgagcattacattacaaagcagcttttagacatatattggccaagaagatgttggagagaaatataagtctcaaatgttgagtgatatgttgcttcgtgaattattctcaaacatttaatgacgaggccacatacgaatttctccattgatttttttcactaaagacaccatacactgacaatgatgagatattggagagaaacaaaagtctcacataattttcattgtatatcatttgtgagattccgaactattgtttttatacaggtcaacatgctttagtttttgttaccatagtagttgtgagtaaattggttataacaagctaacgagcatcaaaggtcgcttcattcaagataattttatgttgctttaacaaacaaacaaacaa

SEQ ID NO: 38598 - DNA, 3915 bp, Zea Mays
aaaagaaaaactcagtctcaggttgcagacctcccgacgccggccgtgccgcttccgtcctcgctttcctgtcaccgccgccgccgactgccacaacctctttcccatccctctcgtccccatcctctgccgccgcccccatcctcgccgcggctcggctggtgcggagcggacggacggagatccgccgacctcgggctccgctgcgtcatcgctacgccggctgaaggagtgaagatgatagacatggtgtctgctgttgaagagcttagtgggttaagctctaaagaacttaatgagatgctgaaggagtcagacaactttgttttgcagtccaaggcagaaggcggaggtccaaagcagacacttgtggacatggaaaaactcgtgtcctcgcttcctcttcatctcattgctgtatgtttggagcttcggcaaggccccgatttgacatatgtgcttcgtggcatgcgctttttgcatagtttgtctgacctagcatcccgccatactagactggagcaggttcttcttgatgatgtcaaattatctgaacaagtcatggatctgatattcttcttactttctattcttgctgaacagaagaaggagaataatgttggcgcttctccgcttgtgcatgcgtcacttgtagcagctagtcttcatctgctaacaagttacttctcttcccagtggcatgaacttgtccatattctgcttgcacatccaaaggttgatatctttgtggatgtggcctttgatagtttgcatgaagatgtgaggctgttaaatatcagattatcatcaatggacttcggtatctttcctgttggttctttggaatctcgtcttgctcacttcatctgccaacagtgtgaagcatcattgcaatttctcttgttgttgtgccagcaaaagctgtttcgagatcggattttaagaaataaggaactctctagaaatggaggcatactgtcactttctcacactatactgaagttagctgtccctgaatgtttgaagcaatcaaccgatcttgttgcttctatttccaggctcaaggcaaagatactttctattctgctgcaactttgtgaggctgaaagtgtctcttacctcgatgaagttgccactaattcaaacagcatgcggctagggcaaaccttggctctagaggttcttaatttgctgaagattgcatttggaaagaaaaaatacattacttctgattctcatgataaggttaagatttaccccatgggatctatgcttatcagtgcattgcgtcttgttgacgtcttctctgatgattcaaacttcagatcatcctttttgactaacactgttccgtttttaacccagattctagcaactcctcacggtgaatttgtttctagttggtgctctgtcaacttaccagcaattgaggaagatgcaagtctagattatgatccttttgttgcatctgaggtggcactgttagcttctaataatgtgttgactgaagctaaagctgactattcatgcccttttcgccctagcctgccttcagtggcatatgcacagacaagaacatcatgcgtagtgaaaataatagcaaatttgcatgtttttattccaaacatatgtgaagagcaagaaagggatctttttcttcagaactttcaaaagtacttggtgtctgggagttctaaactgtcagcagaccagccagcttctagtgattttgatgccactaaagtctgtagaaacttaggatctttgtctgattatgctaaaacattggttcctaatttgttaaatggggaagacttgttgttattaagtgatttttctgataagctacaatcttggtgtaaatcacaagttgcagtaaaggtggtacaaaatgatattccaccagaaagcatggaggacatgcacccaatgcagcagcccttgccaacacgggcaagcactccggactccaaaatgaataactttccaaagaacatggaagtgtctgcaccaatacccccaataaatcgggaaggaaatgataaggatgagactccaaagaacacagtctctagaaatggtggtttcctacagaatgcagttggtcaagacctagtccatcttggcgttgcaagaacagccagtggtggctcttcggccgtcacttccgttgttagcactggacaccagcgcagcaaaatggatcttgatccagcttccggtagcgtggacaatttcaaaacaccagaactcacaaaagaaaatggtctccagggggatgacaaaggagaaagtagtgtgtatgatgagaggcaacctaagagaaggaagcggaacattatgaatagtgagcaaatagatgaattagagaaggctctagtagatgagcctgagatgcacaggaaccctgttctattgcagggttggtcagagaagctaagtctgcaggctgaacaatcggaaagctaagcttgctcgcattgcaaaagaaagagggacatttgagggagataatgctgataagccatctacccctcatcccggcgagtcttccgaaagtgctggggaggacaactatataccccctgcaagggtgatgactgctccatccaaaggcagactggtgagcccggacggcaatgagaaaacatcgcaggcagagctatcccccaacacgatgctgatccgcccattcacgagatccttctcactggagcccggtcggctcgtttcactagttgacagcgacgggaaggaggttggcaggggcaagatattccaagcgccagggaagagcccagccccagtggagagccgcatctgcacggttgatgtcaccgagctcaggaccgagaagtggagggagctcccacacccttctgaggcatctgggaggaccttccaggaggcggaggcgaggaatggtggaatcatgagggtctcttgggactccggcaggctgttgcctgtagtgtagcaaggcagaaacttttcgtcaggttgctgtataccgctaggcacaaggtgagcagagggagcctttggtttagggcgagagactggatcatgggattcttgggggcctaagtaacactgttaaaacctgtggttaactgtggtgtatccatcaactaattgtctcaagcaatgcaggtacggagtagttactaattttactgctggtgtttggtgtcacctgcaacgtgacgtggtaaaccaatgctgagcgatggagttgcatgtaaataattcagcactagaggaaaccaaaggggctgcataatgaactttagcttttattgtgggaaaaaaggtgatagcgttcttcatgttcgatcaattaaacagcaccagtaaattgatcatagggatgtggacttgctgaggcttgagtatatatggtgttcctcgagcttccttaaacaagcatgaagtttgtaggcacttcatcacttgttggtgagctacagtaatcttgagcccgaccctataaataacatggttcttaggctcgttaccaaaatgagcattacattacaaagcagcttttagacatatattggccaagaagatgttggagagaaatataagtctcaaatgttgagtgatatgttgcttcgtgaattattctcaaacatttaatgacgaggccacatacgaatttctccattgatttttttcactaaagacaccatacactgacaatgatgagatattggagagaaacaaaagtctcacataattttcattgtatatcatttgtgagattccgaactattgtttttatacaggtcaacatgctttagtttttgttaccatagtagttgtgagtaaattggttataacaagctaacgagcatcaaaggtcgcttcattcaagataattttatgttgctttaacaaacaaacaaacaa

SEQ ID NO: 38599 - DNA, 3840 bp, Zea Mays
gaaaaactcagtctcaggttgcagacctcccgacgccggccgtgccgcttccgtcctcgctttcctgtcaccgccgccgccgactgccacaacctctttcccatccctctcgtccccatcctctgccgccgcccccatcctcgccgcggctcggctggtgcggagcggacggacggagatccgccgacctcgggctccgctgcgtcatcgctacgccggctgaaggagtgaagatgatagacatggtgtctgctgttgaagagcttagtgggttaagctctaaagaacttaatgagatgctgaaggagtcagacaactttgttttgcagtccaaggcagaaggcggaggtccaaagcagacacttgtggacatggaaaaactcgtgtcctcgcttcctcttcatctcattgctgtatgtttggagcttcggcaaggccccgatttgacatatgtgcttcgtggcatgcgctttttgcatagtttgtctgacctagcatcccgccatactagactggagcaggttcttcttgatgatgtcaaattatctgaacaagtcatggatctgatattcttcttactttctattcttgctgaacagaagaaggagaataatgttggcgcttctccgcttgtgcatgcgtcacttgtagcagctagtcttcatctgctaacaagttacttctcttcccagtggcatgaacttgtccatattctgcttgcacatccaaaggttgatatctttgtggatgtggcctttgatagtttgcatgaagatgtgaggctgttaaatatcagattatcatcaatggacttcggtatctttcctgttggttctttggaatctcgtcttgctcacttcatctgccaacagtgtgaagcatcattgcaatttctcttgttgttgtgccagcaaaagctgtttcgagatcggattttaagaaataaggaactctctagaaatggaggcatactgtcactttctcacactatactgaagttagctgtccctgaatgtttgaagcaatcaaccgatcttgttgcttctatttccaggctcaaggcaaagatactttctattctgctgcaactttgtgaggctgaaagtgtctcttacctcgatgaagttgccactaattcaaacagcatgcggctagggcaaaccttggctctagaggttcttaatttgctgaagattgcatttggaaagaaaaaatacattacttctgattctcatgataaggttaagatttaccccatgggatctatgcttatcagtgcattgcgtcttgttgacgtcttctctgatgattcaaacttcagatcatcctttttgactaacactgttccgtttttaacccagattctagcaactcctcacggtgaatttgtttctagttggtgctctgtcaacttaccagcaattgaggaagatgcaagtctagattatgatccttttgttgcatctgaggtggcactgttagcttctaataatgtgttgactgaagctaaagctgactattcatgcccttttcgccctagcctgccttcagtggcatatgcacagacaagaacatcatgcgtagtgaaaataatagcaaatttgcatgtttttattccaaacatatgtgaagagcaagaaagggatctttttcttcagaactttcaaaagtacttggtgtctgggagttctaaactgtcagcagaccagccagcttctagtgattttgatgccactaaagtctgtagaaacttaggatctttgtctgattatgctaaaacattggttcctaatttgttaaatggggaagacttgttgttattaagtgatttttctgataagctacaatcttggtgtaaatcacaagttgcagtaaaggtggtacaaaatgatattccaccagaaagcatggaggacatgcacccaatgcagcagcccttgccaacacgggcaagcactccggactccaaaatgaataactttccaaaggatgtgcagaacatggaagtgtctgcaccaatacccccaataaatcgggaaggaaatgataaggatgagactccaaagaacacagtctctagaaatggtggtttcctacagaatgcagttggtcaagacctagtccatcttggcgttgcaagaacagccagtggtggctcttcggccgtcacttccgttgttagcactggacaccagcgcagcaaaatggatcttgatccagcttccggtagcgtggacaatttcaaaacaccagaactcacaaaagaaaatggtctccagggggatgacaaaggagaaagtagtgtgtatgatgagaggcaacctaagagaaggaagcggaacattatgaatagtgagcaaatagatgaattagagaaggctctagtagatgagcctgagatgcacaggaaccctgttctattgcagggttggtcagagaagctaagtctgcagggcccagagatcacatcatcacaacttaaaaactggctgaacaatcggaaagctaagcttgctcgcattgcaaaagaaagagggacatttgagggagataatgctgataagccatctacccctcatcccggcgagtcttccgaaagtgctggggaggacaactatataccccctgcaagggtgatgactgctccatccaaaggcagactgttgacagcgacgggaaggaggttggcaggggcaagatattccaagcgccagggaagagcccagccccagtggagagccgcatctgcacggttgatgtcaccgagctcaggaccgagaagtggagggagctcccacacccttctgaggcatctgggaggaccttccaggaggcggaggcgaggaatggtggaatcatgagggtctcttgggactccggcaggctgttgcctgtagtgtagcaaggcagaaacttttcgtcaggttgctgtataccgctaggcacaaggtgagcagagggagcctttggtttagggcgagagactggatcatgggattcttgggggcctaagtaacactgttaaaacctgtggttaactgtggtgtatccatcaactaattgtctcaagcaatgcaggtacggagtagttactaattttactgctggtgtttggtgtcacctgcaacgtgacgtggtaaaccaatgctgagcgatggagttgcatgtaaataattcagcactagaggaaaccaaaggggctgcataatgaactttagcttttattgtgggaaaaaaggtgatagcgttcttcatgttcgatcaattaaacagcaccagtaaattgatcatagggatgtggacttgctgaggcttgagtatatatggtgttcctcgagcttccttaaacaagcatgaagtttgtaggcacttcatcacttgttggtgagctacagtaatcttgagcccgaccctataaataacatggttcttaggctcgttaccaaaatgagcattacattacaaagcagcttttagacatatattggccaagaagatgttggagagaaatataagtctcaaatgttgagtgatatgttgcttcgtgaattattctcaaacatttaatgacgaggccacatacgaatttctccattgatttttttcactaaagacaccatacactgacaatgatgagatattggagagaaacaaaagtctcacataattttcattgtatatcatttgtgagattccgaactattgtttttatacaggtcaacatgctttagtttttgttaccatagtagttgtgagtaaattggttataacaagctaacgagcatcaaaggtcgcttcattcaagataattttatgttgctttaacaaacaaacaaacaa

SEQ ID NO: 38600 - DNA, 3847 bp, Zea Mays
ctcaggttgcagacctcccgacgccggccgtgccgcttccgtcctcgctttcctgtcaccgccgccgccgactgccacaacctctttcccatccctctcgtccccatcctctgccgccgcccccatcctcgccgcggctcggctggtgcggagcggacggacggagatccgccgacctcgggctccgctgcgtcatcgctacgccggctgaaggagtgaagtccaaggcagaaggcggaggtccaaagcagacacttgtggacatggaaaaactcgtgtcctcgcttcctcttcatctcattgctgtatgtttggagcttcggcaaggccccgatttgacatatgtgcttcgtggcatgcgctttttgcatagtttgtctgacctagcatcccgccatactagactggagcaggttcttcttgatgatgtcaaattatctgaacaagtcatggatctgatattcttcttactttctattcttgctgaacagaagaaggagaataatgttggcgcttctccgcttgtgcatgcgtcacttgtagcagctagtcttcatctgctaacaagttacttctcttcccagtggcatgaacttgtccatattctgcttgcacatccaaaggttgatatctttgtggatgtggcctttgatagtttgcatgaagatgtgaggctgttaaatatcagattatcatcaatggacttcggtatctttcctgttggttctttggaatctcgtcttgctcacttcatctgccaacagtgtgaagcatcattgcaatttctcttgttgttgtgccagcaaaagctgtttcgagatcggattttaagaaataaggaactctctagaaatggaggcatactgtcactttctcacactatactgaagttagctgtccctgaatgtttgaagcaatcaaccgatcttgttgcttctatttccaggctcaaggcaaagatactttctattctgctgcaactttgtgaggctgaaagtgtctcttacctcgatgaagttgccactaattcaaacagcatgcggctagggcaaaccttggctctagaggttcttaatttgctgaagattgcatttggaaagaaaaaatacattacttctgattctcatgataaggttaagatttaccccatgggatctatgcttatcagtgcattgcgtcttgttgacgtcttctctgatgattcaaacttcagatcatcctttttgactaacactgttccgtttttaacccagattctagcaactcctcacggtgaatttgtttctagttggtgctctgtcaacttaccagcaattgaggaagatgcaagtctagattatgatccttttgttgcatctgaggtggcactgttagcttctaataatgtgttgactgaagctaaagctgactattcatgcccttttcgccctagcctgccttcagtggcatatgcacagacaagaacatcatgcgtagtgaaaataatagcaaatttgcatgtttttattccaaacatatgtgaagagcaagaaagggatctttttcttcagaactttcaaaagtacttggtgtctgggagttctaaactgtcagcagaccagccagcttctagtgattttgatgccactaaagtctgtagaaacttaggatctttgtctgattatgctaaaacattggttcctaatttgttaaatggggaagacttgttgttattaagtgatttttctgataagctacaatcttggtgtaaatcacaagttgcagtaaaggtggtacaaaatgatattccaccagaaagcatggaggacatgcacccaatgcagcagcccttgccaacacgggcaagcactccggactccaaaatgaataactttccaaaggatgtgcagaacatggaagtgtctgcaccaatacccccaataaatcgggaaggaaatgataaggatgagactccaaagaacacagtctctagaaatggtggtttcctacagaatgcagttggtcaagacctagtccatcttggcgttgcaagaacagccagtggtggctcttcggccgtcacttccgttgttagcactggacaccagcgcagcaaaatggatcttgatccagcttccggtagcgtggacaatttcaaaacaccagaactcacaaaagaaaatggtctccagggggatgacaaaggagaaagtagtgtgtatgatgagaggcaacctaagagaaggaagcggaacattatgaatagtgagcaaatagatgaattagagaaggctctagtagatgagcctgagatgcacaggaaccctgttctattgcagggttggtcagagaagctaagtctgcagggcccagagatcacatcatcacaacttaaaaactggctgaacaatcggaaagctaagcttgctcgcattgcaaaagaaagagggacatttgagggagataatgctgataagccatctacccctcatcccggcgagtcttccgaaagtgctggggaggacaactatataccccctgcaagggtgatgactgctccatccaaaggcagactggtgagcccggacggcaatgagaaaacatcgcaggcagagctatcccccaacacgatgctgatccgcccattcacgagatccttctcactggagcccggtcggctcgtttcactagttgacagcgacgggaaggaggttggcaggggcaagatattccaagcgccagggaagagcccagccccagtggagagccgcatctgcacggttgatgtcaccgagctcaggaccgagaagtggagggagctcccacacccttctgaggcatctgggaggaccttccaggaggcggaggcgaggaatggtggaatcatgagggtctcttgggactccggcaggctgttgcctgtagtgtagcaaggcagaaacttttcgtcaggttgctgtataccgctaggcacaaggtgagcagagggagcctttggtttagggcgagagactggatcatgggattcttgggggcctaagtaacactgttaaaacctgtggttaactgtggtgtatccatcaactaattgtctcaagcaatgcaggtacggagtagttactaattttactgctggtgtttggtgtcacctgcaacgtgacgtggtaaaccaatgctgagcgatggagttgcatgtaaataattcagcactagaggaaaccaaaggggctgcataatgaactttagcttttattgtgggaaaaaaggtgatagcgttcttcatgttcgatcaattaaacagcaccagtaaattgatcatagggatgtggacttgctgaggcttgagtatatatggtgttcctcgagcttccttaaacaagcatgaagtttgtaggcacttcatcacttgttggtgagctacagtaatcttgagcccgaccctataaataacatggttcttaggctcgttaccaaaatgagcattacattacaaagcagcttttagacatatattggccaagaagatgttggagagaaatataagtctcaaatgttgagtgatatgttgcttcgtgaattattctcaaacatttaatgacgaggccacatacgaatttctccattgatttttttcactaaagacaccatacactgacaatgatgagatattggagagaaacaaaagtctcacataattttcattgtatatcatttgtgagattccgaactattgtttttatacaggtcaacatgctttagtttttgttaccatagtagttgtgagtaaattggttataacaagctaacgagcatcaaaggtcgcttcattcaagataattttatgttgctttaacaaacaaacaaacaa

SEQ ID NO: 38601 - DNA, 3784 bp, Zea Mays
gttgcagacctcccgacgccggccgtgccgcttccgtcctcgctttcctgtcaccgccgccgccgactgccacaacctctttcccatccctctcgtccccatcctctgccgccgcccccatcctcgccgcggctcggctggtgcggagcggacggacggagatccgccgacctcgggctccgctgcgtcatcgctacgccggctgaaggagtgaagatgatagacatggtgtctgctgttgaagagcttagtgggttaagctctaaagaacttaatgagatgctgaaggagtcagacaactttgttttgcagtccaaggcagaaggcggaggtccaaagcagacacttgtggacatggaaaaactcgtgtcctcgcttcctcttcatctcattgctgtatgtttggagcttcggcaaggccccgatttgacatatgtgcttcgtggcatgcgctttttgcatagtttgtctgacctagcatcccgccatactagactggagcaggttcttcttgatgatgtcaaattatctgaacaagtcatggatctgatattcttcttactttctattcttgctgaacagaagaagctgttgttttaaattaggagaataatgttggcgcttctccgcttgtgcatgcgtcacttgtagcagctagtcttcatctgctaacaagttacttctcttcccagtggcatgaacttgtccatattctgcttgcacatccaaaggttgatatctttgtggatgtggcctttgatagtttgcatgaagatgaactctctagaaatggaggcatactgtcactttctcacactatactgaagttagctgtccctgaatgtttgaagcaatcaaccgatcttgttgcttctatttccaggctcaaggcaaagatactttctattctgctgcaactttgtgaggctgaaagtgtctcttacctcgatgaagttgccactaattcaaacagcatgcggctagggcaaaccttggctctagaggttcttaatttgctgaagattgcatttggaaagaaaaaatacattacttctgattctcatgataaggttaagatttaccccatgggatctatgcttatcagtgcattgcgtcttgttgacgtcttctctgatgattcaaacttcagatcatcctttttgactaacactgttccgtttttaacccagattctagcaactcctcacggtgaatttgtttctagttggtgctctgtcaacttaccagcaattgaggaagatgcaagtctagattatgatccttttgttgcatctgaggtggcactgttagcttctaataatgtgttgactgaagctaaagctgactattcatgcccttttcgccctagcctgccttcagtggcatatgcacagacaagaacatcatgcgtagtgaaaataatagcaaatttgcatgtttttattccaaacatatgtgaagagcaagaaagggatctttttcttcagaactttcaaaagtacttggtgtctgggagttctaaactgtcagcagaccagccagcttctagtgattttgatgccactaaagtctgtagaaacttaggatctttgtctgattatgctaaaacattggttcctaatttgttaaatggggaagacttgttgttattaagtgatttttctgataagctacaatcttggtgtaaatcacaagttgcagtaaaggtggtacaaaatgatattccaccagaaagcatggaggacatgcacccaatgcagcagcccttgccaacacgggcaagcactccggactccaaaatgaataactttccaaaggatgtgcagaacatggaagtgtctgcaccaatacccccaataaatcgggaaggaaatgataaggatgagactccaaagaacacagtctctagaaatggtggtttcctacagaatgcagttggtcaagacctagtccatcttggcgttgcaagaacagccagtggtggctcttcggccgtcacttccgttgttagcactggacaccagcgcagcaaaatggatcttgatccagcttccggtagcgtggacaatttcaaaacaccagaactcacaaaagaaaatggtctccagggggatgacaaaggagaaagtagtgtgtatgatgagaggcaacctaagagaaggaagcggaacattatgaatagtgagcaaatagatgaattagagaaggctctagtagatgagcctgagatgcacaggaaccctgttctattgcagggttggtcagagaagctaagtctgcagggcccagagatcacatcatcacaacttaaaaactggctgaacaatcggaaagctaagcttgctcgcattgcaaaagaaagagggacatttgagggagataatgctgataagccatctacccctcatcccggcgagtcttccgaaagtgctggggaggacaactatataccccctgcaagggtgatgactgctccatccaaaggcagactggtgagcccggacggcaatgagaaaacatcgcaggcagagctatcccccaacacgatgctgatccgcccattcacgagatccttctcactggagcccggtcggctcgtttcactagttgacagcgacgggaaggaggttggcaggggcaagatattccaagcgccagggaagagcccagccccagtggagagccgcatctgcacggttgatgtcaccgagctcaggaccgagaagtggagggagctcccacacccttctgaggcatctgggaggaccttccaggaggcggaggcgaggaatggtggaatcatgagggtctcttgggactccggcaggctgttgcctgtagtgtagcaaggcagaaacttttcgtcaggttgctgtataccgctaggcacaaggtgagcagagggagcctttggtttagggcgagagactggatcatgggattcttgggggcctaagtaacactgttaaaacctgtggttaactgtggtgtatccatcaactaattgtctcaagcaatgcaggtacggagtagttactaattttactgctggtgtttggtgtcacctgcaacgtgacgtggtaaaccaatgctgagcgatggagttgcatgtaaataattcagcactagaggaaaccaaaggggctgcataatgaactttagcttttattgtgggaaaaaaggtgatagcgttcttcatgttcgatcaattaaacagcaccagtaaattgatcatagggatgtggacttgctgaggcttgagtatatatggtgttcctcgagcttccttaaacaagcatgaagtttgtaggcacttcatcacttgttggtgagctacagtaatcttgagcccgaccctataaataacatggttcttaggctcgttaccaaaatgagcattacattacaaagcagcttttagacatatattggccaagaagatgttggagagaaatataagtctcaaatgttgagtgatatgttgcttcgtgaattattctcaaacatttaatgacgaggccacatacgaatttctccattgatttttttcactaaagacaccatacactgacaatgatgagatattggagagaaacaaaagtctcacataattttcattgtatatcatttgtgagattccgaactattgtttttatacaggtcaacatgctttagtttttgttaccatagtagttgtgagtaaattggttataacaagctaacgagcatcaaaggtcgcttcattcaagataattttatgttgctttaacaaacaaacaaacaa

SEQ ID NO: 38602 - DNA, 3926 bp, Zea Mays
gttgcagacctcccgacgccggccgtgccgcttccgtcctcgctttcctgtcaccgccgccgccgactgccacaacctctttcccatccctctcgtccccatcctctgccgccgcccccatcctcgccgcggctcggctggtgcggagcggacggacggagatccgccgacctcgggctccgctgcgtcatcgctacgccggctgaaggagtgaagtccaaggcagaaggcggaggtccaaagcagacacttgtggacatggaaaaactcgtgtcctcgcttcctcttcatctcattgctgtatgtttggagcttcggcaaggccccgatttgacatatgtgcttcgtggcatgcgctttttgcatagtttgtctgacctagcatcccgccatactagactggagcaggttcttcttgatgatgtcaaattatctgaacaagtcatggatctgatattcttcttactttctattcttgctgaacagaagaaggtttcaatgggttaaaccaaaatgtttttattgattcatgtgtgctctgctttgaattgtcatctgatactaattctggtaacagctgttgttttaaattaggagaataatgttggcgcttctccgcttgtgcatgcgtcacttgtagcagctagtcttcatctgctaacaagttacttctcttcccagtggcatgaacttgtccatattctgcttgcacatccaaaggttgatatctttgtggatgtggcctttgatagtttgcatgaagatgtgaggctgttaaatatcagattatcatcaatggacttcggtatctttcctgttggttctttggaatctcgtcttgctcacttcatctgccaacagtgtgaagcatcattgcaatttctcttgttgttgtgccagcaaaagctgtttcgagatcggattttaagaaataaggaactctctagaaatggaggcatactgtcactttctcacactatactgaagttagctgtccctgaatgtttgaagcaatcaaccgatcttgttgcttctatttccaggctcaaggcaaagatactttctattctgctgcaactttgtgaggctgaaagtgtctcttacctcgatgaagttgccactaattcaaacagcatgcggctagggcaaaccttggctctagagattgcatttggaaagaaaaaatacattacttctgattctcatgataaggttaagatttaccccatgggatctatgcttatcagtgcattgcgtcttgttgacgtcttctctgatgattcaaacttcagatcatcctttttgactaacactgttccgtttttaacccagattctagcaactcctcacggtgaatttgtttctagttggtgctctgtcaacttaccagcaattgaggaagatgcaagtctagattatgatccttttgttgcatctgaggtggcactgttagcttctaataatgtgttgactgaagctaaagctgactattcatgcccttttcgccctagcctgccttcagtggcatatgcacagacaagaacatcatgcgtagtgaaaataatagcaaatttgcatgtttttattccaaacatatgtgaagagcaagaaagggatctttttcttcagaactttcaaaagtacttggtgtctgggagttctaaactgtcagcagaccagccagcttctagtgattttgatgccactaaagtctgtagaaacttaggatctttgtctgattatgctaaaacattggttcctaatttgttaaatggggaagacttgttgttattaagtgatttttctgataagctacaatcttggtgtaaatcacaagttgcagtaaaggtggtacaaaatgatattccaccagaaagcatggaggacatgcacccaatgcagcagcccttgccaacacgggcaagcactccggactccaaaatgaataactttccaaaggatgtgcagaacatggaagtgtctgcaccaatacccccaataaatcgggaaggaaatgataaggatgagactccaaagaacacagtctctagaaatggtggtttcctacagaatgcagttggtcaagacctagtccatcttggcgttgcaagaacagccagtggtggctcttcggccgtcacttccgttgttagcactggacaccagcgcagcaaaatggatcttgatccagcttccggtagcgtggacaatttcaaaacaccagaactcacaaaagaaaatggtctccagggggatgacaaaggagaaagtagtgtgtatgatgagaggcaacctaagagaaggaagcggaacattatgaatagtgagcaaatagatgaattagagaaggctctagtagatgagcctgagatgcacaggaaccctgttctattgcagggttggtcagagaagctaagtctgcagggcccagagatcacatcatcacaacttaaaaactggctgaacaatcggaaagctaagcttgctcgcattgcaaaagaaagagggacatttgagggagataatgctgataagccatctacccctcatcccggcgagtcttccgaaagtgctggggaggacaactatataccccctgcaagggtgatgactgctccatccaaaggcagactggtgagcccggacggcaatgagaaaacatcgcaggcagagctatcccccaacacgatgctgatccgcccattcacgagatccttctcactggagcccggtcggctcgtttcactagttgacagcgacgggaaggaggttggcaggggcaagatattccaagcgccagggaagagcccagccccagtggagagccgcatctgcacggttgatgtcaccgagctcaggaccgagaagtggagggagctcccacacccttctgaggcatctgggaggaccttccaggaggcggaggcgaggaatggtggaatcatgagggtctcttgggactccggcaggctgttgcctgtagtgtagcaaggcagaaacttttcgtcaggttgctgtataccgctaggcacaaggtgagcagagggagcctttggtttagggcgagagactggatcatgggattcttgggggcctaagtaacactgttaaaacctgtggttaactgtggtgtatccatcaactaattgtctcaagcaatgcaggtacggagtagttactaattttactgctggtgtttggtgtcacctgcaacgtgacgtggtaaaccaatgctgagcgatggagttgcatgtaaataattcagcactagaggaaaccaaaggggctgcataatgaactttagcttttattgtgggaaaaaaggtgatagcgttcttcatgttcgatcaattaaacagcaccagtaaattgatcatagggatgtggacttgctgaggcttgagtatatatggtgttcctcgagcttccttaaacaagcatgaagtttgtaggcacttcatcacttgttggtgagctacagtaatcttgagcccgaccctataaataacatggttcttaggctcgttaccaaaatgagcattacattacaaagcagcttttagacatatattggccaagaagatgttggagagaaatataagtctcaaatgttgagtgatatgttgcttcgtgaattattctcaaacatttaatgacgaggccacatacgaatttctccattgatttttttcactaaagacaccatacactgacaatgatgagatattggagagaaacaaaagtctcacataattttcattgtatatcatttgtgagattccgaactattgtttttatacaggtcaacatgctttagtttttgttaccatagtagttgtgagtaaattggttataacaagctaacgagcatcaaaggtcgcttcattcaagataattttatgttgctttaacaaacaaacaaacaa

SEQ ID NO: 38603 - DNA, 3671 bp, Zea Mays
gttgcagacctcccgacgccggccgtgccgcttccgtcctcgctttcctgtcaccgccgccgccgactgccacaacctctttcccatccctctcgtccccatcctctgccgccgcccccatcctcgccgcggctcggctggtgcggagcggacggacggagatccgccgacctcgggctccgctgcgtcatcgctacgccggctgaaggagtgaagtccaaggcagaaggcggaggtccaaagcagacacttgtggacatggaaaaactcgtgtcctcgcttcctcttcatctcattgctgtatgtttggagcttcggcaaggccccgatttgacatatgtgcttcgtggcatgcgctttttgcatagtttgtctgacctagcatcccgccatactagactggagcaggttcttcttgatgatgtcaaattatctgaacaagtcatggatctgatattcttcttactttctattcttgctgaacagaagaaggagaataatgttggcgcttctccgcttgtgcatgcgtcacttgtagcagctagtcttcatctgctaacaagttacttctcttcccagtggcatgaacttgtccatattctgcttgcacatccaaaggttgatatctttgtggatgtggcctttgatagtttgcatgaagatgaactctctagaaatggaggcatactgtcactttctcacactatactgaagttagctgtccctgaatgtttgaagcaatcaaccgatcttgttgcttctatttccaggctcaaggcaaagatactttctattctgctgcaactttgtgaggctgaaagtgtctcttacctcgatgaagttgccactaattcaaacagcatgcggctagggcaaaccttggctctagaggttcttaatttgctgaagattgcatttggaaagaaaaaatacattacttctgattctcatgataaggttaagatttaccccatgggatctatgcttatcagtgcattgcgtcttgttgacgtcttctctgatgattcaaacttcagatcatcctttttgactaacactgttccgtttttaacccagattctagcaactcctcacggtgaatttgtttctagttggtgctctgtcaacttaccagcaattgaggaagatgcaagtctagattatgatccttttgttgcatctgaggtggcactgttagcttctaataatgtgttgactgaagctaaagctgactattcatgcccttttcgccctagcctgccttcagtggcatatgcacagacaagaacatcatgcgtagtgaaaataatagcaaatttgcatgtttttattccaaacatatgtgaagagcaagaaagggatctttttcttcagaactttcaaaagtacttggtgtctgggagttctaaactgtcagcagaccagccagcttctagtgattttgatgccactaaagtctgtagaaacttaggatctttgtctgattatgctaaaacattggttcctaatttgttaaatggggaagacttgttgttattaagtgatttttctgataagctacaatcttggtgtaaatcacaagttgcagtaaaggtggtacaaaatgatattccaccagaaagcatggaggacatgcacccaatgcagcagcccttgccaacacgggcaagcactccggactccaaaatgaataactttccaaaggatgtgcagaacatggaagtgtctgcaccaatacccccaataaatcgggaaggaaatgataaggatgagactccaaagaacacagtctctagaaatggtggtttcctacagaatgcagttggtcaagacctagtccatcttggcgttgcaagaacagccagtggtggctcttcggccgtcacttccgttgttagcactggacaccagcgcagcaaaatggatcttgatccagcttccggtagcgtggacaatttcaaaacaccagaactcacaaaagaaaatggtctccagggggatgacaaaggagaaagtagtgtgtatgatgagaggcaacctaagagaaggaagcggaacattatgaatagtgagcaaatagatgaattagagaaggctctagtagatgagcctgagatgcacaggaaccctgttctattgcagggttggtcagagaagctaagtctgcagggcccagagatcacatcatcacaacttaaaaactggctgaacaatcggaaagctaagcttgctcgcattgcaaaagaaagagggacatttgagggagataatgctgataagccatctacccctcatcccggcgagtcttccgaaagtgctggggaggacaactatataccccctgcaagggtgatgactgctccatccaaaggcagactggtgagcccggacggcaatgagaaaacatcgcaggcagagctatcccccaacacgatgctgatccgcccattcacgagatccttctcactggagcccggtcggctcgtttcactagttgacagcgacgggaaggaggttggcaggggcaagatattccaagcgccagggaagagcccagccccagtggagagccgcatctgcacggttgatgtcaccgagctcaggaccgagaagtggagggagctcccacacccttctgaggcatctgggaggaccttccaggaggcggaggcgaggaatggtggaatcatgagggtctcttgggactccggcaggctgttgcctgtagtgtagcaaggcagaaacttttcgtcaggttgctgtataccgctaggcacaaggtgagcagagggagcctttggtttagggcgagagactggatcatgggattcttgggggcctaagtaacactgttaaaacctgtggttaactgtggtgtatccatcaactaattgtctcaagcaatgcaggtacggagtagttactaattttactgctggtgtttggtgtcacctgcaacgtgacgtggtaaaccaatgctgagcgatggagttgcatgtaaataattcagcactagaggaaaccaaaggggctgcataatgaactttagcttttattgtgggaaaaaaggtgatagcgttcttcatgttcgatcaattaaacagcaccagtaaattgatcatagggatgtggacttgctgaggcttgagtatatatggtgttcctcgagcttccttaaacaagcatgaagtttgtaggcacttcatcacttgttggtgagctacagtaatcttgagcccgaccctataaataacatggttcttaggctcgttaccaaaatgagcattacattacaaagcagcttttagacatatattggccaagaagatgttggagagaaatataagtctcaaatgttgagtgatatgttgcttcgtgaattattctcaaacatttaatgacgaggccacatacgaatttctccattgatttttttcactaaagacaccatacactgacaatgatgagatattggagagaaacaaaagtctcacataattttcattgtatatcatttgtgagattccgaactattgtttttatacaggtcaacatgctttagtttttgttaccatagtagttgtgagtaaattggttataacaagctaacgagcatcaaaggtcgcttcattcaagataattttatgttgctttaacaaacaaacaaacaa

SEQ ID NO: 38604 - DNA, 3084 bp, Zea Mays
atgggccccccactcgtcatattctttgggctgatgatagacatggtgtctgctgttgaagagcttagtgggttaagctctaaagaacttaatgagatgctgaaggagtcagacaactttgttttgcagtccaaggcagaaggcggaggtccaaagcagacacttgtggacatggaaaaactcgtgtcctcgcttcctcttcatctcattgctgtatgtttggagcttcggcaaggccccgatttgacatatgtgcttcgtggcatgcgctttttgcatagtttgtctgacctagcatcccgccatactagactggagcaggttcttcttgatgatgtcaaattatctgaacaagtcatggatctgatattcttcttactttctattcttgctgaacagaagaaggagaataatgttggcgcttctccgcttgtgcatgcgtcacttgtagcagctagtcttcatctgctaacaagttacttctcttcccagtggcatgaacttgtccatattctgcttgcacatccaaaggttgatatctttgtggatgtggcctttgatagtttgcatgaagatgaactctctagaaatggaggcatactgtcactttctcacactatactgaagttagctgtccctgaatgtttgaagcaatcaaccgatcttgttgcttctatttccaggctcaaggcaaagatactttctattctgctgcaactttgtgaggctgaaagtgtctcttacctcgatgaagttgccactaattcaaacagcatgcggctagggcaaaccttggctctagaggttcttaatttgctgaagattgcatttggaaagaaaaaatacattacttctgattctcatgataaggttaagatttaccccatgggatctatgcttatcagtgcattgcgtcttgttgacgtcttctctgatgattcaaacttcagatcatcctttttgactaacactgttccgtttttaacccagattctagcaactcctcacggtgaatttgtttctagttggtgctctgtcaacttaccagcaattgaggaagatgcaagtctagattatgatccttttgttgcatctgaggtggcactgttagcttctaataatgtgttgactgaagctaaagctgactattcatgcccttttcgccctagcctgccttcagtggcatatgcacagacaagaacatcatgcgtagtgaaaataatagcaaatttgcatgtttttattccaaacatatgtgaagagcaagaaagggatctttttcttcagaactttcaaaagtacttggtgtctgggagttctaaactgtcagcagaccagccagcttctagtgattttgatgccactaaagtctgtagaaacttaggatctttgtctgattatgctaaaacattggttcctaatttgttaaatggggaagacttgttgttattaagtgatttttctgataagctacaatcttggtgtaaatcacaagttgcagtaaaggtggtacaaaatgatattccaccagaaagcatggaggacatgcacccaatgcagcagcccttgccaacacgggcaagcactccggactccaaaatgaataactttccaaaggctgaacaatcggaaagctaagcttgctcgcattgcaaaagaaagagggacatttgagggagataatgctgataagccatctacccctcatcccggcgagtcttccgaaagtgctggggaggacaactatataccccctgcaagggtgatgactgctccatccaaaggcagactggtgagcccggacggcaatgagaaaacatcgcaggcagagctatcccccaacacgatgctgatccgcccattcacgagatccttctcactggagcccggtcggctcgtttcactagttgacagcgacgggaaggaggttggcaggggcaagatattccaagcgccagggaagagcccagccccagtggagagccgcatctgcacggttgatgtcaccgagctcaggaccgagaagtggagggagctcccacacccttctgaggcatctgggaggaccttccaggaggcggaggcgaggaatggtggaatcatgagggtctcttgggactccggcaggctgttgcctgtagtgtagcaaggcagaaacttttcgtcaggttgctgtataccgctaggcacaaggtgagcagagggagcctttggtttagggcgagagactggatcatgggattcttgggggcctaagtaacactgttaaaacctgtggttaactgtggtgtatccatcaactaattgtctcaagcaatgcaggtacggagtagttactaattttactgctggtgtttggtgtcacctgcaacgtgacgtggtaaaccaatgctgagcgatggagttgcatgtaaataattcagcactagaggaaaccaaaggggctgcataatgaactttagcttttattgtgggaaaaaaggtgatagcgttcttcatgttcgatcaattaaacagcaccagtaaattgatcatagggatgtggacttgctgaggcttgagtatatatggtgttcctcgagcttccttaaacaagcatgaagtttgtaggcacttcatcacttgttggtgagctacagtaatcttgagcccgaccctataaataacatggttcttaggctcgttaccaaaatgagcattacattacaaagcagcttttagacatatattggccaagaagatgttggagagaaatataagtctcaaatgttgagtgatatgttgcttcgtgaattattctcaaacatttaatgacgaggccacatacgaatttctccattgatttttttcactaaagacaccatacactgacaatgatgagatattggagagaaacaaaagtctcacataattttcattgtatatcatttgtgagattccgaactattgtttttatacaggtcaacatgctttagtttttgttaccatagtagttgtgagtaaattggttataacaagctaacgagcatcaaaggtcgcttcattcaagataattttatgttgctttaacaaacaaacaaacaa

SEQ ID NO: 38605 - DNA, 3255 bp, Zea Mays
atgggccccccactcgtcatattctttgggctgatgatagacatggtgtctgctgttgaagagcttagtgggttaagctctaaagaacttaatgagatgctgaaggagtcagacaactttgttttgcagtccaaggcagaaggcggaggtccaaagcagacacttgtggacatggaaaaactcgtgtcctcgcttcctcttcatctcattgctgtatgtttggagcttcggcaaggccccgatttgacatatgtgcttcgtggcatgcgctttttgcatagtttgtctgacctagcatcccgccatactagactggagcaggttcttcttgatgatgtcaaattatctgaacaagtcatggatctgatattcttcttactttctattcttgctgaacagaagaaggagaataatgttggcgcttctccgcttgtgcatgcgtcacttgtagcagctagtcttcatctgctaacaagttacttctcttcccagtggcatgaacttgtccatattctgcttgcacatccaaaggttgatatctttgtggatgtggcctttgatagtttgcatgaagatgtgaggctgttaaatatcagattatcatcaatggacttcggtatctttcctgttggttctttggaatctcgtcttgctcacttcatctgccaacagtgtgaagcatcattgcaatttctcttgttgttgtgccagcaaaagctgtttcgagatcggattttaagaaataaggaactctctagaaatggaggcatactgtcactttctcacactatactgaagttagctgtccctgaatgtttgaagcaatcaaccgatcttgttgcttctatttccaggctcaaggcaaagatactttctattctgctgcaactttgtgaggctgaaagtgtctcttacctcgatgaagttgccactaattcaaacagcatgcggctagggcaaaccttggctctagaggttcttaatttgctgaagattgcatttggaaagaaaaaatacattacttctgattctcatgataaggttaagatttaccccatgggatctatgcttatcagtgcattgcgtcttgttgacgtcttctctgatgattcaaacttcagatcatcctttttgactaacactgttccgtttttaacccagattctagcaactcctcacggtgaatttgtttctagttggtgctctgtcaacttaccagcaattgaggaagatgcaagtctagattatgatccttttgttgcatctgaggtggcactgttagcttctaataatgtgttgactgaagctaaagctgactattcatgcccttttcgccctagcctgccttcagtggcatatgcacagacaagaacatcatgcgtagtgaaaataatagcaaatttgcatgtttttattccaaacatatgtgaagagcaagaaagggatctttttcttcagaactttcaaaagtacttggtgtctgggagttctaaactgtcagcagaccagccagcttctagtgattttgatgccactaaagtctgtagaaacttaggatctttgtctgattatgctaaaacattggttcctaatttgttaaatggggaagacttgttgttattaagtgatttttctgataagctacaatcttggtgtaaatcacaagttgcagtaaaggtggtacaaaatgatattccaccagaaagcatggaggacatgcacccaatgcagcagcccttgccaacacgggcaagcactccggactccaaaatgaataactttccaaaggctgaacaatcggaaagctaagcttgctcgcattgcaaaagaaagagggacatttgagggagataatgctgataagccatctacccctcatcccggcgagtcttccgaaagtgctggggaggacaactatataccccctgcaagggtgatgactgctccatccaaaggcagactggtgagcccggacggcaatgagaaaacatcgcaggcagagctatcccccaacacgatgctgatccgcccattcacgagatccttctcactggagcccggtcggctcgtttcactagttgacagcgacgggaaggaggttggcaggggcaagatattccaagcgccagggaagagcccagccccagtggagagccgcatctgcacggttgatgtcaccgagctcaggaccgagaagtggagggagctcccacacccttctgaggcatctgggaggaccttccaggaggcggaggcgaggaatggtggaatcatgagggtctcttgggactccggcaggctgttgcctgtagtgtagcaaggcagaaacttttcgtcaggttgctgtataccgctaggcacaaggtgagcagagggagcctttggtttagggcgagagactggatcatgggattcttgggggcctaagtaacactgttaaaacctgtggttaactgtggtgtatccatcaactaattgtctcaagcaatgcaggtacggagtagttactaattttactgctggtgtttggtgtcacctgcaacgtgacgtggtaaaccaatgctgagcgatggagttgcatgtaaataattcagcactagaggaaaccaaaggggctgcataatgaactttagcttttattgtgggaaaaaaggtgatagcgttcttcatgttcgatcaattaaacagcaccagtaaattgatcatagggatgtggacttgctgaggcttgagtatatatggtgttcctcgagcttccttaaacaagcatgaagtttgtaggcacttcatcacttgttggtgagctacagtaatcttgagcccgaccctataaataacatggttcttaggctcgttaccaaaatgagcattacattacaaagcagcttttagacatatattggccaagaagatgttggagagaaatataagtctcaaatgttgagtgatatgttgcttcgtgaattattctcaaacatttaatgacgaggccacatacgaatttctccattgatttttttcactaaagacaccatacactgacaatgatgagatattggagagaaacaaaagtctcacataattttcattgtatatcatttgtgagattccgaactattgtttttatacaggtcaacatgctttagtttttgttaccatagtagttgtgagtaaattggttataacaagctaacgagcatcaaaggtcgcttcattcaagataattttatgttgctttaacaaacaaacaaacaa

SEQ ID NO: 38606 - DNA, 3755 bp, Zea Mays
atgggccccccactcgtcatattctttgggctgatgatagacatggtgtctgctgttgaagagcttagtgggttaagctctaaagaacttaatgagatgctgaaggagtcagacaactttgttttgcagtccaaggcagaaggcggaggtccaaagcagacacttgtggacatggaaaaactcgtgtcctcgcttcctcttcatctcattgctgtatgtttggagcttcggcaaggccccgatttgacatatgtgcttcgtggcatgcgctttttgcatagtttgtctgacctagcatcccgccatactagactggagcaggttcttcttgatgatgtcaaattatctgaacaagtcatggatctgatattcttcttactttctattcttgctgaacagaagaaggagaataatgttggcgcttctccgcttgtgcatgcgtcacttgtagcagctagtcttcatctgctaacaagttacttctcttcccagtggcatgaacttgtccatattctgcttgcacatccaaaggttgatatctttgtggatgtggcctttgatagtttgcatgaagatgtgaggctgttaaatatcagattatcatcaatggacttcggtatctttcctgttggttctttggaatctcgtcttgctcacttcatctgccaacagtgtgaagcatcattgcaatttctcttgttgttgtgccagcaaaagctgtttcgagatcggattttaagaaataaggaactctctagaaatggaggcatactgtcactttctcacactatactgaagttagctgtccctgaatgtttgaagcaatcaaccgatcttgttgcttctatttccaggctcaaggcaaagatactttctattctgctgcaactttgtgaggctgaaagtgtctcttacctcgatgaagttgccactaattcaaacagcatgcggctagggcaaaccttggctctagaggttcttaatttgctgaagattgcatttggaaagaaaaaatacattacttctgattctcatgataaggttaagatttaccccatgggatctatgcttatcagtgcattgcgtcttgttgacgtcttctctgatgattcaaacttcagatcatcctttttgactaacactgttccgtttttaacccagattctagcaactcctcacggtgaatttgtttctagttggtgctctgtcaacttaccagcaattgaggaagatgcaagtctagattatgatccttttgttgcatctgaggtggcactgttagcttctaataatgtgttgactgaagctaaagctgactattcatgcccttttcgccctagcctgccttcagtggcatatgcacagacaagaacatcatgcgtagtgaaaataatagcaaatttgcatgtttttattccaaacatatgtgaagagcaagaaagggatctttttcttcagaactttcaaaagtacttggtgtctgggagttctaaactgtcagcagaccagccagcttctagtgattttgatgccactaaagtctgtagaaacttaggatctttgtctgattatgctaaaacattggttcctaatttgttaaatggggaagacttgttgttattaagtgatttttctgataagctacaatcttggtgtaaatcacaagttgcagtaaaggtggtacaaaatgatattccaccagaaagcatggaggacatgcacccaatgcagcagcccttgccaacacgggcaagcactccggactccaaaatgaataactttccaaaggatgtgcagaacatggaagtgtctgcaccaatacccccaataaatcgggaaggaaatgataaggatgagactccaaagaacacagtctctagaaatggtggtttcctacagaatgcagttggtcaagacctagtccatcttggcgttgcaagaacagccagtggtggctcttcggccgtcacttccgttgttagcactggacaccagcgcagcaaaatggatcttgatccagcttccggtagcgtggacaatttcaaaacaccagaactcacaaaagaaaatggtctccagggggatgacaaaggagaaagtagtgtgtatgatgagaggcaacctaagagaaggaagcggaacattatgaatagtgagcaaatagatgaattagagaaggctctagtagatgagcctgagatgcacaggaaccctgttctattgcagggttggtcagagaagctaagtctgcagggcccagagatcacatcatcacaacttaaaaactggctgaacaatcggaaagctaagcttgctcgcattgcaaaagaaagagggacatttgagggagataatgctgataagccatctacccctcatcccggcgagtcttccgaaagtgctggggaggacaactatataccccctgcaagggtgatgactgctccatccaaaggcagactggtgagcccggacggcaatgagaaaacatcgcaggcagagctatcccccaacacgatgctgatccgcccattcacgagatccttctcactggagcccggtcggctcgtttcactagttgacagcgacgggaaggaggttggcaggggcaagatattccaagcgccagggaagagcccagccccagtggagagccgcatctgcacggttgatgtcaccgagctcaggaccgagaagtggagggagctcccacacccttctgaggcatctgggaggaccttccaggaggcggaggcgaggaatggtggaatcatgagggtctcttgggactccggcaggctgttgcctgtagtgtagcaaggcagaaacttttcgtcaggttgctgtataccgctaggcacaaggtgagcagagggagcctttggtttagggcgagagactggatcatgggattcttgggggcctaagtaacactgttaaaacctgtggttaactgtggtgtatccatcaactaattgtctcaagcaatgcaggtacggagtagttactaattttactgctggtgtttggtgtcacctgcaacgtgacgtggtaaaccaatgctgagcgatggagttgcatgtaaataattcagcactagaggaaaccaaaggggctgcataatgaactttagcttttattgtgggaaaaaaggtgatagcgttcttcatgttcgatcaattaaacagcaccagtaaattgatcatagggatgtggacttgctgaggcttgagtatatatggtgttcctcgagcttccttaaacaagcatgaagtttgtaggcacttcatcacttgttggtgagctacagtaatcttgagcccgaccctataaataacatggttcttaggctcgttaccaaaatgagcattacattacaaagcagcttttagacatatattggccaagaagatgttggagagaaatataagtctcaaatgttgagtgatatgttgcttcgtgaattattctcaaacatttaatgacgaggccacatacgaatttctccattgatttttttcactaaagacaccatacactgacaatgatgagatattggagagaaacaaaagtctcacataattttcattgtatatcatttgtgagattccgaactattgtttttatacaggtcaacatgctttagtttttgttaccatagtagttgtgagtaaattggttataacaagctaacgagcatcaaaggtcgcttcattcaagataattttatgttgctttaacaaacaaacaaacaa

SEQ ID NO: 38607 - DNA, 3575 bp, Zea Mays
atgggccccccactcgtcatattctttgggctgatgatagacatggtgtctgctgttgaagagcttagtgggttaagctctaaagaacttaatgagatgctgaaggagtcagacaactttgttttgcagtccaaggcagaaggcggaggtccaaagcagacacttgtggacatggaaaaactcgtgtcctcgcttcctcttcatctcattgctgtatgtttggagcttcggcaaggccccgatttgacatatgtgcttcgtggcatgcgctttttgcatagtttgtctgacctagcatcccgccatactagactggagcaggttcttcttgatgatgtcaaattatctgaacaagtcatggatctgatattcttcttactttctattcttgctgaacagaagaaggagaataatgttggcgcttctccgcttgtgcatgcgtcacttgtagcagctagtcttcatctgctaacaagttacttctcttcccagtggcatgaacttgtccatattctgcttgcacatccaaaggttgatatctttgtggatgtggcctttgatagtttgcatgaagatgaactctctagaaatggaggcatactgtcactttctcacactatactgaagttagctgtccctgaatgtttgaagcaatcaaccgatcttgttgcttctatttccaggctcaaggcaaagatactttctattctgctgcaactttgtgaggctgaaagtgtctcttacctcgatgaagttgccactaattcaaacagcatgcggctagggcaaaccttggctctagaggttcttaatttgctgaagattgcatttggaaagaaaaaatacattacttctgattctcatgataaggttaagatttaccccatgggatctatgcttatcagtgcattgcgtcttgttgacgtcttctctgatgattcaaacttcagatcatcctttttgactaacactgttccgtttttaacccagattctagcaactcctcacggtgaatttgtttctagttggtgctctgtcaacttaccagcaattgaggaagatgcaagtctagattatgatccttttgttgcatctgaggtggcactgttagcttctaataatgtgttgactgaagctaaagctgactattcatgcccttttcgccctagcctgccttcagtggcatatgcacagacaagaacatcatgcgtagtgaaaataatagcaaatttgcatgtttttattccaaacatatgtgaagagcaagaaagggatctttttcttcagaactttcaaaagtacttggtgtctgggagttctaaactgtcagcagaccagccagcttctagtgattttgatgccactaaagtctgtagaaacttaggatctttgtctgattatgctaaaacattggttcctaatttgttaaatggggaagacttgttgttattaagtgatttttctgataagctacaatcttggtgtaaatcacaagttgcagtaaaggtggtacaaaatgatattccaccagaaagcatggaggacatgcacccaatgcagcagcccttgccaacacgggcaagcactccggactccaaaatgaataactttccaaagaacatggaagtgtctgcaccaatacccccaataaatcgggaaggaaatgataaggatgagactccaaagaacacagtctctagaaatggtggtttcctacagaatgcagttggtcaagacctagtccatcttggcgttgcaagaacagccagtggtggctcttcggccgtcacttccgttgttagcactggacaccagcgcagcaaaatggatcttgatccagcttccggtagcgtggacaatttcaaaacaccagaactcacaaaagaaaatggtctccagggggatgacaaaggagaaagtagtgtgtatgatgagaggcaacctaagagaaggaagcggaacattatgaatagtgagcaaatagatgaattagagaaggctctagtagatgagcctgagatgcacaggaaccctgttctattgcagggttggtcagagaagctaagtctgcagggcccagagatcacatcatcacaacttaaaaactggctgaacaatcggaaagctaagcttgctcgcattgcaaaagaaagagggacatttgagggagataatgctgataagccatctacccctcatcccggcgagtcttccgaaagtgctggggaggacaactatataccccctgcaagggtgatgactgctccatccaaaggcagactggtgagcccggacggcaatgagaaaacatcgcaggcagagctatcccccaacacgatgctgatccgcccattcacgagatccttctcactggagcccggtcggctcgtttcactagttgacagcgacgggaaggaggttggcaggggcaagatattccaagcgccagggaagagcccagccccagtggagagccgcatctgcacggttgatgtcaccgagctcaggaccgagaagtggagggagctcccacacccttctgaggcatctgggaggaccttccaggaggcggaggcgaggaatggtggaatcatgagggtctcttgggactccggcaggctgttgcctgtagtgtagcaaggcagaaacttttcgtcaggttgctgtataccgctaggcacaaggtgagcagagggagcctttggtttagggcgagagactggatcatgggattcttgggggcctaagtaacactgttaaaacctgtggttaactgtggtgtatccatcaactaattgtctcaagcaatgcaggtacggagtagttactaattttactgctggtgtttggtgtcacctgcaacgtgacgtggtaaaccaatgctgagcgatggagttgcatgtaaataattcagcactagaggaaaccaaaggggctgcataatgaactttagcttttattgtgggaaaaaaggtgatagcgttcttcatgttcgatcaattaaacagcaccagtaaattgatcatagggatgtggacttgctgaggcttgagtatatatggtgttcctcgagcttccttaaacaagcatgaagtttgtaggcacttcatcacttgttggtgagctacagtaatcttgagcccgaccctataaataacatggttcttaggctcgttaccaaaatgagcattacattacaaagcagcttttagacatatattggccaagaagatgttggagagaaatataagtctcaaatgttgagtgatatgttgcttcgtgaattattctcaaacatttaatgacgaggccacatacgaatttctccattgatttttttcactaaagacaccatacactgacaatgatgagatattggagagaaacaaaagtctcacataattttcattgtatatcatttgtgagattccgaactattgtttttatacaggtcaacatgctttagtttttgttaccatagtagttgtgagtaaattggttataacaagctaacgagcatcaaaggtcgcttcattcaagataattttatgttgctttaacaaacaaacaaacaa

SEQ ID NO: 38608 - DNA, 3591 bp, Zea Mays
atgggccccccactcgtcatattctttgggctgatgatagacatggtgtctgctgttgaagagcttagtgggttaagctctaaagaacttaatgagatgctgaaggagtcagacaactttgttttgcagtccaaggcagaaggcggaggtccaaagcagacacttgtggacatggaaaaactcgtgtcctcgcttcctcttcatctcattgctgtatgtttggagcttcggcaaggccccgatttgacatatgtgcttcgtggcatgcgctttttgcatagtttgtctgacctagcatcccgccatactagactggagcaggttcttcttgatgatgtcaaattatctgaacaagtcatggatctgatattcttcttactttctattcttgctgaacagaagaaggagaataatgttggcgcttctccgcttgtgcatgcgtcacttgtagcagctagtcttcatctgctaacaagttacttctcttcccagtggcatgaacttgtccatattctgcttgcacatccaaaggttgatatctttgtggatgtggcctttgatagtttgcatgaagatgtgaggctgttaaatatcagattatcatcaatggacttcggtatctttcctgttggttctttggaatctcgtcttgctcacttcatctgccaacagtgtgaagcatcattgcaatttctcttgttgttgtgccagcaaaagctgtttcgagatcggattttaagaaataaggaactctctagaaatggaggcatactgtcactttctcacactatactgaagttagctgtccctgaatgtttgaagcaatcaaccgatcttgttgcttctatttccaggctcaaggcaaagatactttctattctgctgcaactttgtgaggctgaaagtgtctcttacctcgatgaagttgccactaattcaaacagcatgcggctagggcaaaccttggctctagaggttcttaatttgctgaagattgcatttggaaagaaaaaatacattacttctgattctcatgataaggttaagatttaccccatgggatctatgcttatcagtgcattgcgtcttgttgacgtcttctctgatgattcaaacttcagatcatcctttttgactaacactgttccgtttttaacccagattctagcaactcctcacggtgaatttgtttctagttggtgctctgtcaacttaccagcaattgaggaagatgcaagtctagattatgatccttttgttgcatctgaggtggcactgttagcttctaataatgtgttgactgaagctaaagctgactattcatgcccttttcgccctagcctgccttcagtggcatatgcacagacaagaacatcatgcgtagtgaaaataatagcaaatttgcatgtttttattccaaacatatgtgaagagcaagaaagggatctttttcttcagaactttcaaaagtacttggtgtctgggagttctaaactgtcagcagaccagccagcttctagtgattttgatgccactaaagtctgtagaaacttaggatctttgtctgattatgctaaaacattggttcctaatttgttaaatggggaagacttgttgttattaagtgatttttctgataagctacaatcttggtgtaaatcacaagttgcagtaaaggtggtacaaaatgatattccaccagaaagcatggaggacatgcacccaatgcagcagcccttgccaacacgggcaagcactccggactccaaaatgaataactttccaaaggatgtgcagaacatggaagtgtctgcaccaatacccccaataaatcgggaaggaaatgataaggatgagactccaaagaacacagtctctagaaatggtggtttcctacagaatgcagttggtcaagacctagtccatcttggcgttgcaagaacagccagtggtggctcttcggccgtcacttccgttgttagcactggacaccagcgcagcaaaatggatcttgatccagcttccggtagcgtggacaatttcaaaacaccagaactcacaaaagaaaatggtctccagggggatgacaaaggagaaagtagtgtgtatgatgagaggcaacctaagagaaggaagcggaacattatgaatagtgagcaaatagatgaattagagaaggctctagtagatgagcctgagatgcacaggaaccctgttctattgcagggttggtcagagaagctaagtctgcaggctgaacaatcggaaagctaagcttgctcgcattgcaaaagaaagagggacatttgagggagataatgctgataagccatctacccctcatcccggcgagtcttccgaaagtgctggggaggacaactatataccccctgcaagggtgatgactgctccatccaaaggcagactggtgagcccggacggcaatgagaaaacatcgcaggcagagctatcccccaacacgatgctgatccgcccattcacgagatccttctcactggagcccggtcggctcgtttcactagttgacagcgacgggaaggaggttggcaggggcaagatattccaagcgccagggaagagcccagccccagtggagagccgcatctgcacggttgatgtcaccgagctcaggaccgagaagtggagggagctcccacacccttctgaggcatctgggaggaccttccaggaggcggaggcgaggaatggtggaatcatgagggtctcttgggactccggcaggctgttgcctgtagtgtagcaaggcagaaacttttcgtcaggttgctgtataccgctaggcacaaggtacggagtagttactaattttactgctggtgtttggtgtcacctgcaacgtgacgtggtaaaccaatgctgagcgatggagttgcatgtaaataattcagcactagaggaaaccaaaggggctgcataatgaactttagcttttattgtgggaaaaaaggtgatagcgttcttcatgttcgatcaattaaacagcaccagtaaattgatcatagggatgtggacttgctgaggcttgagtatatatggtgttcctcgagcttccttaaacaagcatgaagtttgtaggcacttcatcacttgttggtgagctacagtaatcttgagcccgaccctataaataacatggttcttaggctcgttaccaaaatgagcattacattacaaagcagcttttagacatatattggccaagaagatgttggagagaaatataagtctcaaatgttgagtgatatgttgcttcgtgaattattctcaaacatttaatgacgaggccacatacgaatttctccattgatttttttcactaaagacaccatacactgacaatgatgagatattggagagaaacaaaagtctcacataattttcattgtatatcatttgtgagattccgaactattgtttttatacaggtcaacatgctttagtttttgttaccatagtagttgtgagtaaattggttataacaagctaacgagcatcaaaggtcgcttcattcaagataattttatgttgctttaacaaacaaacaaacaa

SEQ ID NO: 38609 - DNA, 986 bp, Zea Mays
caagactcgaccaatgacctatcgccctaggctccgtacttggtgtatatatgcatacatcgtgacattctgtggccatagattgagagagcaagaaccttgggtcgccgagccgtgcacctggatagagggtgaggtagccgctgagaaagagaacattagtcgtcatcatcattgtacgtctataccgccgaccgagccctgatcgatagctccaagcattcaccaaagaggggtcacaagaatgccaatgctaatgcctcaccctaaatcctaatccacagaaggatccatctcctaggtgtcggagtgaccggaagagtgacatcctaatggtggtactggatctgcccccttttctacaggacagcggtgggaggcgacgtcagtaaggaccagatccatctccactactgcagggagaagaaatgcatcacagttcaccaaagagtacctgaccgacagacggacaacctccgacaaaagacggcaaccagaaacctgaagtttcgccaagagttgtctagacagcctctgattcagggagccagcacgcaggacaaaatgggccatcaagttcaacgggcattaacccaccaacatatatagtagagtaatacagctactgctcaaggactcatgcaggagccaaaagcataaaaaactacgatcgaatccaagcaggcagcaacattttgttcctcgctttccaaatcgcccagcaaacagctgaaacaactattgtatgctttttttttttaatttgaggagcacaaacaggcagctatgtccagcactgcttaatattaccaggaatattatcagagttcaaacaatatgccaccacactccaaattactctagagatagggcaattgaaaaaagggtgatccacagattccacatgttcacaaaagcagcaagaagcatccccattccaattccttcttatcaaattatctttggttagaagcacattatttttc

SEQ ID NO: 38610 - DNA, 921 bp, Zea Mays
ctaggctccgtacttggtgtatatatgcatacatcgtgacattctgtggccatagattgagagagcaagaaccttgggtcgccgagccgtgcacctggatagagggtgaggtagccgctgagaaagagaacattagtcgtcatcatcattgtacgtctataccgccgaccgagccctgatcgatagctccaagcattcaccaaagaggggtcacaagaatgccaatgctaatgcctcaccctaaatcctaatccacagaaggatccatctcctaggtgtcggagtgaccggaagagtgacatcctaatggtggtactggatctgcccccttttctacaggacagcggtgggaggcgacgtcagtaaggaccagatccatctccactactgcagggagaagacggacaacctccgacaaaagacggcaaccagaaacctgaagtttcgccaagagttgtctagacagcctctgattcagggagccagcacgcaggacaaaatgggccatcaagttcaacgggcattaacccaccaacatatatagtagagtaatacagctactgctcaaggactcatgcaggagccaaaagcataaaaaactacgatcgaatccaagcaggcagcaacattttgttcctcgctttccaaatcgcccagcaaacagctgaaacaactattgtatgctttttttttttaatttgaggagcacaaacaggcagctatgtccagcactgcttaatattaccaggaatattatcagagttcaaacaatatgccaccacactccaaattactctagagatagggcaattgaaaaaagggtgatccacagattccacatgttcacaaaagcagcaagaagcatccccattccaattccttcttatcaaattatctttggttagaagcacattatttttc

SEQ ID NO: 38611 - DNA, 664 bp, Zea Mays
gtgacattctgtggccatagattgagagagcaagaaccttgggtcgccgagccgtgcacctggatagagggtgaggtagccgctgagaaagagaacattagtcgtcatcatcattaaggatccatctcctaggtgtcggagtgaccggaagagtgacatcctaatggtggtactggatctgcccccttttctacaggacagcggtgggaggcgacgtcagtaaggaccagatccatctccactactgcagggagaagtttctctttctacctggttgattacccgcaccattccatcctgaatcatcgcgtgcgttgacttttctgtacacgaggaacgattactgcatgagtggatgcaaaataagtcgttttgaggccatccacctgcatctgtatatacgccagatatggtcgtacctggccggccaggctcgcgtgggactggctgtgcgggcgcagtaaaccaatcaggcactttgtgttcggggtcacttggctaatgtagctaaaaactgcagattttacggcaaacttcatgaggtgtcagtgcttaactgcttaagttagagtgctacctttagagtgcaatggagtgtcatctgcacaaatgatctatagtgtggttataacaatgtaaactgcagagtttcatgattagaaat

SEQ ID NO: 38612 - DNA, 2503 bp, Zea Mays
ctctcatcccatggcctggcgccctggccgcacgtcctgacgatcgacgctagcgaacaagcggacgagtttcccgggtcacgcatgtctcgtcgtctcgttggaccacaaccgtcgccgggcaagcagtacaagtacgccccacatgcttctctctcggagttggggacaggacagcctaccgaaatctctctgctcggtcttccttcactctctctcatagtctcatgcatgcatggctcccactgcccatcatcaggcagcgcgggacgatgagctggagaagagccgccgcaagcccggcggcggcggcaaggcggcggcggtccggtgccacccggtcctggcggaggagcgcaaggcgtccatcaggggcgtggtgggcgacctgctggccatggcgggcggcggccggaggagcctcatctcgctcggcgtcggcgacgcgtcctcccacgcatgcttccgccgcggcggggagttcgccgccgaggccgtcgcccacgccgccttgtccggcgccttcgactgctatgcgccgtccttcggcttccccgacgcccgccgcgcggtcgccgcccacctgtcgaccggcgcggtgcaccgcacgcacgaggccgacgtgttcatgacggcgggcggcacgggcgcgatcaccgccatcgccacggtgctcggcggcgcgccgggggccaacgtcctgctgccgcgcccgggcttcgcgccgtacgaggccgcctgcgaggtggccggcgccgagccccggttctacgacctgctgccgcggcgcggctgggaggccgacctcgccggcgtgcgcgcgctggccgacgccgccacggccgccctcgtcgtcatcaaccccaacaacccgtgcggcgccgtctactccgctcaccacctccgccagcttgctgaaaccgcaagagagttggggattcccatcgtagcagacgaggtgtacgcacacatggtcttcggcggcagcaggttcgtgcccatggcctccttggcgcacatcgcgccggtcgtcagcatcggagctctgtccaagaggttcatgctgccaggatggcgtctcggttggctggccttctgtgatcccaacggcgcgctcaagcatggctgcgaccgagatgctgctcaacgtgacttctggccctgcctccatagtccaggcggcggttcccaagatcctttcagctgaacaccatgagttccataggaatgttgttcacctgctcgagtctgcagctgatgctctgtacagaagagtgaaccaaatcgaagccctgcggtgctactccaagcctgaaggctcaatgtttatgatggttgagatcaacacttcaattctacatggcgtcgccaacgacatggactttgctcgtgagttgatcaaagaagaatgtgtcctggttctacctggttctgtcattgggttgaagaactgggttaggatatttttcggagcacctgttagtttaatactagaagcttgcgacaggattgagatgttctgccgaaggaggacgctcaagcaaaacaactgaagagctgaaaatgttttgaaaccaggaagtagggtttttgttagcccagtaacatatatatacagcttcgatttattttccaatgcacattctgaggtttgcatatagaaaactgagaacagatgcttgtctatagttaaaatatatgttatacataattccaggaaatggtgtaaacatttatcatttctttacttgtgccttctacttcacagatgcattaaggttattgtctttttattgaacagacagcaagcaaaagaagcaagctaacgctaaattcatatactgacagttttttatctgttcaatgcccctcaacttcaaacttcagaatagcacaagctccaaatgacatttgttgaaaactacagggaggtgaaaagatatactgctagttctgacattacagcgaagggtaatccaatcatttgtgacctaacattaccagtcaatgtactacagcagtctgacaaggccaaaaaaacacagaatctatgaaaaaaaaaagagttttttgaattgtgctaaaactgacaaatacaaattgccaactactctaaactctatgcaaatgaagtgagaatagaaatggttatacttcaaggaactacaaaacttccgattagtagcaatgatatactgtcagtttatactattactgtgtttttattcatgtagctcttgttggtttttaccgtagactctacaccctgctttgttgatgttggatggtttgacaaggttctgaaggttgtacctgtcttgaaaaacaaaagcctctattctcaacgatgaaaaatgttttgtccgtttaatgtgcaatggaatggcaaccactttaaccagaccaacaggggcctgtggagcagccaacagacataactctaagctactaagcatacattaaatattttagaatattctttataatttgtttacaaactacc

SEQ ID NO: 38613 - DNA, 2548 bp, Zea Mays
ctctcatcccatggcctggcgccctggccgcacgtcctgacgatcgacgctagcgaacaagcggacgagtttcccgggtcacgcatgtctcgtcgtctcgttggaccacaaccgtcgccgggcaagcagtacaagtacgccccacatgcttctctctcggagttggggacaggacagcctaccgaaatctctctgctcggtcttccttcactctctctcatagtctcatgcatgcatggctcccactgcccatcatcaggcagcgcgggacgatgagctggagaagagccgccgcaagcccggcggcggcggcaaggcggcggcggtccggtgccacccggtcctggcggaggagcgcaaggcgtccatcaggggcgtggtgggcgacctgctggccatggcgggcggcggccggaggagcctcatctcgctcggcgtcggcgacgcgtcctcccacgcatgcttccgccgcggcggggagttcgccgccgaggccgtcgcccacgccgccttgtccggcgccttcgactgctatgcgccgtccttcggcttccccgacgcccgccgctgctgcgccgtctgccgtgccgaaccaaccgaccaaacaaacagcgcggtcgccgcccacctgtcgaccggcgcggtgcaccgcacgcacgaggccgacgtgttcatgacggcgggcggcacgggcgcgatcaccgccatcgccacggtgctcggcggcgcgccgggggccaacgtcctgctgccgcgcccgggcttcgcgccgtacgaggccgcctgcgaggtggccggcgccgagccccggttctacgacctgctgccgcggcgcggctgggaggccgacctcgccggcgtgcgcgcgctggccgacgccgccacggccgccctcgtcgtcatcaaccccaacaacccgtgcggcgccgtctactccgctcaccacctccgccagcttgctgaaaccgcaagagagttggggattcccatcgtagcagacgaggtgtacgcacacatggtcttcggcggcagcaggttcgtgcccatggcctccttggcgcacatcgcgccggtcgtcagcatcggagctctgtccaagaggttcatgctgccaggatggcgtctcggttggctggccttctgtgatcccaacggcgcgctcaagcatggctgcgaccgagatgctgctcaacgtgacttctggccctgcctccatagtccaggcggcggttcccaagatcctttcagctgaacaccatgagttccataggaatgttgttcacctgctcgagtctgcagctgatgctctgtacagaagagtgaaccaaatcgaagccctgcggtgctactccaagcctgaaggctcaatgtttatgatggttgagatcaacacttcaattctacatggcgtcgccaacgacatggactttgctcgtgagttgatcaaagaagaatgtgtcctggttctacctggttctgtcattgggttgaagaactgggttaggatatttttcggagcacctgttagtttaatactagaagcttgcgacaggattgagatgttctgccgaaggaggacgctcaagcaaaacaactgaagagctgaaaatgttttgaaaccaggaagtagggtttttgttagcccagtaacatatatatacagcttcgatttattttccaatgcacattctgaggtttgcatatagaaaactgagaacagatgcttgtctatagttaaaatatatgttatacataattccaggaaatggtgtaaacatttatcatttctttacttgtgccttctacttcacagatgcattaaggttattgtctttttattgaacagacagcaagcaaaagaagcaagctaacgctaaattcatatactgacagttttttatctgttcaatgcccctcaacttcaaacttcagaatagcacaagctccaaatgacatttgttgaaaactacagggaggtgaaaagatatactgctagttctgacattacagcgaagggtaatccaatcatttgtgacctaacattaccagtcaatgtactacagcagtctgacaaggccaaaaaaacacagaatctatgaaaaaaaaaagagttttttgaattgtgctaaaactgacaaatacaaattgccaactactctaaactctatgcaaatgaagtgagaatagaaatggttatacttcaaggaactacaaaacttccgattagtagcaatgatatactgtcagtttatactattactgtgtttttattcatgtagctcttgttggtttttaccgtagactctacaccctgctttgttgatgttggatggtttgacaaggttctgaaggttgtacctgtcttgaaaaacaaaagcctctattctcaacgatgaaaaatgttttgtccgtttaatgtgcaatggaatggcaaccactttaaccagaccaacaggggcctgtggagcagccaacagacataactctaagctactaagcatacattaaatattttagaatattctttataatttgtttacaaactacc

SEQ ID NO: 38614 - DNA, 4150 bp, Zea Mays
aaatcgttaaaagttattcgatatacattttcacagttccatctaaaagtcactaaaaacaggtctagtggtgctttcaattttgcactgcgagaaagtcagttttttgaaaaaagctgctttcttgatccagtcctttgatttagcttttgacttttaggggataaaagtcaaaaccaaaagtcaaaccaaacacactcttaatctttgtgagtacgaatgatctatatctatatgatataggtacgctcaggagtgacagacgagagactattttttttggtgtgtgtatgatatgcgatatagccggtggcggtggggttgccatctctatctcggcgtgcagtcagtcagtcacagactccagcgagcgagggaccaaaaccctagctgaaccctcccggcccgcgcagcaactgcgtccatggaggtggacccctcgccgtcgtcgcgctcgcccaggccgccgcctccgccgctggcggcgatgccgagctacttcgacccggagtcgtccggccgtcgggaggagtaccgccgctacaggaagaggttgtcttcttcaaatgtctctcctctgctgggaagatcactctccaagacctctggaccaaggctgttatatgatggagaaagcatcccaagacagcctaatgccggtttactccttgaagacataaagcaggaagctgccgattattccaacgtagaaagcttggatggattgagactgttcggttcgccgaaaaggacatctctcgatggcggttctgcatcaggcgcagcttacagttcgggcaggcaagcagtgaggcagacgctgaagccagtcaaactggaggacgatatgtatgtgccacatgaaggagaaacgccttctacaatgtttgcaactctccttgattctgggatccaaggtttgatgcacttccctgatgtaattcaacaatttgagaggacatgtcgaaatgcttcggagtcaatcagatctgctgcaactggaaagcttcgtgtggtggaagagaaacttatgcagcaaaatgctcaacttttactggacgaagctgcttcctggtcacttctttggcacatatatggcaaagaacatgaggagctttctggagagctgttggtgccgccaattacatctcatcaggaggcttgccgctttgttgcagcagacattacagcacaactgtgtctgcggatcatactttggcttgaaggtcttgcttctgaagctcttgatttggagaagaaggtgagaggacctcatgttggttcgtacctaccaagttctggtgtttggcaccgtacacagaggtacctaaaaaggaacaatgctgattctactatagtgaagcatgtggattttgatgctccaactcgtgaaggggcccaacttcttcctgatgacaagaagcaagatgaattgcttctagaagatatatggactcttttaagagcaggaagattagaagaggcatctgacttgtgccgttctgctggccaggcatggagagttgccactctttgtccttttggcggcataaatatgttcccttccctgaatgcattgcacaaaaatggaaagtacagaacactacaagccatggaattagaaagtggtgttgggcggcagtggcgtctttggaaatgggcatcatattgtgcttcagagaaaatcgctgagcaagatggaggccgttatgagatggctgtatatgctttacaatgcagtaacttaaagcgtgtcttgccaatctgtactgactgggagtcagcttgttgggcaatggcaagatcctggctagatgttcaagtggatctagaattatctcagtaccaaacaagtagaccagaaaagcaacttgatgacgacatgaatggagcccaaagttcagttggtccagaaagttggccataccatgttcttgatcagcaacctcatgatttaactgctcttctgcagaaactccactcaagtgaccttgttcatgaaactgtctctcgagcatgccgagagcagcatcgacaaattcagatgaatctcatgagtggaaatatatctcatcttcttgaccttctatggtcatggttatcacctgctgaagagaaccataataatactgcaaggccccttgatgaccctgagatgatacggttcggggcgcatattgttcttgtgctgaggcaccttttcagtgatgggatggatgatgagttagatgaaaaactggttactgtcggtgatctcatcatcaacatgtacgtgaggtatttgttctcagaggatcaagaggagttggttggaatatatgcctcacagcttcaacatgacctttgcattactttgtttgtagaaatgatggaactaaggttaaatagcagtttgcatactatgtacaagctcttcctttctgctgtggagtatctgccattctcatctgataatgtatccaaggcttgttttgaagagatcatcgagagggtgctttcaagatctcggcaaacaaaacccactaagtatgatggggatttctctgatgttgcgcatcaacatcacctgcaatcacttcaaaaggctatggttattcagtggctttgcttcacaccaccatcctcgattccagactttcaaatgatcagttggaagcttctgatacgggcattgacacatagcaatacactgttcagggagttttctctgatatcaatgaggagagtccctgagctaccagcagggccacacaagttgcttgccattttagctgaaccgttaaagcaaaaagaaaatttaatttcacgggaagatccggaggtatctgataacttgccggagtttgaagattggcatgaatattactcccttgacgcgacttaccgcagttggcttaaaattgagatgatgaatgccgctgtttctcctgagatgctttcggcagaggaaaagggtcaagctgttgctgcagctaaagaaacactgaacttggcatgttcgttactacgcagggatggaagaccatggctgtatgctgtcgagagcagtccatttgaatcccccgatgttattttccttgagctgcatgcttctgcaatgctctgcctaccttctggagaatgtatgttaccagatgcaacatcatgcacagctttgacaagtgcactatattcaactgtcagtgaagatgatgtgctgcatcgcctgttgaaggtggatgtccaggtctcttctagagacccctgctgtattgaagtcgctcttcgctgcttagcagcagaaggtgatggatatgggcttcatgaagccaacgatggaggtcttcttgctgcagtcatggctgctggctttaaaggtgaactcagtcggttccaacctggagtttcgatggcaatttcacggcttgatgcttggtattctgaccggagtggttccgtggagagcaccgctgcttacataattcgagggctgtgtcggaggtgctgccttcctgaaacaattctaagatctatgcaggcatgtatcgcactctccgcggctggtgatgatctagattactctctagataaatgtgacgaacttgttgagttagttggttcagccgagtctggaatgatgcatttgttcagccagcagcagttgcaggagttcctgattttcgagagggaatatctcatatgtacaatggagtttgaggaggaccggttgccttgtgatggctaagctttttccccacttgctgactaatccatgagacatgaccggcatgtgcattttgtggcgccgtgacccaagaacctgctgtgatgtatcgctacaccatttcaaagcgaaaagatggaatttagtgcgtaacgtggttctgcccgtttgtgcacgagaattggcccgttttggagagtcaatataagattattcaagtcgaaatccaagatttttgttcatgataaaaacaatgttcggcaagcctttttgtcccgcccgtgctacgcgcactccgcctcggctgcttttgcatcgatccgatctgccgtccctggacacgctgcagctgacaagggtcaccggcagcatcctctcaagtcaactcccagaacgacttcgtttcctgacttctgagcactgcctggacgcagtatgacaagccga

SEQ ID NO: 38615 - DNA, 5361 bp, Zea Mays
aaatcgttaaaagttattcgatatacattttcacagttccatctaaaagtcactaaaaacaggtctagtggtgctttcaattttgcactgcgagaaagtcagttttttgaaaaaagctgctttcttgatccagtcctttgatttagcttttgacttttaggggataaaagtcaaaaccaaaagtcaaaccaaacacactcttaatctttgtgagtacgaatgatctatatctatatgatataggtacgctcaggagtgacagacgagagactattttttttggtgtgtgtatgatatgcgatatagccggtggcggtggggttgccatctctatctcggcgtgcagtcagtcagtcacagactccagcgagcgagggaccaaaaccctagctgaaccctcccggcccgcgcagcaactgcgtccatggaggtggacccctcgccgtcgtcgcgctcgcccaggccgccgcctccgccgctggcggcgatgccgagctacttcgacccggagtcgtccggccgtcgggaggagtaccgccgctacaggaagaggttgtcttcttcaaatgtctctcctctgctgggaagatcactctccaagacctctggaccaaggctgttatatgatggagaaagcatcccaagacagcctaatgccggtttactccttgaagacataaagcaggaagctgccgattattccaacgtagaaagcttggatggattgagactgttcggttcgccgaaaaggacatctctcgatggcggttctgcatcaggcgcagcttacagttcgggcaggcaagcagtgaggcagacgctgaagccagtcaaactggaggacgatatgtatgtgccacatgaaggagaaacgccttctacaatgtttgcaactctccttgattctgggatccaaggtttgatgcacttccctgatgtaattcaacaatttgagaggacatgtcgaaatgcttcggagtcaatcagatctgctgcaactggaaagcttcgtgtggtggaagagaaacttatgcagcaaaatgctcaacttttactggacgaagctgcttcctggtcacttctttggcacatatatggcaaagaacatgaggagctttctggagagctgttggtgccgccaattacatctcatcaggaggcttgccgctttgttgcagcagacattacagcacaactgtgtctgcggatcatactttggcttgaaggtcttgcttctgaagctcttgatttggagaagaaggtgagaggacctcatgttggttcgtacctaccaagttctggtgtttggcaccgtacacagaggtacctaaaaaggaacaatgctgattctactatagtgaagcatgtggattttgatgctccaactcgtgaaggggcccaacttcttcctgatgacaagaagcaagatgaattgcttctagaagatatatggactcttttaagagcaggaagattagaagaggcatctgacttgtgccgttctgctggccaggcatggagagttgccactctttgtccttttggcggcataaatatgttcccttccctgaatgcattgcacaaaaatggaaagtacagaacactacaagccatggaattagaaagtggtgttgggcggcagtggcgtctttggaaatgggcatcatattgtgcttcagagaaaatcgctgagcaagatggaggccgttatgagatggctgtatatgctttacaatgcagtaacttaaagcgtgtcttgccaatctgtactgactgggagtcagcttgttgggcaatggcaagatcctggctagatgttcaagtggatctagaattatctcagtaccaaacaagtagaccagaaaagcaacttgatgacgacatgaatggagcccaaagttcagttggtccagaaagttggccataccatgttcttgatcagcaacctcatgatttaactgctcttctgcagaaactccactcaagtgaccttgttcatgaaactgtctctcgagcatgccgagagcagcatcgacaaattcagatgaatctcatgagtggaaatatatctcatcttcttgaccttctatggtcatggttatcacctgctgaagagaaccataataatactgcaaggccccttgatgaccctgagatgatacggttcggggcgcatattgttcttgtgctgaggcaccttttcagtgatgggatggatgatgagttagatgaaaaactggttactgtcggtgatctcatcatcaacatgtacgtgaggtatttgttctcagaggatcaagaggagttggttggaatatatgcctcacagcttcaacatgacctttgcattactttgtttgtagaaatgatggaactaaggttaaatagcagtttgcatactatgtacaagctcttcctttctgctgtggagtatctgccattctcatctgataatgtatccaaggcttgttttgaagagatcatcgagagggtgctttcaagatctcggcaaacaaaacccactaagtatgatggggatttctctgatgttgcgcatcaacatcacctgcaatcacttcaaaaggctatggttattcagtggctttgcttcacaccaccatcctcgattccagactttcaaatgatcagttggaagcttctgatacgggcattgacacatagcaatacactgttcagggagttttctctgatatcaatgaggagagtccctgagctaccagcagggccacacaagttgcttgccattttagctgaaccgttaaagcaaaaagaaaatttaatttcacgggaagatccggaggtatctgataacttgccggagtttgaagattggcatgaatattactcccttgacgcgacttaccgcagttggcttaaaattgagatgatgaatgccgctgtttctcctgagatgctttcggcagaggaaaagggtcaagctgttgctgcagctaaagaaacactgaacttggcatgttcgttactacgcacaaaatcaggggatggaagaccatggctgtatgctgtcgagagcagtccatttgaatcccccgatgttattttccttgagctgcatgcttctgcaatgctctgcctaccttctggagaatgtatgttaccagatgcaacatcatgcacagctttgacaagtgcactatattcaactgtcagtgaagatgatgtgctgcatcgcctgttgaaggtggatgtccaggtctcttctagagacccctgctgtattgaagtcgctcttcgctgcttagcagcagaaggtgatggatatgggcttcatgaagccaacgatggaggtcttcttgctgcagtcatggctgctggctttaaaggtgaactcagtcggttccaacctggagtttcgatggcaatttcacggcttgatgcttggtattctgaccggagtggttccgtggagagcaccgctgcttacataattcgagggctgtgtcggaggtgctgccttcctgaaacaattctaagatctatgcaggcatgtatcgcactctccgcggctggtgatgatctagattactctctagataaatgtgacgaacttgttgagttagttggttcagccgagtctggaatgatgcatttgttcagccagcagcagttgcaggagttcctgattttcgagagggaatatctcatatgtacaatggagtttgaggaggaccggttgccttgtgatggctaagctttttccccacttgctgactaatccatgagacatgaccggcatgtgcattttgtggcgccgtgacccaagaacctgctgtgatgtatcgctacaccatttcaaagcgaaaagatggaatttagtgcgtaacgtggttctgcccgtttgtgcacgagaattggcccgttttggagagtcaatataagattattcaagtcgaaatccaagatttttgttcatgataaaaacaatgttcggcaagcctttttgtcccgcccgtgctacgcgcactccgcctcggctgcttttgcatcgatccgatctgccgtccctggacacgctgcagctgacaagggtcaccggcagttccatcccaaaggctgcgaaggcgcacacaagccaagttctactcaacatcgttccctaatcatggtagtaagcacactctgcagccgcttgccacttctacccaacatcatcgtcctcctcttgttcacaaccatttccgactccacgaacagcaacagcgatctcaatgcactcttgtcattcaaatccctcataacaaaggacccaatgggtgcactgtcatcttgggatggggacgcttctaacaggagcgctcctcatttctgccggtggaacggcgtgacgtgcagcagcgaccagcacggcagccatgtcactgccttgcgcctgcgagccttcggtctggaaggcaacatctcccagtcgcttgggaatcttagccacctccaaaccctggatctgtcgaacaacaacctagagggcgagataccttccagtatcggtaacttgtttgctctccattttctcaacctaagtgttaaccacctgtccgggaacgttcctcagtccatcggccgtctttccgaactcgaaattctgaatttccgcgacaatgacatcgtaggaagcatcccttcttcagtgctgaaccttacaggactcacaatgcttagtgccaccgaaaactacatgacagggaggattccagattggttggggaacttgacagatctgacagatttgaacttggcatggaataacttcagtggacagatcccacaagctttaggtttgatgcacttccctgatgtaattcaacaatttgagaggacatgtcgaaatgcttcggagtcaatcagatctgctgcaactggaaagcttcgtgtggtggaagagaaacttatgcagcaaaatgctcaacttttactggacgaagctgcttcctggtcactttggcacatatatggcaaagaacatgaggagctttctggagagctgttggtgccgccaattacatctcatcaggaggcttgccgctttgttgcagcagacattacagcacaactgtgtctgcggatcatactttggcttgaaggtcttgcttctgaagctcttgatttggagaagaaggtgagaggacctcatgttggttcgtacctaccaagttctggtgtttggcaccgtacacagaggtacctaaaaaggaacaatgctgattctactatagtgaagcatgtggattttgatgctccaactcgtgaaggggcccaacttcttcctgatgacaagttggttccatttgacctttcttggaccgttctttcacttatttgaac

SEQ ID NO: 38616 - DNA, 8635 bp, Zea Mays
aaatcgttaaaagttattcgatatacattttcacagttccatctaaaagtcactaaaaacaggtctagtggtgctttcaattttgcactgcgagaaagtcagttttttgaaaaaagctgctttcttgatccagtcctttgatttagcttttgacttttaggggataaaagtcaaaaccaaaagtcaaaccaaacacactcttaatctttgtgagtacgaatgatctatatctatatgatataggtacgctcaggagtgacagacgagagactattttttttggtgtgtgtatgatatgcgatatagccggtggcggtggggttgccatctctatctcggcgtgcagtcagtcagtcacagactccagcgagcgagggaccaaaaccctagctgaaccctcccggcccgcgcagcaactgcgtccatggaggtggacccctcgccgtcgtcgcgctcgcccaggccgccgcctccgccgctggcggcgatgccgagctacttcgacccggagtcgtccggccgtcgggaggagtaccgccgctacaggaagaggttgtcttcttcaaatgtctctcctctgctgggaagatcactctccaagacctctggaccaaggctgttatatgatggagaaagcatcccaagacagcctaatgccggtttactccttgaagacataaagcaggaagctgccgattattccaacgtagaaagcttggatggattgagactgttcggttcgccgaaaaggacatctctcgatggcggttctgcatcaggcgcagcttacagttcgggcaggcaagcagtgaggcagacgctgaagccagtcaaactggaggacgatatgtatgtgccacatgaaggagaaacgccttctacaatgtttgcaactctccttgattctgggatccaaggtttgatgcacttccctgatgtaattcaacaatttgagaggacatgtcgaaatgcttcggagtcaatcagatctgctgcaactggaaagcttcgtgtggtggaagagaaacttatgcagcaaaatgctcaacttttactggacgaagctgcttcctggtcacttctttggcacatatatggcaaagaacatgaggagctttctggagagctgttggtgccgccaattacatctcatcaggaggcttgccgctttgttgcagcagacattacagcacaactgtgtctgcggatcatactttggcttgaaggtcttgcttctgaagctcttgatttggagaagaaggtgagaggacctcatgttggttcgtacctaccaagttctggtgtttggcaccgtacacagaggtacctaaaaaggaacaatgctgattctactatagtgaagcatgtggattttgatgctccaactcgtgaaggggcccaacttcttcctgatgacaagaagcaagatgaattgcttctagaagatatatggactcttttaagagcaggaagattagaagaggcatctgacttgtgccgttctgctggccaggcatggagagttgccactctttgtccttttggcggcataaatatgttcccttccctgaatgcattgcacaaaaatggaaagtacagaacactacaagccatggaattagaaagtggtgttgggcggcagtggcgtctttggaaatgggcatcatattgtgcttcagagaaaatcgctgagcaagatggaggccgttatgagatggctgtatatgctttacaatgcagtaacttaaagcgtgtcttgccaatctgtactgactgggagtcagcttgttgggcaatggcaagatcctggctagatgttcaagtggatctagaattatctcagtaccaaacaagtagaccagaaaagcaacttgatgacgacatgaatggagcccaaagttcagttggtccagaaagttggccataccatgttcttgatcagcaacctcatgatttaactgctcttctgcagaaactccactcaagtgaccttgttcatgaaactgtctctcgagcatgccgagagcagcatcgacaaattcagatgaatctcatgagtggaaatatatctcatcttcttgaccttctatggtcatggttatcacctgctgaagagaaccataataatactgcaaggccccttgatgaccctgagatgatacggttcggggcgcatattgttcttgtgctgaggcaccttttcagtgatgggatggatgatgagttagatgaaaaactggttactgtcggtgatctcatcatcaacatgtacgtgaggtatttgttctcagaggatcaagaggagttggttggaatatatgcctcacagcttcaacatgacctttgcattactttgtttgtagaaatgatggaactaaggttaaatagcagtttgcatactatgtacaagctcttcctttctgctgtggagtatctgccattctcatctgataatgtatccaaggcttgttttgaagagatcatcgagagggtgctttcaagatctcggcaaacaaaacccactaagtatgatggggatttctctgatgttgcgcatcaacatcacctgcaatcacttcaaaaggctatggttattcagtggctttgcttcacaccaccatcctcgattccagactttcaaatgatcagttggaagcttctgatacgggcattgacacatagcaatacactgttcagggagttttctctgatatcaatgaggagagtccctgagctaccagcagggccacacaagttgcttgccattttagctgaaccgttaaagcaaaaagaaaatttaatttcacgggaagatccggaggtatctgataacttgccggagtttgaagattggcatgaatattactcccttgacgcgacttaccgcagttggcttaaaattgagatgatgaatgccgctgtttctcctgagatgctttcggcagaggaaaagggtcaagctgttgctgcagctaaagaaacactgaacttggcatgttcgttactacgcagggatggaagaccatggctgtatgctgtcgagagcagtccatttgaatcccccgatgttattttccttgagctgcatgcttctgcaatgctctgcctaccttctggagaatgtatgttaccagatgcaacatcatgcacagctttgacaagtgcactatattcaactgtcagtgaagatgatgtgctgcatcgcctgttgaaggtggatgtccaggtctcttctagagacccctgctgtattgaagtcgctcttcgctgcttagcagcagaaggtgatggatatgggcttcatgaagccaacgatggaggtcttcttgctgcagtcatggctgctggctttaaaggtgaactcagtcggttccaacctggagtttcgatggcaatttcacggcttgatgcttggtattctgaccggagtggttccgtggagagcaccgctgcttacataattcgagggctgtgtcggaggtgctgccttcctgaaacaattctaagatctatgcaggcatgtatcgcactctccgcggctggtgatgatctagattactctctagataaatgtgacgaacttgttgagttagttggttcagccgagtctggaatgatgcatttgttcagccagcagcagttgcaggagttcctgattttcgagagggaatatctcatatgtacaatggagtttgaggaggaccggttgccttgtgatggctaagctttttccccacttgctgactaatccatgagacatgaccggcatgtgcattttgtggcgccgtgacccaagaacctgctgtgatgtatcgctacaccatttcaaagcgaaaagatggaatttagtgcgtaacgtggttctgcccgtttgtgcacgagaattggcccgttttggagagtcaatataagattattcaagtcgaaatccaagatttttgttcatgataaaaacaatgttcggcaagcctttttgtcccgcccgtgctacgcgcactccgcctcggctgcttttgcatcgatccgatctgccgtccctggacacgctgcagctgacaagggtcaccggcagttccatcccaaaggctgcgaaggcgcacacaagccaagttctactcaacatcgttccctaatcatggtagtaagcacactctgcagccgcttgccacttctacccaacatcatcgtcctcctcttgttcacaaccatttccgactccacgaacagcaacagcgatctcaatgcactcttgtcattcaaatccctcataacaaaggacccaatgggtgcactgtcatcttgggatggggacgcttctaacaggagcgctcctcatttctgccggtggaacggcgtgacgtgcagcagcgaccagcacggcagccatgtcactgccttgcgcctgcgagccttcggtctggaaggcaacatctcccagtcgcttgggaatcttagccacctccaaaccctggatctgtcgaacaacaacctagagggcgagataccttccagtatcggtaacttgtttgctctccattttctcaacctaagtgttaaccacctgtccgggaacgttcctcagtccatcggccgtctttccgaactcgaaattctgaatttccgcgacaatgacatcgtaggaagcatcccttcttcagtgctgaaccttacaggactcacaatgcttagtgccaccgaaaactacatgacagggaggattccagattggttggggaacttgacagatctgacagatttgaacttggcatggaataacttcagtggacagatcccacaagctttaggtaagctacctaaccttgctagattgactatgcaaggtaatcaattggaaggtttaatctctcctacactgtttaacatttcatctcttgagaatttaaatctcggctataacaagctttcaggttctctacctccagatattggatttacacttccaaatattgtagcatttagtgtatgctataacaaatttgagggtccagttccatcctccctgtccaatatttctgtgctccaacagctcatcctccacgggaacagatttcatggccgaattccacctaatattggtgtccacggcagcttaactaatcttgaattaggcaacaatcagcttcaagtcgtggatactaaagattgggattttctaacccctttggtcaattgcagtcatctgaaatatcttaatcttgagctaaataacatttctggcattttgccaaatgctgtttctaatctctcctatgagctggaagcgttactgatgggtggaaaccaaataaccgggaccgtaccttcggggataggtaggcttcaaaagctccaaatactagatctgtcagataacctgtttacaggcgccgtaccttcgagtataggtaaactctccagcctagacagccttgtgctattcagtaataaatttgacggggagatcccttcatcacttggaaatcttacaaaactaaccgagctagttttacattccaatgacctgcatgggagcatgcctccaagccttggtaatatgacaatcttagaatccatcgatctttcatataaccgcctcagtggccaaattccccaagagatcttaagcatgtattcccttacaaaatttctaaatctctccaacaattttttcagcggacccatttcccaacagatcaggctcttgatcagtcttggtacaatggatctctcaagcaataatttatctggtttgatgcacttccctgatgtaattcaacaatttgagaggacatgtcgaaatgcttcggagtcaatcagatctgctgcaactggaaagcttcgtgtggtggaagagaaacttatgcagcaaaatgctcaacttttactggacgaagctgcttcctggtcactttggcacatatatggcaaagaacatgaggagctttctggagagctgttggtgccgccaattacatctcatcaggaggcttgccgctttgttgcagcagacattacagcacaactgtgtctgcggatcatactttggcttgaaggtcttgcttctgaagctcttgatttggagaagaaggtgagaggacctcatgttggttcgtacctaccaagttctggtgtttggcaccgtacacagaggtacctaaaaaggaacaatgctgattctactatagtgaagcatgtggattttgatgctccaactcgtgaaggggcccaacttcttcctgatgacaagacgtgctcaccattgccgacgcattgggctgctgcgctttgtccttgcattgggagcggcgcactgcacagatggatgttcctgccgaacattgtgactggaaacgacgccatcaccgctggaatcctcctggacatcaagccggtacaggcggtgcaacacccccagcgatggtggaattgggtcagacagctcgttccccatgaggaacagcaacctcagccccgtgagtggcgaaagaagcaagatgaattgcttctagaagatatatggactcttttaagagcaggaagattagaagaggcatctgacttgtgccgttctgctggccaggcatggagagttgccactctttgtccttttggcggcataaatatgttcccttccctgaatgcattgcacaaaaatggaaagtacagaacactacaagccatggaattagaaagtggtgttgggcggcagtggcgtctttggaaatgggcatcatattgtgcttcagagaaaatcgctgagcaagatggaggccgttatgagatggctgtatatgctttacaatgcagtaacttaaagcgtgtcttgccaatctgtactgactgggagtcagcttgttgggcaatggcaagatcctggctagatgttcaagtggatctagaattatctcagtaccaaacaagtagaccagaaaagcaacttgatgacgacatgaatggagcccaaagttcagttggtccagaaagttggccataccatgttcttgatcagcaacctcatgatttaactgctcttctgcagaaactccactcaagtgaccttgttcatgaaactgtctctcgagcatgccgagagcagcatcgacaaattcagatgaatctcatgagtggaaatatatctcatcttcttgaccttctatggtcatggttatcacctgctgaagagaaccataataatactgcaaggccccttgatgaccctgagatgatacggttcggggcgcatattgttcttgtgctgaggcaccttttcagtgatgggatggatgatgagttagatgaaaaactggttactgtcggtgatctcatcatcaacatgtacgtgaggtatttgttctcagaggatcaagaggagttggttggaatatatgcctcacagcttcaacatgacctttgcattactttgtttgtagaaatgatggaactaaggttaaatagcagtttgcatactatgtacaagctcttcctttctgctgtggagtatctgccattctcatctgataatgtatccaaggcttgttttgaagagatcatcgagagggtgctttcaagatctcggcaaacaaaacccactaagtatgatggggatttctctgatgttgcgcatcaacatcacctgcaatcacttcaaaaggctatggttattcagtggctttgcttcacaccaccatcctcgattccagactttcaaatgatcagttggaagcttctgatacgggcattgacacatagcaatacactgttcagggagttttctctgatatcaatgaggagagtccctgagctaccagcagggccacacaagttgcttgccattttagctgaaccgttaaagcaaaaagaaaatttaatttcacgggaagatccggagcatgaatattactcccttgacgcgacttaccgcagttggcttaaaattgagatgatgaatgccgctgtttctcctgagatgctttcggcagaggaaaagggtcaagctgttgctgcagctaaagaaacactgaacttggcatgttcgttactacgcaatgcaacatcatgcacagctttgacaagtgcactatattcaactgtcagtgaagatgatgtgctgcatcgcctgttgaaggtggatgtccaggtctcttctagagacccctgctgtattgaagttgctcttcgctgcttagcagcagaaggtgatggatatgggcttcatgaagccaacgatggaggtcttcttgctgcagtcatggctgctggctttaaaggtgaactcagtcggttccaacctggagtttcgatggcaatttcacggcttgatgcttggtattctgaccggagtggttccgtggagagcaccgctgcttacataattcgagggctgtgtcggaggtgctgccttcctgaaacaattctaagatctatgcaggcatgtatcgcactctccgcggctggtgatgatctagattactctctagataaatgtgacgaacttgttgagttagttggttcagccgagtctggaatgatgcatttgttcagccagcagcagttgcaggagttcctgattttcgagagggaatatctcatatgtacaatggagtttgaggaggaccggttgccttgtgatggctaa

SEQ ID NO: 38617 - DNA, 7198 bp, Zea Mays
aaatcgttaaaagttattcgatatacattttcacagttccatctaaaagtcactaaaaacaggtctagtggtgctttcaattttgcactgcgagaaagtcagttttttgaaaaaagctgctttcttgatccagtcctttgatttagcttttgacttttaggggataaaagtcaaaaccaaaagtcaaaccaaacacactcttaatctttgtgagtacgaatgatctatatctatatgatataggtacgctcaggagtgacagacgagagactattttttttggtgtgtgtatgatatgcgatatagccggtggcggtggggttgccatctctatctcggcgtgcagtcagtcagtcacagactccagcgagcgagggaccaaaaccctagctgaaccctcccggcccgcgcagcaactgcgtccatggaggtggacccctcgccgtcgtcgcgctcgcccaggccgccgcctccgccgctggcggcgatgccgagctacttcgacccggagtcgtccggccgtcgggaggagtaccgccgctacaggaagaggttgtcttcttcaaatgtctctcctctgctgggaagatcactctccaagacctctggaccaaggctgttatatgatggagaaagcatcccaagacagcctaatgccggtttactccttgaagacataaagcaggaagctgccgattattccaacgtagaaagcttggatggattgagactgttcggttcgccgaaaaggacatctctcgatggcggttctgcatcaggcgcagcttacagttcgggcaggcaagcagtgaggcagacgctgaagccagtcaaactggaggacgatatgtatgtgccacatgaaggagaaacgccttctacaatgtttgcaactctccttgattctgggatccaaggtttgatgcacttccctgatgtaattcaacaatttgagaggacatgtcgaaatgcttcggagtcaatcagatctgctgcaactggaaagcttcgtgtggtggaagagaaacttatgcagcaaaatgctcaacttttactggacgaagctgcttcctggtcacttctttggcacatatatggcaaagaacatgaggagctttctggagagctgttggtgccgccaattacatctcatcaggaggcttgccgctttgttgcagcagacattacagcacaactgtgtctgcggatcatactttggcttgaaggtcttgcttctgaagctcttgatttggagaagaaggtgagaggacctcatgttggttcgtacctaccaagttctggtgtttggcaccgtacacagaggtacctaaaaaggaacaatgctgattctactatagtgaagcatgtggattttgatgctccaactcgtgaaggggcccaacttcttcctgatgacaagaagcaagatgaattgcttctagaagatatatggactcttttaagagcaggaagattagaagaggcatctgacttgtgccgttctgctggccaggcatggagagttgccactctttgtccttttggcggcataaatatgttcccttccctgaatgcattgcacaaaaatggaaagtacagaacactacaagccatggaattagaaagtggtgttgggcggcagtggcgtctttggaaatgggcatcatattgtgcttcagagaaaatcgctgagcaagatggaggccgttatgagatggctgtatatgctttacaatgcagtaacttaaagcgtgtcttgccaatctgtactgactgggagtcagcttgttgggcaatggcaagatcctggctagatgttcaagtggatctagaattatctcagtaccaaacaagtagaccagaaaagcaacttgatgacgacatgaatggagcccaaagttcagttggtccagaaagttggccataccatgttcttgatcagcaacctcatgatttaactgctcttctgcagaaactccactcaagtgaccttgttcatgaaactgtctctcgagcatgccgagagcagcatcgacaaattcagatgaatctcatgagtggaaatatatctcatcttcttgaccttctatggtcatggttatcacctgctgaagagaaccataataatactgcaaggccccttgatgaccctgagatgatacggttcggggcgcatattgttcttgtgctgaggcaccttttcagtgatgggatggatgatgagttagatgaaaaactggttactgtcggtgatctcatcatcaacatgtacgtgaggtatttgttctcagaggatcaagaggagttggttggaatatatgcctcacagcttcaacatgacctttgcattactttgtttgtagaaatgatggaactaaggttaaatagcagtttgcatactatgtacaagctcttcctttctgctgtggagtatctgccattctcatctgataatgtatccaaggcttgttttgaagagatcatcgagagggtgctttcaagatctcggcaaacaaaacccactaagtatgatggggatttctctgatgttgcgcatcaacatcacctgcaatcacttcaaaaggctatggttattcagtggctttgcttcacaccaccatcctcgattccagactttcaaatgatcagttggaagcttctgatacgggcattgacacatagcaatacactgttcagggagttttctctgatatcaatgaggagagtccctgagctaccagcagggccacacaagttgcttgccattttagctgaaccgttaaagcaaaaagaaaatttaatttcacgggaagatccggaggtatctgataacttgccggagtttgaagattggcatgaatattactcccttgacgcgacttaccgcagttggcttaaaattgagatgatgaatgccgctgtttctcctgagatgctttcggcagaggaaaagggtcaagctgttgctgcagctaaagaaacactgaacttggcatgttcgttactacgcacaaaatcaggggatggaagaccatggctgtatgctgtcgagagcagtccatttgaatcccccgatgttattttccttgagctgcatgcttctgcaatgctctgcctaccttctggagaatgtatgttaccagatgcaacatcatgcacagctttgacaagtgcactatattcaactgtcagtgaagatgatgtgctgcatcgcctgttgaaggtggatgtccaggtctcttctagagacccctgctgtattgaagtcgctcttcgctgcttagcagcagaaggtgatggatatgggcttcatgaagccaacgatggaggtcttcttgctgcagtcatggctgctggctttaaaggtgaactcagtcggttccaacctggagtttcgatggcaatttcacggcttgatgcttggtattctgaccggagtggttccgtggagagcaccgctgcttacataattcgagggctgtgtcggaggtgctgccttcctgaaacaattctaagatctatgcaggcatgtatcgcactctccgcggctggtgatgatctagattactctctagataaatgtgacgaacttgttgagttagttggttcagccgagtctggaatgatgcatttgttcagccagcagcagttgcaggagttcctgattttcgagagggaatatctcatatgtacaatggagtttgaggaggaccggttgccttgtgatggctaagctttttccccacttgctgactaatccatgagacatgaccggcatgtgcattttgtggcgccgtgacccaagaacctgctgtgatgtatcgctacaccatttcaaagcgaaaagatggaatttagtgcgtaacgtggttctgcccgtttgtgcacgagaattggcccgttttggagagtcaatataagattattcaagtcgaaatccaagatttttgttcatgataaaaacaatgttcggcaagcctttttgtcccgcccgtgctacgcgcactccgcctcggctgcttttgcatcgatccgatctgccgtccctggacacgctgcagctgacaagggtcaccggcagcatcctctcaagtcaactcccagaacgacttcgtttcctgacttctgagcactgcctggacgcagtatgacaagccgacaacgaccaggtggctaaacaagttccaattcctactcaaagcctcatattcataaaaggcggctaaagaagttccaataaagaacacccaattccatcgatcttgactcttgtttccaatccgagctatatagaagaatatccattgatggtttgatgcacttccctgatgtaattcaacaatttgagaggacatgtcgaaatgcttcggagtcaatcagatctgctgcaactggaaagcttcgtgtggtggaagagaaacttatgcagcaaaatgctcaacttttactggacgaagctgcttcctggtcactttggcacatatatggcaaagaacatgaggagctttctggagagctgttggtgccgccaattacatctcatcaggaggcttgccgctttgttgcagcagacattacagcacaactgtgtctgcggatcatactttggcttgaaggtcttgcttctgaagctcttgatttggagaagaaggtgagaggacctcatgttggttcgtacctaccaagttctggtgtttggcaccgtacacagaggtacctaaaaaggaacaatgctgattctactatagtgaagcatgtggattttgatgctccaactcgtgaaggggcccaacttcttcctgatgacaagacgtgctcaccattgccgacgcattgggctgctgcgctttgtccttgcattgggagcggcgcactgcacagatggatgttcctgccgaacattgtgactggaaacgacgccatcaccgctggaatcctcctggacatcaagccggtacaggcggtgcaacacccccagcgatggtggaattgggtcagacagctcgttccccatgaggaacagcaacctcagccccgtgagtggcgaaagaagcaagatgaattgcttctagaagatatatggactcttttaagagcaggaagattagaagaggcatctgacttgtgccgttctgctggccaggcatggagagttgccactctttgtccttttggcggcataaatatgttcccttccctgaatgcattgcacaaaaatggaaagtacagaacactacaagccatggaattagaaagtggtgttgggcggcagtggcgtctttggaaatgggcatcatattgtgcttcagagaaaatcgctgagcaagatggaggccgttatgagatggctgtatatgctttacaatgcagtaacttaaagcgtgtcttgccaatctgtactgactgggagtcagcttgttgggcaatggcaagatcctggctagatgttcaagtggatctagaattatctcagtaccaaacaagtagaccagaaaagcaacttgatgacgacatgaatggagcccaaagttcagttggtccagaaagttggccataccatgttcttgatcagcaacctcatgatttaactgctcttctgcagaaactccactcaagtgaccttgttcatgaaactgtctctcgagcatgccgagagcagcatcgacaaattcagatgaatctcatgagtggaaatatatctcatcttcttgaccttctatggtcatggttatcacctgctgaagagaaccataataatactgcaaggccccttgatgaccctgagatgatacggttcggggcgcatattgttcttgtgctgaggcaccttttcagtgatgggatggatgatgagttagatgaaaaactggttactgtcggtgatctcatcatcaacatgtacgtgaggtatttgttctcagaggatcaagaggagttggttggaatatatgcctcacagcttcaacatgacctttgcattactttgtttgtagaaatgatggaactaaggttaaatagcagtttgcatactatgtacaagctcttcctttctgctgtggagtatctgccattctcatctgataatgtatccaaggcttgttttgaagagatcatcgagagggtgctttcaagatctcggcaaacaaaacccactaagtatgatggggatttctctgatgttgcgcatcaacatcacctgcaatcacttcaaaaggctatggttattcagtggctttgcttcacaccaccatcctcgattccagactttcaaatgatcagttggaagcttctgatacgggcattgacacatagcaatacactgttcagggagttttctctgatatcaatgaggagagtccctgagctaccagcagggccacacaagttgcttgccattttagctgaaccgttaaagcaaaaagaaaatttaatttcacgggaagatccggagcatgaatattactcccttgacgcgacttaccgcagttggcttaaaattgagatgatgaatgccgctgtttctcctgagatgctttcggcagaggaaaagggtcaagctgttgctgcagctaaagaaacactgaacttggcatgttcgttactacgcaatgcaacatcatgcacagctttgacaagtgcactatattcaactgtcagtgaagatgatgtgctgcatcgcctgttgaaggtggatgtccaggtctcttctagagacccctgctgtattgaagttgctcttcgctgcttagcagcagaaggtgatggatatgggcttcatgaagccaacgatggaggtcttcttgctgcagtcatggctgctggctttaaaggtgaactcagtcggttccaacctggagtttcgatggcaatttcacggcttgatgcttggtattctgaccggagtggttccgtggagagcaccgctgcttacataattcgagggctgtgtcggaggtgctgccttcctgaaacaattctaagatctatgcaggcatgtatcgcactctccgcggctggtgatgatctagattactctctagataaatgtgacgaacttgttgagttagttggttcagccgagtctggaatgatgcatttgttcagccagcagcagttgcaggagttcctgattttcgagagggaatatctcatatgtacaatggagtttgaggaggaccggttgccttgtgatggctaa

SEQ ID NO: 38618 - DNA, 6556 bp, Zea Mays
aaatcgttaaaagttattcgatatacattttcacagttccatctaaaagtcactaaaaacaggtctagtggtgctttcaattttgcactgcgagaaagtcagttttttgaaaaaagctgctttcttgatccagtcctttgatttagcttttgacttttaggggataaaagtcaaaaccaaaagtcaaaccaaacacactcttaatctttgtgagtacgaatgatctatatctatatgatataggtacgctcaggagtgacagacgagagactattttttttggtgtgtgtatgatatgcgatatagccggtggcggtggggttgccatctctatctcggcgtgcagtcagtcagtcacagactccagcgagcgagggaccaaaaccctagctgaaccctcccggcccgcgcagcaactgcgtccatggaggtggacccctcgccgtcgtcgcgctcgcccaggccgccgcctccgccgctggcggcgatgccgagctacttcgacccggagtcgtccggccgtcgggaggagtaccgccgctacaggaagaggttgtcttcttcaaatgtctctcctctgctgggaagatcactctccaagacctctggaccaaggctgttatatgatggagaaagcatcccaagacagcctaatgccggtttactccttgaagacataaagcaggaagctgccgattattccaacgtagaaagcttggatggattgagactgttcggttcgccgaaaaggacatctctcgatggcggttctgcatcaggcgcagcttacagttcgggcaggcaagcagtgaggcagacgctgaagccagtcaaactggaggacgatatgtatgtgccacatgaaggagaaacgccttctacaatgtttgcaactctccttgattctgggatccaaggtttgatgcacttccctgatgtaattcaacaatttgagaggacatgtcgaaatgcttcggagtcaatcagatctgctgcaactggaaagcttcgtgtggtggaagagaaacttatgcagcaaaatgctcaacttttactggacgaagctgcttcctggtcacttctttggcacatatatggcaaagaacatgaggagctttctggagagctgttggtgccgccaattacatctcatcaggaggcttgccgctttgttgcagcagacattacagcacaactgtgtctgcggatcatactttggcttgaaggtcttgcttctgaagctcttgatttggagaagaaggtgagaggacctcatgttggttcgtacctaccaagttctggtgtttggcaccgtacacagaggtacctaaaaaggaacaatgctgattctactatagtgaagcatgtggattttgatgctccaactcgtgaaggggcccaacttcttcctgatgacaagaagcaagatgaattgcttctagaagatatatggactcttttaagagcaggaagattagaagaggcatctgacttgtgccgttctgctggccaggcatggagagttgccactctttgtccttttggcggcataaatatgttcccttccctgaatgcattgcacaaaaatggaaagtacagaacactacaagccatggaattagaaagtggtgttgggcggcagtggcgtctttggaaatgggcatcatattgtgcttcagagaaaatcgctgagcaagatggaggccgttatgagatggctgtatatgctttacaatgcagtaacttaaagcgtgtcttgccaatctgtactgactgggagtcagcttgttgggcaatggcaagatcctggctagatgttcaagtggatctagaattatctcagtaccaaacaagtagaccagaaaagcaacttgatgacgacatgaatggagcccaaagttcagttggtccagaaagttggccataccatgttcttgatcagcaacctcatgatttaactgctcttctgcagaaactccactcaagtgaccttgttcatgaaactgtctctcgagcatgccgagagcagcatcgacaaattcagatgaatctcatgagtggaaatatatctcatcttcttgaccttctatggtcatggttatcacctgctgaagagaaccataataatactgcaaggccccttgatgaccctgagatgatacggttcggggcgcatattgttcttgtgctgaggcaccttttcagtgatgggatggatgatgagttagatgaaaaactggttactgtcggtgatctcatcatcaacatgtacgtgaggtatttgttctcagaggatcaagaggagttggttggaatatatgcctcacagcttcaacatgacctttgcattactttgtttgtagaaatgatggaactaaggttaaatagcagtttgcatactatgtacaagctcttcctttctgctgtggagtatctgccattctcatctgataatgtatccaaggcttgttttgaagagatcatcgagagggtgctttcaagatctcggcaaacaaaacccactaagtatgatggggatttctctgatgttgcgcatcaacatcacctgcaatcacttcaaaaggctatggttattcagtggctttgcttcacaccaccatcctcgattccagactttcaaatgatcagttggaagcttctgatacgggcattgacacatagcaatacactgttcagggagttttctctgatatcaatgaggagagtccctgagctaccagcagggccacacaagttgcttgccattttagctgaaccgttaaagcaaaaagaaaatttaatttcacgggaagatccggaggtatctgataacttgccggagtttgaagattggcatgaatattactcccttgacgcgacttaccgcagttggcttaaaattgagatgatgaatgccgctgtttctcctgagatgctttcggcagaggaaaagggtcaagctgttgctgcagctaaagaaacactgaacttggcatgttcgttactacgcagggatggaagaccatggctgtatgctgtcgagagcagtccatttgaatcccccgatgttattttccttgagctgcatgcttctgcaatgctctgcctaccttctggagaatgtatgttaccagatgcaacatcatgcacagctttgacaagtgcactatattcaactgtcagtgaagatgatgtgctgcatcgcctgttgaaggtggatgtccaggtctcttctagagacccctgctgtattgaagtcgctcttcgctgcttagcagcagaaggtgatggatatgggcttcatgaagccaacgatggaggtcttcttgctgcagtcatggctgctggctttaaaggtgaactcagtcggttccaacctggagtttcgatggcaatttcacggcttgatgcttggtattctgaccggagtggttccgtggagagcaccgctgcttacataattcgagggctgtgtcggaggtgctgccttcctgaaacaattctaagatctatgcaggcatgtatcgcactctccgcggctggtgatgatctagattactctctagataaatgtgacgaacttgttgagttagttggttcagccgagtctggaatgatgcatttgttcagccagcagcagttgcaggagttcctgattttcgagagggaatatctcatatgtacaatggagtttgaggaggaccggttgccttgtgatggctaagctttttccccacttgctgactaatccatgagacatgaccggcatgtgcattttgtggcgccgtgacccaagaacctgctgtgatgtatcgctacaccatttcaaagcgaaaagatggaatttagtgcgtaacgtggttctgcccgtttgtgcacgagaattggcccgttttggagagtcaatataagattattcaagtcgaaatccaagatttttgttcatgataaaaacaatgttcggcaagcctttttgtcccgcccgtgctacgcgcactccgcctcggctgcttttgcatcgatccgatctgccgtccctggacacgctgcagctgacaagggtcaccggcagttccatcccaaaggctgcgaaggcgcacacaagccaagttctactcaacatcgttccctaatcatggtagtaagcacactctgcagccgcttgccacttctacccaacatcatcgtcctcctcttgttcacaaccatttccgactccacgaacagcaacagcgatctcaatgcactcttgtcattcaaatccctcataacaaaggacccaatgggtgcactgtcatcttgggatggggacgcttctaacaggagcgctcctcatttctgccggtggaacggcgtgacgtgcagcagcgaccagcacggcagccatgtcactgccttgcgcctgcgagccttcggtctggaaggcaacatctcccagtcgcttgggaatcttagccacctccaaaccctggatctgtcgaacaacaacctagagggcgagataccttccagtatcggaagcatcccttcttcagtgctgaaccttacaggactcacaatgcttagtgccaccgaaaactacatgacagggaggattccagattggttggggaacttgacagatctgacagatttgaacttggcatggaataacttcagtggacagatcccacaagctttagcggacccatttcccaacagatcaggctcttgatcagtcttggtacaatggatctctcaagcaataatttatctggtgagattccacatacccttggtagctgtgttacactgcagttcctgtatttgcaaggaaacctcctacaaggtcaaataccagtggaactgaatgcactaagaggcttagaagttttggatatctcaagcaacaacctgtcaggacccattcctgattttcttggtgacttccaagttctcaagaagctgaacctatcattcaataacctatctggtccggtgcttgatcgaggtatcttccacaataatgccacctctgtttcactttctggtaatgccatgctttgtggagggcctggtttctttcaacttccaccatgctcaactcaagcaacctatggccgttccaatcatcaacgaatgcatgtcttggccttttcctttactggagctttagtagtctttgtgtgcatcactgtatgctacttcatgaaaagggcatctgacaaagcaagtgatgctgagcatgggttagttacgcttcctagaaacaaatacaagaggatatcatatgctgagttatatgaagctacagattcattttccgattcaaatctggttggtcgtggaagatttggtactgtatataaaggaattctacatgatgacagtaatacagaaactgtagcagtaaaggtactcgatcttaagcaacaaggagctagtaggaccttctttactgagtgtgatgccctcaaaagaattaaacatcgtaaactggtcaaggttataactgtgtgcgacagcttggataacaacggtgatgaattcaaggcgcttgtgctggaattcattcccaatggaaccttggatgaatggttgcacccaagtgcacttgtcaccaacagagcaactgggagtctaagcatcattcagaggttaaacatcgctcttgatgtggcagaagcattggcatatcttcatcaccacagcaatccatcaattgtccactgcgatattaaaccaagcaacattctacttgatgaaaatatgactgcacatgttggtgactttggtttagcaagaattctaaacatggatgcatgtgaacataattctggtggaagtagctcggctggaattcgaggcacaattgggtaccttgcaccagagcatgccatgggactcagagttggtgtagaggccgaggtatacagctatggagtgctgctgatggagatacttactaaactaagaccaacagatcatatgtcttttgatggggccacaagccttgtaaagcatgtcgagatggcatacccttacaggctgctggaaatactggatgatataatgctacaaggaagcacaagtcacagcacacaagagacgatggatatggtcatcattcctgtcgtgagaataggactagcttgttgcaggactgctgcaagccagcgaattaggatggacgaggtggtgaaagaactcaatgacattaagaagacatgggaagaccatttcgcagaaatcaccggggcaaccggcagagcggcggatggacgagcaatccattgatggaaggtggcacaagcgcaatggcaaagcacacgcccagcctgtgcacttgccagcttgctccgaatagagagagacagcctacacacggctgctggttctactcagtattttgcctagaaaattgagatccagttatatgtatatgttatatgggtacttgttgaatattgcaaccaaaacatgttatggtaaacacattatttttcatgtccagtggaggggttccccttattcattatatctgtactaactattaagggggcagtgtagactgccc

SEQ ID NO: 38619 - DNA, 6688 bp, Zea Mays
aaatcgttaaaagttattcgatatacattttcacagttccatctaaaagtcactaaaaacaggtctagtggtgctttcaattttgcactgcgagaaagtcagttttttgaaaaaagctgctttcttgatccagtcctttgatttagcttttgacttttaggggataaaagtcaaaaccaaaagtcaaaccaaacacactcttaatctttgtgagtacgaatgatctatatctatatgatataggtacgctcaggagtgacagacgagagactattttttttggtgtgtgtatgatatgcgatatagccggtggcggtggggttgccatctctatctcggcgtgcagtcagtcagtcacagactccagcgagcgagggaccaaaaccctagctgaaccctcccggcccgcgcagcaactgcgtccatggaggtggacccctcgccgtcgtcgcgctcgcccaggccgccgcctccgccgctggcggcgatgccgagctacttcgacccggagtcgtccggccgtcgggaggagtaccgccgctacaggaagaggttgtcttcttcaaatgtctctcctctgctgggaagatcactctccaagacctctggaccaaggctgttatatgatggagaaagcatcccaagacagcctaatgccggtttactccttgaagacataaagcaggaagctgccgattattccaacgtagaaagcttggatggattgagactgttcggttcgccgaaaaggacatctctcgatggcggttctgcatcaggcgcagcttacagttcgggcaggcaagcagtgaggcagacgctgaagccagtcaaactggaggacgatatgtatgtgccacatgaaggagaaacgccttctacaatgtttgcaactctccttgattctgggatccaaggtttgatgcacttccctgatgtaattcaacaatttgagaggacatgtcgaaatgcttcggagtcaatcagatctgctgcaactggaaagcttcgtgtggtggaagagaaacttatgcagcaaaatgctcaacttttactggacgaagctgcttcctggtcacttctttggcacatatatggcaaagaacatgaggagctttctggagagctgttggtgccgccaattacatctcatcaggaggcttgccgctttgttgcagcagacattacagcacaactgtgtctgcggatcatactttggcttgaaggtcttgcttctgaagctcttgatttggagaagaaggtgagaggacctcatgttggttcgtacctaccaagttctggtgtttggcaccgtacacagaggtacctaaaaaggaacaatgctgattctactatagtgaagcatgtggattttgatgctccaactcgtgaaggggcccaacttcttcctgatgacaagaagcaagatgaattgcttctagaagatatatggactcttttaagagcaggaagattagaagaggcatctgacttgtgccgttctgctggccaggcatggagagttgccactctttgtccttttggcggcataaatatgttcccttccctgaatgcattgcacaaaaatggaaagtacagaacactacaagccatggaattagaaagtggtgttgggcggcagtggcgtctttggaaatgggcatcatattgtgcttcagagaaaatcgctgagcaagatggaggccgttatgagatggctgtatatgctttacaatgcagtaacttaaagcgtgtcttgccaatctgtactgactgggagtcagcttgttgggcaatggcaagatcctggctagatgttcaagtggatctagaattatctcagtaccaaacaagtagaccagaaaagcaacttgatgacgacatgaatggagcccaaagttcagttggtccagaaagttggccataccatgttcttgatcagcaacctcatgatttaactgctcttctgcagaaactccactcaagtgaccttgttcatgaaactgtctctcgagcatgccgagagcagcatcgacaaattcagatgaatctcatgagtggaaatatatctcatcttcttgaccttctatggtcatggttatcacctgctgaagagaaccataataatactgcaaggccccttgatgaccctgagatgatacggttcggggcgcatattgttcttgtgctgaggcaccttttcagtgatgggatggatgatgagttagatgaaaaactggttactgtcggtgatctcatcatcaacatgtacgtgaggtatttgttctcagaggatcaagaggagttggttggaatatatgcctcacagcttcaacatgacctttgcattactttgtttgtagaaatgatggaactaaggttaaatagcagtttgcatactatgtacaagctcttcctttctgctgtggagtatctgccattctcatctgataatgtatccaaggcttgttttgaagagatcatcgagagggtgctttcaagatctcggcaaacaaaacccactaagtatgatggggatttctctgatgttgcgcatcaacatcacctgcaatcacttcaaaaggctatggttattcagtggctttgcttcacaccaccatcctcgattccagactttcaaatgatcagttggaagcttctgatacgggcattgacacatagcaatacactgttcagggagttttctctgatatcaatgaggagagtccctgagctaccagcagggccacacaagttgcttgccattttagctgaaccgttaaagcaaaaagaaaatttaatttcacgggaagatccggaggtatctgataacttgccggagtttgaagattggcatgaatattactcccttgacgcgacttaccgcagttggcttaaaattgagatgatgaatgccgctgtttctcctgagatgctttcggcagaggaaaagggtcaagctgttgctgcagctaaagaaacactgaacttggcatgttcgttactacgcacaaaatcaggggatggaagaccatggctgtatgctgtcgagagcagtccatttgaatcccccgatgttattttccttgagctgcatgcttctgcaatgctctgcctaccttctggagaatgtatgttaccagatgcaacatcatgcacagctttgacaagtgcactatattcaactgtcagtgaagatgatgtgctgcatcgcctgttgaaggtggatgtccaggtctcttctagagacccctgctgtattgaagtcgctcttcgctgcttagcagcagaaggtgatggatatgggcttcatgaagccaacgatggaggtcttcttgctgcagtcatggctgctggctttaaaggtgaactcagtcggttccaacctggagtttcgatggcaatttcacggcttgatgcttggtattctgaccggagtggttccgtggagagcaccgctgcttacataattcgagggctgtgtcggaggtgctgccttcctgaaacaattctaagatctatgcaggcatgtatcgcactctccgcggctggtgatgatctagattactctctagataaatgtgacgaacttgttgagttagttggttcagccgagtctggaatgatgcatttgttcagccagcagcagttgcaggagttcctgattttcgagagggaatatctcatatgtacaatggagtttgaggaggaccggttgccttgtgatggctaagctttttccccacttgctgactaatccatgagacatgaccggcatgtgcattttgtggcgccgtgacccaagaacctgctgtgatgtatcgctacaccatttcaaagcgaaaagatggaatttagtgcgtaacgtggttctgcccgtttgtgcacgagaattggcccgttttggagagtcaatataagattattcaagtcgaaatccaagatttttgttcatgataaaaacaatgttcggcaagcctttttgtcccgcccgtgctacgcgcactccgcctcggctgcttttgcatcgatccgatctgccgtccctggacacgctgcagctgacaagggtcaccggcagttccatcccaaaggctgcgaaggcgcacacaagccaagttctactcaacatcgttccctaatcatggtagtaagcacactctgcagccgcttgccacttctacccaacatcatcgtcctcctcttgttcacaaccatttccgactccacgaacagcaacagcgatctcaatgcactcttgtcattcaaatccctcataacaaaggacccaatgggtgcactgtcatcttgggatggggacgcttctaacaggagcgctcctcatttctgccggtggaacggcgtgacgtgcagcagcgaccagcacggcagccatgtcactgccttgcgcctgcgagccttcggtctggaaggcaacatctcccagtcgcttgggaatcttagccacctccaaaccctggatctgtcgaacaacaacctagagggcgagataccttccagtatcggtaacttgtttgctctccattttctcaacctaagtgttaaccacctgtccgggaacgttcctcagtccatcggccgtctttccgaactcgaaattctgaatttccgcgacaatgacatcgtaggaagcatcccttcttcagtgctgaaccttacaggactcacaatgcttagtgccaccgaaaactacatgacagggaggattccagattggttggggaacttgacagatctgacagatttgaacttggcatggaataacttcagtggacagatcccacaagctttagcggacccatttcccaacagatcaggctcttgatcagtcttggtacaatggatctctcaagcaataatttatctggtgagattccacatacccttggtagctgtgttacactgcagttcctgtatttgcaaggaaacctcctacaaggtcaaataccagtggaactgaatgcactaagaggcttagaagttttggatatctcaagcaacaacctgtcaggacccattcctgattttcttggtgacttccaagttctcaagaagctgaacctatcattcaataacctatctggtccggtgcttgatcgaggtatcttccacaataatgccacctctgtttcactttctggtaatgccatgctttgtggagggcctggtttctttcaacttccaccatgctcaactcaagcaacctatggccgttccaatcatcaacgaatgcatgtcttggccttttcctttactggagctttagtagtctttgtgtgcatcactgtatgctacttcatgaaaagggcatctgacaaagcaagtgatgctgagcatgggttagttacgcttcctagaaacaaatacaagaggatatcatatgctgagttatatgaagctacagattcattttccgattcaaatctggttggtcgtggaagatttggtactgtatataaaggaattctacatgatgacagtaatacagaaactgtagcagtaaaggtactcgatcttaagcaacaaggagctagtaggaccttctttactgagtgtgatgccctcaaaagaattaaacatcgtaaactggtcaaggttataactgtgtgcgacagcttggataacaacggtgatgaattcaaggcgcttgtgctggaattcattcccaatggaaccttggatgaatggttgcacccaagtgcacttgtcaccaacagagcaactgggagtctaagcatcattcagaggttaaacatcgctcttgatgtggcagaagcattggcatatcttcatcaccacagcaatccatcaattgtccactgcgatattaaaccaagcaacattctacttgatgaaaatatgactgcacatgttggtgactttggtttagcaagaattctaaacatggatgcatgtgaacataattctggtggaagtagctcggctggaattcgaggcacaattgggtaccttgcaccagagcatgccatgggactcagagttggtgtagaggccgaggtatacagctatggagtgctgctgatggagatacttactaaactaagaccaacagatcatatgtcttttgatggggccacaagccttgtaaagcatgtcgagatggcatacccttacaggctgctggaaatactggatgatataatgctacaaggaagcacaagtcacagcacacaagagacgatggatatggtcatcattcctgtcgtgagaataggactagcttgttgcaggactgctgcaagccagcgaattaggatggacgaggtggtgaaagaactcaatgacattaagaagacatgggaagaccatttcgcagaaatcaccggggcaaccggcagagcggcggatggacgagcaatccattgatggaaggtggcacaagcgcaatggcaaagcacacgcccagcctgtgcacttgccagcttgctccgaatagagagagacagcctacacacggctgctggttctactcagtattttgcctagaaaattgagatccagttatatgtatatgttatatgggtacttgttgaatattgcaaccaaaacatgttatggtaaacacattatttttcatgtccagtggaggggttccccttattcattatatctgtactaactattaagggggcagtgtagactgccc

SEQ ID NO: 38620 - DNA, 6391 bp, Zea Mays
aaatcgttaaaagttattcgatatacattttcacagttccatctaaaagtcactaaaaacaggtctagtggtgctttcaattttgcactgcgagaaagtcagttttttgaaaaaagctgctttcttgatccagtcctttgatttagcttttgacttttaggggataaaagtcaaaaccaaaagtcaaaccaaacacactcttaatctttgtgagtacgaatgatctatatctatatgatataggtacgctcaggagtgacagacgagagactattttttttggtgtgtgtatgatatgcgatatagccggtggcggtggggttgccatctctatctcggcgtgcagtcagtcagtcacagactccagcgagcgagggaccaaaaccctagctgaaccctcccggcccgcgcagcaactgcgtccatggaggtggacccctcgccgtcgtcgcgctcgcccaggccgccgcctccgccgctggcggcgatgccgagctacttcgacccggagtcgtccggccgtcgggaggagtaccgccgctacaggaagaggttgtcttcttcaaatgtctctcctctgctgggaagatcactctccaagacctctggaccaaggctgttatatgatggagaaagcatcccaagacagcctaatgccggtttactccttgaagacataaagcaggaagctgccgattattccaacgtagaaagcttggatggattgagactgttcggttcgccgaaaaggacatctctcgatggcggttctgcatcaggcgcagcttacagttcgggcaggcaagcagtgaggcagacgctgaagccagtcaaactggaggacgatatgtatgtgccacatgaaggagaaacgccttctacaatgtttgcaactctccttgattctgggatccaaggtttgatgcacttccctgatgtaattcaacaatttgagaggacatgtcgaaatgcttcggagtcaatcagatctgctgcaactggaaagcttcgtgtggtggaagagaaacttatgcagcaaaatgctcaacttttactggacgaagctgcttcctggtcacttctttggcacatatatggcaaagaacatgaggagctttctggagagctgttggtgccgccaattacatctcatcaggaggcttgccgctttgttgcagcagacattacagcacaactgtgtctgcggatcatactttggcttgaaggtcttgcttctgaagctcttgatttggagaagaaggtgagaggacctcatgttggttcgtacctaccaagttctggtgtttggcaccgtacacagaggtacctaaaaaggaacaatgctgattctactatagtgaagcatgtggattttgatgctccaactcgtgaaggggcccaacttcttcctgatgacaagaagcaagatgaattgcttctagaagatatatggactcttttaagagcaggaagattagaagaggcatctgacttgtgccgttctgctggccaggcatggagagttgccactctttgtccttttggcggcataaatatgttcccttccctgaatgcattgcacaaaaatggaaagtacagaacactacaagccatggaattagaaagtggtgttgggcggcagtggcgtctttggaaatgggcatcatattgtgcttcagagaaaatcgctgagcaagatggaggccgttatgagatggctgtatatgctttacaatgcagtaacttaaagcgtgtcttgccaatctgtactgactgggagtcagcttgttgggcaatggcaagatcctggctagatgttcaagtggatctagaattatctcagtaccaaacaagtagaccagaaaagcaacttgatgacgacatgaatggagcccaaagttcagttggtccagaaagttggccataccatgttcttgatcagcaacctcatgatttaactgctcttctgcagaaactccactcaagtgaccttgttcatgaaactgtctctcgagcatgccgagagcagcatcgacaaattcagatgaatctcatgagtggaaatatatctcatcttcttgaccttctatggtcatggttatcacctgctgaagagaaccataataatactgcaaggccccttgatgaccctgagatgatacggttcggggcgcatattgttcttgtgctgaggcaccttttcagtgatgggatggatgatgagttagatgaaaaactggttactgtcggtgatctcatcatcaacatgtacgtgaggtatttgttctcagaggatcaagaggagttggttggaatatatgcctcacagcttcaacatgacctttgcattactttgtttgtagaaatgatggaactaaggttaaatagcagtttgcatactatgtacaagctcttcctttctgctgtggagtatctgccattctcatctgataatgtatccaaggcttgttttgaagagatcatcgagagggtgctttcaagatctcggcaaacaaaacccactaagtatgatggggatttctctgatgttgcgcatcaacatcacctgcaatcacttcaaaaggctatggttattcagtggctttgcttcacaccaccatcctcgattccagactttcaaatgatcagttggaagcttctgatacgggcattgacacatagcaatacactgttcagggagttttctctgatatcaatgaggagagtccctgagctaccagcagggccacacaagttgcttgccattttagctgaaccgttaaagcaaaaagaaaatttaatttcacgggaagatccggaggtatctgataacttgccggagtttgaagattggcatgaatattactcccttgacgcgacttaccgcagttggcttaaaattgagatgatgaatgccgctgtttctcctgagatgctttcggcagaggaaaagggtcaagctgttgctgcagctaaagaaacactgaacttggcatgttcgttactacgcagggatggaagaccatggctgtatgctgtcgagagcagtccatttgaatcccccgatgttattttccttgagctgcatgcttctgcaatgctctgcctaccttctggagaatgtatgttaccagatgcaacatcatgcacagctttgacaagtgcactatattcaactgtcagtgaagatgatgtgctgcatcgcctgttgaaggtggatgtccaggtctcttctagagacccctgctgtattgaagtcgctcttcgctgcttagcagcagaaggtgatggatatgggcttcatgaagccaacgatggaggtcttcttgctgcagtcatggctgctggctttaaaggtgaactcagtcggttccaacctggagtttcgatggcaatttcacggcttgatgcttggtattctgaccggagtggttccgtggagagcaccgctgcttacataattcgagggctgtgtcggaggtgctgccttcctgaaacaattctaagatctatgcaggcatgtatcgcactctccgcggctggtgatgatctagattactctctagataaatgtgacgaacttgttgagttagttggttcagccgagtctggaatgatgcatttgttcagccagcagcagttgcaggagttcctgattttcgagagggaatatctcatatgtacaatggagtttgaggaggaccggttgccttgtgatggctaagctttttccccacttgctgactaatccatgagacatgaccggcatgtgcattttgtggcgccgtgacccaagaacctgctgtgatgtatcgctacaccatttcaaagcgaaaagatggaatttagtgcgtaacgtggttctgcccgtttgtgcacgagaattggcccgttttggagagtcaatataagattattcaagtcgaaatccaagatttttgttcatgataaaaacaatgttcggcaagcctttttgtcccgcccgtgctacgcgcactccgcctcggctgcttttgcatcgatccgatctgccgtccctggacacgctgcagctgacaagggtcaccggcagttccatcccaaaggctgcgaaggcgcacacaagccaagttctactcaacatcgttccctaatcatggtagtaagcacactctgcagccgcttgccacttctacccaacatcatcgtcctcctcttgttcacaaccatttccgactccacgaacagcaacagcgatctcaatgcactcttgtcattcaaatccctcataacaaaggacccaatgggtgcactgtcatcttgggatggggacgcttctaacaggagcgctcctcatttctgccggtggaacggcgtgacgtgcagcagcgaccagcacggcagccatgtcactgccttgcgcctgcgagccttcggtctggaaggcaacatctcccagtcgcttgggaatcttagccacctccaaaccctggatctgtcgaacaacaacctagagggcgagataccttccagtatcgcggacccatttcccaacagatcaggctcttgatcagtcttggtacaatggatctctcaagcaataatttatctggtgagattccacatacccttggtagctgtgttacactgcagttcctgtatttgcaaggaaacctcctacaaggtcaaataccagtggaactgaatgcactaagaggcttagaagttttggatatctcaagcaacaacctgtcaggacccattcctgattttcttggtgacttccaagttctcaagaagctgaacctatcattcaataacctatctggtccggtgcttgatcgaggtatcttccacaataatgccacctctgtttcactttctggtaatgccatgctttgtggagggcctggtttctttcaacttccaccatgctcaactcaagcaacctatggccgttccaatcatcaacgaatgcatgtcttggccttttcctttactggagctttagtagtctttgtgtgcatcactgtatgctacttcatgaaaagggcatctgacaaagcaagtgatgctgagcatgggttagttacgcttcctagaaacaaatacaagaggatatcatatgctgagttatatgaagctacagattcattttccgattcaaatctggttggtcgtggaagatttggtactgtatataaaggaattctacatgatgacagtaatacagaaactgtagcagtaaaggtactcgatcttaagcaacaaggagctagtaggaccttctttactgagtgtgatgccctcaaaagaattaaacatcgtaaactggtcaaggttataactgtgtgcgacagcttggataacaacggtgatgaattcaaggcgcttgtgctggaattcattcccaatggaaccttggatgaatggttgcacccaagtgcacttgtcaccaacagagcaactgggagtctaagcatcattcagaggttaaacatcgctcttgatgtggcagaagcattggcatatcttcatcaccacagcaatccatcaattgtccactgcgatattaaaccaagcaacattctacttgatgaaaatatgactgcacatgttggtgactttggtttagcaagaattctaaacatggatgcatgtgaacataattctggtggaagtagctcggctggaattcgaggcacaattgggtaccttgcaccagagcatgccatgggactcagagttggtgtagaggccgaggtatacagctatggagtgctgctgatggagatacttactaaactaagaccaacagatcatatgtcttttgatggggccacaagccttgtaaagcatgtcgagatggcatacccttacaggctgctggaaatactggatgatataatgctacaaggaagcacaagtcacagcacacaagagacgatggatatggtcatcattcctgtcgtgagaataggactagcttgttgcaggactgctgcaagccagcgaattaggatggacgaggtggtgaaagaactcaatgacattaagaagacatgggaagaccatttcgcagaaatcaccggggcaaccggcagagcggcggatggacgagcaatccattgatggaaggtggcacaagcgcaatggcaaagcacacgcccagcctgtgcacttgccagcttgctccgaatagagagagacagcctacacacggctgctggttctactcagtattttgcctagaaaattgagatccagttatatgtatatgttatatgggtacttgttgaatattgcaaccaaaacatgttatggtaaacacattatttttcatgtccagtggaggggttccccttattcattatatctgtactaactattaagggggcagtgtagactgccc

SEQ ID NO: 38621 - DNA, 2594 bp, Zea Mays
cacctctcggccacctgccccccaagccctgaccgacgccaagatgccggccacggcgagcggcggcgcgcggccggaggaggaggaggaggaggtgtctcccgcgccatcgccgtcgacttccgcgtcggcctgcatggggacaagggcggaggagctgacggcgaggctggcggccacggggccccgcccgggcgcgggccgcggcgccgccgccgctggcggagaggaggtggagcacgagcgtgtccgcgcgctgcgcgagatcaagaaccagatcatcgggaaccgcaccaagaagctcctgtacctccgcctgggcgccgtgccgtcggtcgtggcggcgctggcggagcccggagcctcgccggcggcgctcgtgcaggcggcggccgcggcggggagcttcgcgtgcggcgtggacgatggcgcgcgcgccgtgctggccgccggcgctgtcggccacctcactcgcctcctcgctcaccccgacgagaaggttgtggatgcaagcgcacgtgctcttagaatgatatatcaatcaagattagctccaaagtttgatgttaatagtggggaaaacgtggattttgttctttcccttttggacagtgagaacgagaatgtcacagagctggctgctgctattgtatctcactcttgtgagagtagtgcagaacaattgtcgctatgcagtgctggagttccacagaaacttgttagtctttttggatgttctatgaatctacgagatgcttgtttaggttctatcattgcagttattcaaaataaccaagatgttgcttcaagatttgcatcaacggaccatggaaaaggttttcgttcagtagttgggttaatacatgatcggagtccacgcacaagattacttgcttgcctctgcttgattgcacttgggcatgcttctcctgatcattttcaggacaatcagattaagaccaagttgattatggttttacttgagctaattgaagaacctggtcatgtaggagatgaagctcccttggcattaaccaccctgattaaagacagcttcgaactgcagagacaagctcttacaacgaacgcagttgagaagctcagcagccatctactagcaaatccattggggacaaggcgagcagtgaccatattacttgcgctatctgaactttgctcaaaacttgaagagtcaagatctcaactgatgtcggttgaggtatcaaccttactccttgaggcattgaaacatgattgggctgatatccgtgttgcagcatgttcatgtctgaagaatatctccaggtcaccaaagatactcagtggaggtcgattatcctgcgatacagttatcggtcccctggtccagcttttaaatgactcatctacttcagtccaggaaatcagttcttcttcactccggggttgtctcacaacttgttcatttgtcaaagtccatggatccaatgttgaggctaaaatctgtatgtgctctcaggaatattatgttccttcttagtcctaaggataaagacttcattgttaaggagttgaccttatctactctttcaagcctcatatgtgattctgaacattttgttcaagaacaaacattggcacttgtgcacaatcttgttgatggatatgtggtctctgctaattatgtcattggtgaagatggaatggttatggatgctattgcaagacaactgaacaatgcatctgctccgggagtatgcattcagggtatgtatgtgcttgcaaacattgctgcgggaaacgagtggaacaaggaagctgtgatgaatgttcttctgcctcacagagcagatcgcatcaaaccgtcgtttgcagtgaactttctgaaaagcaaggatagacagttgcgagttgccacactgtggtgcgttctaaacttgatatacccaaaatgtgaagcctcatctggtagagccgtcagactacaaagtgctggagtgatcctacaagtgaaaagaatgataaatgacccctgcttggattgcaagcttagagttcgtatggtgcttgaccactgcttggacaacgctgatgattgtttcatgtgaacaacctgtatttcaccgtggcaacccaagtttacggaactatattcagatcaggaaagaggaaaccagtgtgcttcagatccaaatatatgccactgaacagtggacatgagcacctgcagaaagcttttgctgatctctgcgggtcttcaagaaccagctgccttttttgcaccatgagaacctgacaaccggcatctgttgtgcatattgtccattaccttgttgtgaccgaagttgtctagtgaacttgggctgcctgctcgcagtctgaaaggctttaggcgctatggatccagaaatcccatttttcccagtgcctgccgaacctggtgcatgcttttgaagttgagtctgtaaatgagtgactgctgtaactgttgtacaaaatttgtatttctgttccaataaggccgtatttaacatgcacctatgggttagatgttgtccatggattcccatgttctatgaaaataaagaagatgcaagtttctatgcatgttttgc

SEQ ID NO: 38622 - DNA, 2570 bp, Zea Mays
cacctctcggccacctgccccccaagccctgaccgacgccaagatgccggccacggcgagcggcggcgcgcggccggaggaggaggaggaggaggtgtctcccgcgccatcgccgtcgacttccgcgtcggcctgcatggggacaagggcggaggagctgacggcgaggctggcggccacggggccccgcccgggcgcgggccgcggcgccgccgccgctggcggagaggaggtggagcacgagcgtgtccgcgcgctgcgcgagatcaagaaccagatcatcgggaaccgcaccaagaagctcctgtacctccgcctgggcgccgtgccgtcggtcgtggcggcgctggcggagcccggagcctcgccggcggcgctcgtgcaggcggcggccgcggcggggagcttcgcgtgcggcgtggacgatggcgcgcgcgccgtgctggccgccggcgctgtcggccacctcactcgcctcctcgctcaccccgacgagaaggttgtggatgcaagcgcacgtgctcttagaatgatatatcaatcaagattagctccaaagtttgatgttaatagtggggaaaacgtggattttgttctttcccttttggacagtgagaacgagaatgtcacagagctggctgctgctattgtatctcactcttgtgagagtagtgcagaacaattgtcgctatgcagtgctggagttccacagaaacttgttagtctttttggatgttctatgaatctacgagatgcttgtttaggttctatcattgcagttattcaaaataaccaagatgttgcttcaagatttgcatcaacggaccatggaaaaggttttcgttcagtagttgggttaatacatgatcggagtccacgcacaagattacttgcttgcctctgcttgattgcacttgggcatgcttctcctgatcattttcaggacaatcagattaagaccaagttgattatggttttacttgagctaattgaagaacctggtcatgtaggagatgaagctcccttggcattaaccaccctgattaaagacagcttcgaactgcagagacaagctcttacaacgaacgcagttgagaagctcagcagccatctactagcaaatccattggggacaaggcgagcagtgaccatattacttgcgctatctgaactttgctcaaaacttgaagagtcaagatctcaactgatgtcggttgaggtatcaaccttactccttgaggcattgaaacatgattgggctgatatccgtgttgcagcatgttcatgtctgaagaatatctccaggtcaccaaagatactcagtggaggtcgattatcctgcgatacagttatcggtcccctggtccagcttttaaatgactcatctacttcagtccaggttgctgcccttggtgccatttgcaatattgccattaatttgacacccaggaaatcagttcttcttcactccggggaatattatgttccttcttagtcctaaggataaagacttcattgttaaggagttgaccttatctactctttcaagcctcatatgtgattctgaacattttgttcaagaacaaacattggcacttgtgcacaatcttgttgatggatatgtggtctctgctaattatgtcattggtgaagatggaatggttatggatgctattgcaagacaactgaacaatgcatctgctccgggagtatgcattcagggtatgtatgtgcttgcaaacattgctgcgggaaacgagtggaacaaggaagctgtgatgaatgttcttctgcctcacagagcagatcgcatcaaaccgtcgtttgcagtgaactttctgaaaagcaaggatagacagttgcgagttgccacactgtggtgcgttctaaacttgatatacccaaaatgtgaagcctcatctggtagagccgtcagactacaaagtgctggagtgatcctacaagtgaaaagaatgataaatgacccctgcttggattgcaagcttagagttcgtatggtgcttgaccactgcttggacaacgctgatgattgtttcatgtgaacaacctgtatttcaccgtggcaacccaagtttacggaactatattcagatcaggaaagaggaaaccagtgtgcttcagatccaaatatatgccactgaacagtggacatgagcacctgcagaaagcttttgctgatctctgcgggtcttcaagaaccagctgccttttttgcaccatgagaacctgacaaccggcatctgttgtgcatattgtccattaccttgttgtgaccgaagttgtctagtgaacttgggctgcctgctcgcagtctgaaaggctttaggcgctatggatccagaaatcccatttttcccagtgcctgccgaacctggtgcatgcttttgaagttgagtctgtaaatgagtgactgctgtaactgttgtacaaaatttgtatttctgttccaataaggccgtatttaacatgcacctatgggttagatgttgtccatggattcccatgttctatgaaaataaagaagatgcaagtttctatgcatgttttgc

SEQ ID NO: 38623 - DNA, 2636 bp, Zea Mays
cacctctcggccacctgccccccaagccctgaccgacgccaagatgccggccacggcgagcggcggcgcgcggccggaggaggaggaggaggaggtgtctcccgcgccatcgccgtcgacttccgcgtcggcctgcatggggacaagggcggaggagctgacggcgaggctggcggccacggggccccgcccgggcgcgggccgcggcgccgccgccgctggcggagaggaggtggagcacgagcgtgtccgcgcgctgcgcgagatcaagaaccagatcatcgggaaccgcaccaagaagctcctgtacctccgcctgggcgccgtgccgtcggtcgtggcggcgctggcggagcccggagcctcgccggcggcgctcgtgcaggcggcggccgcggcggggagcttcgcgtgcggcgtggacgatggcgcgcgcgccgtgctggccgccggcgctgtcggccacctcactcgcctcctcgctcaccccgacgagaaggttgtggatgcaagcgcacgtgctcttagaatgatatatcaatcaagattagctccaaagtttgatgttaatagtggggaaaacgtggattttgttctttcccttttggacagtgagaacgagaatgtcacagagctggctgctgctattgtatctcactcttgtgagagtagtgcagaacaattgtcgctatgcagtgctggagttccacagaaacttgttagtctttttggatgttctatgaatctacgagatgcttgtttaggttctatcattgcagttattcaaaataaccaagatgttgcttcaagatttgcatcaacggaccatggaaaaggttttcgttcagtagttgggttaatacatgatcggagtccacgcacaagattacttgcttgcctctgcttgattgcacttgggcatgcttctcctgatcattttcaggacaatcagattaagaccaagttgattatggttttacttgagctaattgaagaacctggtcatgtaggagatgaagctcccttggcattaaccaccctgattaaagacagcttcgaactgcagagacaagctcttacaacgaacgcagttgagaagctcagcagccatctactagcaaatccattggggacaaggcgagcagtgaccatattacttgcgctatctgaactttgctcaaaacttgaagagtcaagatctcaactgatgtcggttgaggtatcaaccttactccttgaggcattgaaacatgattgggctgatatccgtgttgcagcatgttcatgtctgaagaatatctccaggtcaccaaagtggaggtcgattatcctgcgatacagttatcggtcccctggtccagcttttaaatgactcatctacttcagtccaggttgctgcccttggtgccatttgcaatattgccattaatttgacacccaggaaatcagttcttcttcactccggggttgtctcacaacttgttcatttgtcaaagtccatggatccaatgttgaggctaaaatctgtatgtgctctcaggaatattatgttccttcttagtcctaaggataaagacttcattgttaaggagttgaccttatctactctttcaagcctcatatgtgattctgaacattttgttcaagaacaaacattggcacttgtgcacaatcttgttgatggatatgtggtctctgctaattatgtcattggtgaagatggaatggttatggatgctattgcaagacaactgaacaatgcatctgctccgggagtatgcattcagggtatgtatgtgcttgcaaacattgctgcgggaaacgagtggaacaaggaagctgtgatgaatgttcttctgcctcacagagcagatcgcatcaaaccgtcgtttgcagtgaactttctgaaaagcaaggatagacagttgcgagttgccacactgtggtgcgttctaaacttgatatacccaaaatgtgaagcctcatctggtagagccgtcagactacaaagtgctggagtgatcctacaagtgaaaagaatgataaatgacccctgcttggattgcaagcttagagttcgtatggtgcttgaccactgcttggacaacgctgatgattgtttcatgtgaacaacctgtatttcaccgtggcaacccaagtttacggaactatattcagatcaggaaagaggaaaccagtgtgcttcagatccaaatatatgccactgaacagtggacatgagcacctgcagaaagcttttgctgatctctgcgggtcttcaagaaccagctgccttttttgcaccatgagaacctgacaaccggcatctgttgtgcatattgtccattaccttgttgtgaccgaagttgtctagtgaacttgggctgcctgctcgcagtctgaaaggctttaggcgctatggatccagaaatcccatttttcccagtgcctgccgaacctggtgcatgcttttgaagttgagtctgtaaatgagtgactgctgtaactgttgtacaaaatttgtatttctgttccaataaggccgtatttaacatgcacctatgggttagatgttgtccatggattcccatgttctatgaaaataaagaagatgcaagtttctatgcatgttttgc

SEQ ID NO: 38624 - DNA, 1216 bp, Zea Mays
atttgagtggtgtccctgagcaaaatctaccaactatatacatgtttaaggttgctgcccttggtgccatttgcaatattgccattaatttgacacccaggaaatcagttcttcttcactccggggaatattatgttccttcttagtcctaaggataaagacttcattgttaaggagttgaccttatctactctttcaagcctcatatgtgattctgaacattttgttcaagaacaaacattggcacttgtgcacaatcttgttgatggatatgtggtctctgctaattatgtcattggtgaagatggaatggttatggatgctattgcaagacaactgaacaatgcatctgctccgggagtatgcattcagggtatgtatgtgcttgcaaacattgctgcgggaaacgagtggaacaaggaagctgtgatgaatgttcttctgcctcacagagcagatcgcatcaaaccgtcgtttgcagtgaactttctgaaaagcaaggatagacagttgcgagttgccacactgtggtgcgttctaaacttgatatacccaaaatgtgaagcctcatctggtagagccgtcagactacaaagtgctggagtgatcctacaagtgaaaagaatgataaatgacccctgcttggattgcaagagttcgtatggtgcttgaccactgcttggacaacgctgatgattgtttcatgtgaacaacctgtatttcaccgtggcaacccaagtttacggaactatattcagatcaggaaagaggaaaccagtgtgcttcagatccaaatatatgccactgaacagtggacatgagcacctgcagaaagcttttgctgatctctgcgggtcttcaagaaccagctgccttttttgcaccatgagaacctgacaaccggcatctgttgtgcatattgtccattaccttgttgtgaccgaagttgtctagtgaacttgggctgcctgctcgcagtctgaaaggctttaggcgctatggatccagaaatcccatttttcccagtgcctgccgaacctggtgcatgcttttgaagttgagtctgtaaatgagtgactgctgtaactgttgtacaaaatttgtatttctgttccaataaggccgtatttaacatgcacctatgggttagatgttgtccatggattcccatgttctatgaaaataaagaagatgcaagtttctatgcatgttttgc

SEQ ID NO: 38625 - DNA, 1635 bp, Zea Mays
cgcgcatccatccaccgccaccccgacctccctgcaataataattacggagtataataataataataaaaaactccgaatccgccgcgcgcgccccgtcctcgtcgccggcggaggcgcccgccaccgcccacagcagcctatcgccggagaaggaacgccgcggggagcttttccactgccatctcccgtctgacccctccgagatcggaagcggcggccatggcgatcccgctcgtgctcgtcgtgctcccgctcggcctcctcttcctcctgtccggcctcatcgtcaacaccatccaggtacaactacatgcggatgaggaaacttaccgatcaatgggtaaagagcatgcactcgtcatatcaaatcatcgaagtgatattgattggcttattggatggatattggcccagcgctcagggtgccttggaagtacgctcgctgtcatgaagaagtcatccaagttccttccagtcattggctggtcaatgtggtttgcagagtacctctttttggagaggagctgggccaaggatgaaaagacactaaagtggggtctccaaaggttgaaagacttccctagaccattttggctagctctttttgttgagggtactcgctttactccagcaaagcttctcgcagctcaggagtatgcggcttcccagggcttaccagctcctagaaatgtacttattccacgtaccaagggatttgtatctgccgtaagtattatgcgagattttgttccagccatttacgatacaactgtaatagttcctaaagattcccctcaaccaacaatgctgcggattttgaaagggcaatcatcagtgatacatgtccgcatgaaacgtcatgcaatgagtgagatgccaaaatcagatgatgacgtttcaaaatggtgtaaagacatttttgtggcaaaggatgccttactggacaaacatttggcaacaggcactttcgatgaggagattagacctatcggccgcccagtgaaatcattgctggtgaccctgttttggtcgtgcctcctgttgtttggtgccatcgagttcttcaagtggacgcagctcctatcgacatggagaggagtggcattcactgccgcagggatggcgctcgtgacagggctcatgcacgtcttcatcatgttctcccaggctgagcggtcgagctcagccaaggcggcacggaaccgggtcaagaaggaatgaaaacggagggtggaaatgtgattctgggctctatttatgggcagctttcaaaatgactcgattcatattaatgtatacagcaccaaattccagacagaaacaggatgctctgctcctcttgtatttgtgtgcaggaaagaattttagggagttcatttttgcccccctcttttgggcagaggaactgtaggacatgaacttgatgttggtacatttgccctgtagacattctggaagcctttcagtagttcatttatcagtaaagcttgcatctttcatccatgtagttgtgcaccttgtctgtcactcatcacaatgttgttgtgttctaactgttctgtgatgaaaagcaagggatacagtatgttcaataaagcaatagaaatgttttgtgatgaaaagcagaggatat

SEQ ID NO: 38626 - DNA, 1670 bp, Zea Mays
ccgccaccccgacctccctgcaataataattacggagtataataataataataaaaaactccgaatccgccgcgcgcgccccgtcctcgtcgccggcggaggcgcccgccaccgcccacagcagcctatcgccggagaaggaacgccgcggggagcttttccactgccatctcccgtctgacccctccgagatcggaagcggcggccatggcgatcccgctcgtgctcgtcgtgctcccgctcggcctcctcttcctcctgtccggcctcatcgtcaacaccatccaggccatcctatttgtgacaataaggcccttttccaagagcttgtatcgccggatcaacaggttcttggccgagctgctgtggctccagcttgtctgggtggtggactggtgggcaggcgttaaggtacaactacatgcggatgaggaaacttaccgatcaatggcgctcagggtgccttggaagtacgctcgctgtcatgaagaagtcatccaagttccttccagtcattggctggtcaatgtggtttgcagagtacctctttttggagaggagctgggccaaggatgaaaagacactaaagtggggtctccaaaggttgaaagacttccctagaccattttggctagctctttttgttgagggtactcgctttactccagcaaagcttctcgcagctcaggagtatgcggcttcccagggcttaccagctcctagaaatgtacttattccacgtaccaagggatttgtatctgccgtaagtattatgcgagattttgttccagccatttacgatacaactgtaatagttcctaaagattcccctcaaccaacaatgctgcggattttgaaagggcaatcatcagtgatacatgtccgcatgaaacgtcatgcaatgagtgagatgccaaaatcagatgatgacgtttcaaaatggtgtaaagacatttttgtggcaaaggatgccttactggacaaacatttggcaacaggcactttcgatgaggagattagacctatcggccgcccagtgaaatcattgctggtgaccctgttttggtcgtgcctcctgttgtttggtgccatcgagttcttcaagtggacgcagctcctatcgacatggagaggagtggcattcactgccgcagggatggcgctcgtgacagggctcatgcacgtcttcatcatgttctcccaggctgagcggtcgagctcagccaaggcggcacggaaccgggtcaagaaggaatgaaaacggagggtggaaatgtgattctgggctctatttatgggcagctttcaaaatgactcgattcatattaatgtatacagcaccaaattccagacagaaacaggatgctctgctcctcttgtatttgtgtgcaggaaagaattttagggagttcatttttgcccccctcttttgggcagaggaactgtaggacatgaacttgatgttggtacatttgccctgtagacattctggaagcctttcagtagttcatttatcagtaaagcttgcatctttcatccatgtagttgtgcaccttgtctgtcactcatcacaatgttgttgtgttctaactgttctgtgatgaaaagcaagggatacagtatgttcaataaagcaatagaaatgttttgtgatgaaaagcagaggatat

SEQ ID NO: 38627 - DNA, 1579 bp, Zea Mays
attttactcaaagacgtgtcttttttttgatggaaagtctcatgccgatttgttaaattttcgtaataattaaccgctcttgtaaataaagatggagtaatttaccacttccatttgaatacggccatcctatttgtgacaataaggcccttttccaagagcttgtatcgccggatcaacaggttcttggccgagctgctgtggctccagcttgtctgggtggtggactggtgggcaggcgttaaggtacaactacatgcggatgaggaaacttaccgatcaatgggtaaagagcatgcactcgtcatatcaaatcatcgaagtgatattgattggcttattggatggatattggcccagcgctcagggtgccttggaagtacgctcgctgtcatgaagaagtcatccaagttccttccagtcattggctggtcaatgtggtttgcagagtacctctttttggagaggagctgggccaaggatgaaaagacactaaagtggggtctccaaaggttgaaagacttccctagaccattttggctagctctttttgttgagggtactcgctttactccagcaaagcttctcgcagctcaggagtatgcggcttcccagggcttaccagctcctagaaatgtacttattccacgtaccaagggatttgtatctgccgtaagtattatgcgagattttgttccagccatttacgatacaactgtaatagttcctaaagattcccctcaaccaacaatgctgcggattttgaaagggcaatcatcagtgatacatgtccgcatgaaacgtcatgcaatgagtgagatgccaaaatcagatgatgacgtttcaaaatggtgtaaagacatttttgtggcaaaggatgccttactggacaaacatttggcaacaggcactttcgatgaggagattagacctatcggccgcccagtgaaatcattgctggtgaccctgttttggtcgtgcctcctgttgtttggtgccatcgagttcttcaagtggacgcagctcctatcgacatggagaggagtggcattcactgccgcagggatggcgctcgtgacagggctcatgcacgtcttcatcatgttctcccaggctgagcggtcgagctcagccaaggcggcacggaaccgggtcaagaaggaatgaaaacggagggtggaaatgtgattctgggctctatttatgggcagctttcaaaatgactcgattcatattaatgtatacagcaccaaattccagacagaaacaggatgctctgctcctcttgtatttgtgtgcaggaaagaattttagggagttcatttttgcccccctcttttgggcagaggaactgtaggacatgaacttgatgttggtacatttgccctgtagacattctggaagcctttcagtagttcatttatcagtaaagcttgcatctttcatccatgtagttgtgcaccttgtctgtcactcatcacaatgttgttgtgttctaactgttctgtgatgaaaagcaagggatacagtatgttcaataaagcaatagaaatgttttgtgatgaaaagcagaggatat

SEQ ID NO: 38628 - DNA, 1178 bp, Zea Mays
atcatctcgcctaatcaaggtcattggctggtcaatgtggtttgcagagtacctctttttggagaggagctgggccaaggatgaaaagacactaaagtggggtctccaaaggttgaaagacttccctagaccattttggctagctctttttgttgagggtactcgctttactccagcaaagcttctcgcagctcaggagtatgcggcttcccagggcttaccagctcctagaaatgtacttattccacgtaccaagggatttgtatctgccgtaagtattatgcgagattttgttccagccatttacgatacaactgtaatagttcctaaagattcccctcaaccaacaatgctgcggattttgaaagggcaatcatcagtgatacatgtccgcatgaaacgtcatgcaatgagtgagatgccaaaatcagatgatgacgtttcaaaatggtgtaaagacatttttgtggcaaaggatgccttactggacaaacatttggcaacaggcactttcgatgaggagattagacctatcggccgcccagtgaaatcattgctggtgaccctgttttggtcgtgcctcctgttgtttggtgccatcgagttcttcaagtggacgcagctcctatcgacatggagaggagtggcattcactgccgcagggatggcgctcgtgacagggctcatgcacgtcttcatcatgttctcccaggctgagcggtcgagctcagccaaggcggcacggaaccgggtcaagaaggaatgaaaacggagggtggaaatgtgattctgggctctatttatgggcagctttcaaaatgactcgattcatattaatgtatacagcaccaaattccagacagaaacaggatgctctgctcctcttgtatttgtgtgcaggaaagaattttagggagttcatttttgcccccctcttttgggcagaggaactgtaggacatgaacttgatgttggtacatttgccctgtagacattctggaagcctttcagtagttcatttatcagtaaagcttgcatctttcatccatgtagttgtgcaccttgtctgtcactcatcacaatgttgttgtgttctaactgttctgtgatgaaaagcaagggatacagtatgttcaataaagcaatagaaatgttttgtgatgaaaagcagaggatat

SEQ ID NO: 38629 - DNA, 1478 bp, Zea Mays
tggcatttccctttcttcactggttcccccggcatactctcactcactctctccctctgtccctcctcgtcgttctcccgtgtccgccgtgcactgtctgtctctggtggcggcgactgggcggcctccgccgctgccctacgccaggatcccaggctgcatcttccgtacgccaggggcgaactgtttgcaggaggagggcctcgccgcaggttgggtgggaggcggagatgagccgggggcggtcgccggagccgctggatttcttcatctggactgtgcaggatgtagggttatggttggaggaaataaatcttggaagctaccgccaggcttttgaagaaaatggtgtcaatggagagtatctagaaagcctgtcggtgttcaccactgagcagattcttcgctttataagacgatgccatatgaaatggggagattttatcaccctctgtaaagagttgagacgcatcaaagttgcctgcttgaaaggggagcaggaggtccgcaggccgtggtgggcgccgtcatgcctgtcggtcgtgttcacgcgggtggccaggcacaaccggcagtcccgggtcgtctccttgaagctggaagcttagcaagttagcaggctcgccctcagccagtggaactggcagagtcgtctccagatgctggaagcttagtagcaggctcgccgtcagccagcttgcctcgcgctttggcgcgccgccgccatccccgtcgttccagtgccctagggcacacaaggggcgcctctctctgtgtaccatatagcaagcaatgtgtctcagtgttcttgaaaggtgctctcgcgttacagtcgtcgtgtgttgccaggcatgcgtgtgtttttcgttgatttgtttattttcttcacgtatagctaggggttgtgggtttgagttcgagatggtaagatgttgtaatgtagacgatgaatatacgtatgctttgcgtgttgtgcagatggctgctgtttaaaatggccccctttttgcttagctacgagagaaaagagatggcattgctgggaacagcagagcgtggattaaggatcatgaaggatcgtgatgctgatgaaggtctattgctttgattgggcacaaggttgtggttctacaagataaagatcatgatagattgtgatgcagatgccggccttagtaaaaagttcctgctagtttcagctgctggtattgcttatctagtgaacaaattatggtcccgtttacatctcatggtctaaggccatgtttgtttagcctttagattatataatctagcttaataagttgaacaccggaggatgtgtttggttggacggacaagtagagatagaaggggcggccatatttattttataatgcttgaatgagagtcacgcgaggtgagatgaatatcagatcaatttttttatatagaactgtcctgtttattattatgaaatgttatctagaccagtttat

SEQ ID NO: 38630 - DNA, 1460 bp, Zea Mays
ggcatttccctttcttcactggttcccccggcatactctcactcactctctccctctgtccctcctcgtcgttctcccgtgtccgccgtgcactgtctgtctctggtggcggcgactgggcggcctccgccgctgccctacgccaggatcccaggctgcatcttccgtacgccaggaggagggcctcgccgcaggttgggtgggaggcggagatgagccgggggcggtcgccggagccgctggatttcttcatctggactgtgcaggatgtagggttatggttggaggaaataaatcttggaagctaccgccaggcttttgaagaaaatggtgtcaatggagagtatctagaaagcctgtcggtgttcaccactgagcagattcttcgctttataagacgatgccatatgaaatggggagattttatcaccctctgtaaagagttgagacgcatcaaagttgcctgcttgaaaggggagcaggaggtccgcaggccgtggtgggcgccgtcatgcctgtcggtcgtgttcacgcgggtggccaggcacaaccggcagtcccgggtcgtctccttgaagctggaagcttagcaagttagcaggctcgccctcagccagtggaactggcagagtcgtctccagatgctggaagcttagtagcaggctcgccgtcagccagcttgcctcgcgctttggcgcgccgccgccatccccgtcgttccagtgccctagggcacacaaggggcgcctctctctgtgtaccatatagcaagcaatgtgtctcagtgttcttgaaaggtgctctcgcgttacagtcgtcgtgtgttgccaggcatgcgtgtgtttttcgttgatttgtttattttcttcacgtatagctaggggttgtgggtttgagttcgagatggtaagatgttgtaatgtagacgatgaatatacgtatgctttgcgtgttgtgcagatggctgctgtttaaaatggccccctttttgcttagctacgagagaaaagagatggcattgctgggaacagcagagcgtggattaaggatcatgaaggatcgtgatgctgatgaaggtctattgctttgattgggcacaaggttgtggttctacaagataaagatcatgatagattgtgatgcagatgccggccttagtaaaaagttcctgctagtttcagctgctggtattgcttatctagtgaacaaattatggtcccgtttacatctcatggtctaaggccatgtttgtttagcctttagattatataatctagcttaataagttgaacaccggaggatgtgtttggttggacggacaagtagagatagaaggggcggccatatttattttataatgcttgaatgagagtcacgcgaggtgagatgaatatcagatcaatttttttatatagaactgtcctgtttattattatgaaatgttatctagaccagtttat

SEQ ID NO: 38631 - DNA, 1452 bp, Zea Mays
cctttcttcactggttcccccggcatactctcactcactctctccctctgtccctcctcgtcgttctcccgtgtccgccgtgcactgtctgtctctggtggcggcgactgggcggcctccgccgctgccctacgccaggatcccaggctgcatcttccgtacgccaggaggagggcatcgccgcaggttgagtgggaggcggagatgagccgggggcggtcgccggagccgctggatttcttcatctggactgtgcaggatgtagggttatggttggaggaaataaatcttggaagctaccgccaggcttttgaagaaaatggtgtcaatggagagtatctagaaagcctgtcggtgttcaccactgagcagattctccgctttataagacgatgccatatgaaatggggagattttatcaccctctgtaaagagctgagacgcatcaaagttgcctgcttgaaaggggagcaggaggtccgcaggccgtggtgggcgccgtcatgcctgtcggtcgtgttcacgcgggtggccaggcacaaccggcagtcccgggtcgtctccttgaagctggaagcttagcaagttagcaggctcgccctcagccagtggaactggcagagtcgtctccagatgctggaagcttagtagcaggctcgccgtcagccagcttgcctcgcgctttggcgcgccgccgccatccccgtcgttccagtgccctagggcacacaaggggcgcctctctctgtgtaccatatagcaagcaatgtgtctcagtgttcttgaaaggtgctctcgcgttacagtcgtcgtgtgttgccaggcatgcgtgtgtttttcgttgatttgtttattttcttcacgtatagctaggggttgtgggtttgagttcgagatggtaagatgttgtaatgtagacgatgaatatacgtatgctttgcgtgttgtgcagatggctgctgtttaaaatggccccctttttgcttagctacgagagaaaagagatggcattgctgggaacagcagagcgtggattaaggatcatgaaggatcgtgatgctgatgaaggtctattgctttgattgggcacaaggttgtggttctacaagataaagatcatgatagattgtgatgcagatgccggccttagtaaaaagttcctgctagtttcagctgctggtattgcttatctagtgaacaaattatggtcccgtttacatctcatggtctaaggccatgtttgtttagcctttagattatataatctagcttaataagttgaacaccggaggatgtgtttggttggacggacaagtagagatagaaggggcggccatatttattttataatgcttgaatgagagtcacgcgaggtgagatgaatatcagatcaatttttttatatagaactgtcctgtttattattatgaaatgttatctagaccagtttat

SEQ ID NO: 38632 - DNA, 1449 bp, Zea Mays
ttcttcactggttcccccggcatactctcactcactctctccctctgtccctcctcgtcgttctcccgtgtccgccgtgcactgtctgtctctggtggcggcgactgggcggcctccgccgctgccctacgccaggatcccaggctgcatcttccgtacgccaggaggagggcctcgccgcaggttgggtgggaggcggagatgagccgggggcggtcgccggagccgctggatttcttcatctggactgtgcaggatgtagggttatggttggaggaaataaatcttggaagctaccgccaggcttttgaagaaaatggtgtcaatggagagtatctagaaagcctgtcggtgttcaccactgagcagattctccgctttataagacgatgccatatgaaatggggagattttatcaccctctgtaaagagctgagacgcatcaaagttgcctgcttgaaaggggagcaggaggtccgcaggccgtggtgggcgccgtcatgcctgtcggtcgtgttcacgcgggtggccaggcacaaccggcagtcccgggtcgtctccttgaagctggaagcttagcaagttagcaggctcgccctcagccagtggaactggcagagtcgtctccagatgctggaagcttagtagcaggctcgccgtcagccagcttgcctcgcgctttggcgcgccgccgccatccccgtcgttccagtgccctagggcacacaaggggcgcctctctctgtgtaccatatagcaagcaatgtgtctcagtgttcttgaaaggtgctctcgcgttacagtcgtcgtgtgttgccaggcatgcgtgtgtttttcgttgatttgtttattttcttcacgtatagctaggggttgtgggtttgagttcgagatggtaagatgttgtaatgtagacgatgaatatacgtatgctttgcgtgttgtgcagatggctgctgtttaaaatggccccctttttgcttagctacgagagaaaagagatggcattgctgggaacagcagagcgtggattaaggatcatgaaggatcgtgatgctgatgaaggtctattgctttgattgggcacaaggttgtggttctacaagataaagatcatgatagattgtgatgcagatgccggccttagtaaaaagttcctgctagtttcagctgctggtattgcttatctagtgaacaaattatggtcccgtttacatctcatggtctaaggccatgtttgtttagcctttagattatataatctagcttaataagttgaacaccggaggatgtgtttggttggacggacaagtagagatagaaggggcggccatatttattttataatgcttgaatgagagtcacgcgaggtgagatgaatatcagatcaatttttttatatagaactgtcctgtttattattatgaaatgttatctagaccagtttat

SEQ ID NO: 38633 - DNA, 948 bp, Zea Mays
ttcttcactggttcccccggcatactctcactcactctctccctctgtccctcctcgtcgttctcccgtgtccgccgtgcactgtctgtctctggtggcggcgactgggcggcctccgccgctgccctacgccaggatcccaggctgcatcttccgtacgccaggaggagggcctcgccgcaggttgggtgggaggcggagatgagccgggggcggtcgccggagccgctggatttcttcatctggactgtgcaggatgtagggttatggttggaggaaataaatcttggaagctaccgccaggcttttgaagaaaatggtgtcaatggagagtatctagaaagcctgtcggtgttcaccactgagcagattcttcgctttataagacgatgccatatgaaatggggagattttatcaccctctgtaaagagttgagacgcatcaaagatggctgctgtttaaaatggccccctttttgcttagctacgagagaaaagagatggcattgctgggaacagcagagcgtggattaaggatcatgaaggatcgtgatgctgatgaaggtctattgctttgattgggcacaaggttgtggttctacaagataaagatcatgatagattgtgatgcagatgccggccttagtaaaaagttcctgctagtttcagctgctggtattgcttatctagtgaacaaattatggtcccgtttacatctcatggtctaaggccatgtttgtttagcctttagattatataatctagcttaataagttgaacaccggaggatgtgtttggttggacggacaagtagagatagaaggggcggccatatttattttataatgcttgaatgagagtcacgcgaggtgagatgaatatcagatcaatttttttatatagaactgtcctgtttattattatgaaatgttatctagaccagtttat

SEQ ID NO: 38634 - DNA, 912 bp, Zea Mays
ttcttcactggttcccccggcatactctcactcactctctccctctgtccctcctcgtcgttctcccgtgtccgccgtgcactgtctgtctctggtggcggcgactgggcggcctccgccgctgccctacgccaggatcccaggctgcatcttccgtacgccaggaggagggcctcgccgcaggttgggtgggaggcggagatgagccgggggcggtcgccggagccgctggatttcttcatctggactgtgcaggatgtagggttatggttggaggaaataaatcttggaagctaccgccaggcttttgaagaaaatggtgtcaatggagagtatctagaaagcctgtcggtgttcaccactgagcagattcttcgctttataagacgatgccatatgaaatggggagattttatcaccctctgtaaagagttgagacgcatcaaagctacgagagaaaagagatggcattgctgggaacagcagagcgtggattaaggatcatgaaggatcgtgatgctgatgaaggtctattgctttgattgggcacaaggttgtggttctacaagataaagatcatgatagattgtgatgcagatgccggccttagtaaaaagttcctgctagtttcagctgctggtattgcttatctagtgaacaaattatggtcccgtttacatctcatggtctaaggccatgtttgtttagcctttagattatataatctagcttaataagttgaacaccggaggatgtgtttggttggacggacaagtagagatagaaggggcggccatatttattttataatgcttgaatgagagtcacgcgaggtgagatgaatatcagatcaatttttttatatagaactgtcctgtttattattatgaaatgttatctagaccagtttat

SEQ ID NO: 38635 - DNA, 1276 bp, Zea Mays
ggagggcctcgccgcaggttgggtgggaggcggagatgagccgggggcggtcgccggagccgctggatttcttcatctggactgtgcagggttatggttggaggaaataaatcttggaagctaccgccaggcttttgaagaaaatggtgtcaatggagagtatctagaaagcctgtcggtgttcaccactgagcagattctccgctttataagacgatgccatatgaaatggggagattttatcaccctctgtaaagagctgagacgcatcaaagttgcctgcttgaaaggggagcaggaggtccgcaggccgtggtgggcgccgtcatgcctgtcggtcgtgttcacgcgggtggccaggcacaaccggcagtcccgggtcgtctccttgaagctggaagcttagcaagttagcaggctcgccctcagccagtggaactggcagagtcgtctccagatgctggaagcttagtagcaggctcgccgtcagccagcttgcctcgcgctttggcgcgccgccgccatccccgtcgttccagtgccctagggcacacaaggggcgcctctctctgtgtaccatatagcaagcaatgtgtctcagtgttcttgaaaggtgctctcgcgttacagtcgtcgtgtgttgccaggcatgcgtgtgtttttcgttgatttgtttattttcttcacgtatagctaggggttgtgggtttgagttcgagatggtaagatgttgtaatgtagacgatgaatatacgtatgctttgcgtgttgtgcagatggctgctgtttaaaatggccccctttttgcttagctacgagagaaaagagatggcattgctgggaacagcagagcgtggattaaggatcatgaaggatcgtgatgctgatgaaggtctattgctttgattgggcacaaggttgtggttctacaagataaagatcatgatagattgtgatgcagatgccggccttagtaaaaagttcctgctagtttcagctgctggtattgcttatctagtgaacaaattatggtcccgtttacatctcatggtctaaggccatgtttgtttagcctttagattatataatctagcttaataagttgaacaccggaggatgtgtttggttggacggacaagtagagatagaaggggcggccatatttattttataatgcttgaatgagagtcacgcgaggtgagatgaatatcagatcaatttttttatatagaactgtcctgtttattattatgaaatgttatctagaccagtttat

SEQ ID NO: 38636 - DNA, 1283 bp, Zea Mays
ggagggcctcgccgcaggttgagtgggaggcggagatgagccgggggcggtcgccggagccgctggatttcttcatctggactgtgcaggatgtagggttatggttggaggaaataaatcttggaagctaccgccaggcttttgaagaaaatggtgtcaatggagagtatctagaaagcctgtcggtgttcaccactgagcagattctccgctttataagacgatgccatatgaaatggggagattttatcaccctctgtaaagagctgagacgcatcaaagttgcctgcttgaaaggggagcaggaggtccgcaggccgtggtgggcgccgtcatgcctgtcggtcgtgttcacgcgggtggccaggcacaaccggcagtcccgggtcgtctccttgaagctggaagcttagcaagttagcaggctcgccctcagccagtggaactggcagagtcgtctccagatgctggaagcttagtagcaggctcgccgtcagccagcttgcctcgcgctttggcgcgccgccgccatccccgtcgttccagtgccctagggcacacaaggggcgcctctctctgtgtaccatatagcaagcaatgtgtctcagtgttcttgaaaggtgctctcgcgttacagtcgtcgtgtgttgccaggcatgcgtgtgtttttcgttgatttgtttattttcttcacgtatagctaggggttgtgggtttgagttcgagatggtaagatgttgtaatgtagacgatgaatatacgtatgctttgcgtgttgtgcagatggctgctgtttaaaatggccccctttttgcttagctacgagagaaaagagatggcattgctgggaacagcagagcgtggattaaggatcatgaaggatcgtgatgctgatgaaggtctattgctttgattgggcacaaggttgtggttctacaagataaagatcatgatagattgtgatgcagatgccggccttagtaaaaagttcctgctagtttcagctgctggtattgcttatctagtgaacaaattatggtcccgtttacatctcatggtctaaggccatgtttgtttagcctttagattatataatctagcttaataagttgaacaccggaggatgtgtttggttggacggacaagtagagatagaaggggcggccatatttattttataatgcttgaatgagagtcacgcgaggtgagatgaatatcagatcaatttttttatatagaactgtcctgtttattattatgaaatgttatctagaccagtttat

SEQ ID NO: 38637 - DNA, 1254 bp, Zea Mays
cttcactggttcccccggcatactctcactcactctctccctcgttccctcctcgtcgttctcccgtgtccgccgtgcactgtctgtctctggtggcggcgactgggcggcctccgccgctgccctacgccaggatcccaggctgcatcttccgtacgccaggaggagggcatcgccgcaggttgagtgggaggcggagatgagccgggggcggtcgccggagccgctggatttcttcatctggactgtgcagttgcctgcttgaaaggggagcaggaggtccgcaggccgtggtgggcgccgtcatgcctgtcggtcgtgttcacgcgggtggccaggcacaaccggcagtcccgggtcgtctccttgaagctggaagcttagcaagttagcaggctcgccctcagccagtggaactggcagagtcgtctccagatgctggaagcttagtagcaggctcgccgtcagccagcttgcctcgcgctttggcgcgccgccgccatccccgtcgttccagtgccctagggcacacaaggggcgcctctctctgtgtaccatatagcaagcaatgtgtctcagtgttcttgaaaggtgctctcgcgttacagtcgtcgtgtgttgccaggcatgcgtgtgtttttcgttgatttgtttattttcttcacgtatagctaggggttgtgggtttgagttcgagatggtaagatgttgtaatgtagacgatgaatatacgtatgctttgcgtgttgtgcagatggctgctgtttaaaatggccccctttttgcttagctacgagagaaaagagatggcattgctgggaacagcagagcgtggattaaggatcatgaaggatcgtgatgctgatgaaggtctattgctttgattgggcacaaggttgtggttctacaagataaagatcatgatagattgtgatgcagatgccggccttagtaaaaagttcctgctagtttcagctgctggtattgcttatctagtgaacaaattatggtcccgtttacatctcatggtctaaggccatgtttgtttagcctttagattatataatctagcttaataagttgaacaccggaggatgtgtttggttggacggacaagtagagatagaaggggcggccatatttattttataatgcttgaatgagagtcacgcgaggtgagatgaatatcagatcaatttttttatatagaactgtcctgtttattattatgaaatgttatctagaccagtttat

SEQ ID NO: 38638 - DNA, 1447 bp, Zea Mays
cttcactggttcccccggcatactctcactcactctctccctcgttccctcctcgtcgttctcccgtgtccgccgtgcactgtctgtctctggtggcggcgactgggcggcctccgccgctgccctacgccaggatcccaggctgcatcttccgtacgccaggaggagggcatcgccgcaggttgagtgggaggcggagatgagccgggggcggtcgccggagccgctggatttcttcatctggactgtgcaggatgtagggttatggttggaggaaataaatcttggaagctaccgccaggcttttgaagaaaatggtgtcaatggagagtatctagaaagcctgtcggtgttcaccactgagcagattctccgctttataagacgatgccatatgaaatggggagattttatcaccctctgtaaagagctgagacgcatcaaagttgcctgcttgaaaggggagcaggaggtccgcaggccgtggtgggcgccgtcatgcctgtcggtcgtgttcacgcgggtggccaggcacaaccggcagtcccgggtcgtctccttgaagctggaagcttagcaagttagcaggctcgccctcagccagtggaactggcagagtcgtctccagatgctggaagcttagtagcaggctcgccgtcagccagcttgcctcgcgctttggcgcgccgccgccatccccgtcgttccagtgccctagggcacacaaggggcgcctctctctgtgtaccatatagcaagcaatgtgtctcagtgttcttgaaaggtgctctcgcgttacagtcgtcgtgtgttgccaggcatgcgtgtgtttttcgttgatttgtttattttcttcacgtatagctaggggttgtgggtttgagttcgagatggtaagatgttgtaatgtagacgatgaatatacgtatgctttgcgtgttgtgcagatggctgctgtttaaaatggccccctttttgcttagctacgagagaaaagagatggcattgctgggaacagcagagcgtggattaaggatcatgaaggatcgtgatgctgatgaaggtctattgctttgattgggcacaaggttgtggttctacaagataaagatcatgatagattgtgatgcagatgccggccttagtaaaaagttcctgctagtttcagctgctggtattgcttatctagtgaacaaattatggtcccgtttacatctcatggtctaaggccatgtttgtttagcctttagattatataatctagcttaataagttgaacaccggaggatgtgtttggttggacggacaagtagagatagaaggggcggccatatttattttataatgcttgaatgagagtcacgcgaggtgagatgaatatcagatcaatttttttatatagaactgtcctgtttattattatgaaatgttatctagaccagtttat

SEQ ID NO: 38639 - DNA, 1418 bp, Zea Mays
ctctcactcactctctccctcgttccctcctcgtcgttctcccgtgtccgccgtgcactgtctgtctctggtggcggcgactgggcggcctccgccgctgccctacgccaggatcccaggctgcatcttccgtacgccaggaggagggcatcgccgcaggttgagtgggaggcggagatgagccgggggcggtcgccggagccgctggatttcttcatctggactgtgcagggttatggttggaggaaataaatcttggaagctaccgccaggcttttgaagaaaatggtgtcaatggagagtatctagaaagcctgtcggtgttcaccactgagcagattctccgctttataagacgatgccatatgaaatggggagattttatcaccctctgtaaagagctgagacgcatcaaagttgcctgcttgaaaggggagcaggaggtccgcaggccgtggtgggcgccgtcatgcctgtcggtcgtgttcacgcgggtggccaggcacaaccggcagtcccgggtcgtctccttgaagctggaagcttagcaagttagcaggctcgccctcagccagtggaactggcagagtcgtctccagatgctggaagcttagtagcaggctcgccgtcagccagcttgcctcgcgctttggcgcgccgccgccatccccgtcgttccagtgccctagggcacacaaggggcgcctctctctgtgtaccatatagcaagcaatgtgtctcagtgttcttgaaaggtgctctcgcgttacagtcgtcgtgtgttgccaggcatgcgtgtgtttttcgttgatttgtttattttcttcacgtatagctaggggttgtgggtttgagttcgagatggtaagatgttgtaatgtagacgatgaatatacgtatgctttgcgtgttgtgcagatggctgctgtttaaaatggccccctttttgcttagctacgagagaaaagagatggcattgctgggaacagcagagcgtggattaaggatcatgaaggatcgtgatgctgatgaaggtctattgctttgattgggcacaaggttgtggttctacaagataaagatcatgatagattgtgatgcagatgccggccttagtaaaaagttcctgctagtttcagctgctggtattgcttatctagtgaacaaattatggtcccgtttacatctcatggtctaaggccatgtttgtttagcctttagattatataatctagcttaataagttgaacaccggaggatgtgtttggttggacggacaagtagagatagaaggggcggccatatttattttataatgcttgaatgagagtcacgcgaggtgagatgaatatcagatcaatttttttatatagaactgtcctgtttattattatgaaatgttatctagaccagtttat

SEQ ID NO: 38640 - DNA, 719 bp, Zea Mays
gcgcggtcaacggaaccacttccacgcaaaaaaaaggcaggcagatcacaccgcatggtggcacgccatttttcccccctatataaagcaccaatctccttccccgaattcgggcacggaacacatccatccctcgctctctctcgcgcgcgcgctcgtgctccttcgtgctgctcgccccgcccccgccgccctgccctccccaccgtcgtcaccggcgtggggggaacgacatgactacttccaggcgccttgcggacaggaagacagccaagttccagaagaacatcacgaggcggggttccgtgccggaaaccgccgtcaagaaggggaaggggaacggctacgctgccggccccgtagtgctcggcttcttcgtcttcgtcgtcattgggtcatatcatcaggaccgcgaccagtggcggcatggcttgagaacccgtccccggtgcagagcagagagatctgtttgtcgtttgtacatgcatgcgtccagctagaatcgagtttaatttcgaactgaaccgtaatgcagaaccatgtatgtaaataaagtgctattaaatgggtaactggatatagtgctatatatatacagtgttggaatacaaatacctttttttccccttacgcgcggcctgtacgtgtgccagttttgctcgactgtgtttggcttgtgatgacgacgacggctgaagtttcatatgggatttgagtcg

SEQ ID NO: 38641 - DNA, 1622 bp, Zea Mays
cgagttatagaaagttgcatttgtgtgcatcccacgccagccaaacactgccgacgagcaaagaaagcaaatataataaagtcatggcggacgagacagagacagcggcgccgctgctccgctcagctcccctcgtcgccgacgcgccacgccggaacagatctcgcgctgatgagcggcgcgcagctgttcatccggcaggacctgggcctctccgacgtgcaggtcgaggtgctcacggggtccatgaacctgttcatgctcgtgtccatcctcggcgccggatgggcggccgaccttctgggccgccgtggcacgctcgtgctcgccaatgcattcctcatggccggagcgctcgccatgtcggctggcggcagctacgccgcgctcgtggccgcgcgcttcgtcaccagcgtcggggtcgggttcgcccgcgtcgtcgcgccggtgtacaacgccgagatctcgccggcgtccacgcgcggcgtcctgtcgtctttgctagatctgcctttatttgtggccgatgcacgtccgtatgccggccatcttgcagatgtttatcaacgtcggcatcttgcttagctacgtgtcgaactacgcgttcgccggcctgccagtgcacaccggctggcgcgtcatgttcgccgtcggcgcgctgccaccggtgttcctggccgcgggggtacttgccatgccagagtcgccgcggtggctggtgatgcgcgggcgctacggggaagcgcgcgccgtgctcttgcgcaccaccccagctgaggccgacctccgactccaggagatcaaggaagccgtcgaggcgccgcgggcacctgctgacagcggcggcggcggcggcgttggcgtgtggaaggagatgctgtggcggccgacgaaaacggtgcgccggatcctcgtctgcgcgatcggcgtgctgttcttccagcaagcctccggcatcgacgccatcgtgctgtacagcccgctggtgttccagaagtccggcatgtcgtcgaacagcgccatcctcggggcaaccgtcgccgtgggagtggtgaagacatgcttcatcctcgtggcgacgctcctgtccgactgcgtcggccggcgccccctcctcctcgccagcgccgccggctctgcggcgacgctggcctctgtggccctgacgctctgcgtcggcagcacgtccacggtaagcactgcggcgtgcgtcgcgtcggtgctggccttcgtggccgcgttctcggttgggttcgggccgctggcgccgacgtacagctcggagatcattccgctgcggctgcgcgcgcagggcaccggccttggcacggcagtgaaccggctgacgtgtgcattggtgaccatgactttcatctcgctcgccgactggctcaccatgccggggtgcttcttcctgtatgctggtgtggcagcagccgcgttcgtgttcgtgtacttggagctgccagagactagtgggcggagcttggaggatatgcacgagctcttcgccgccaagtgatcatagtccccctctctctctctctctgcctaaattggacagtgaactgaactgaggtcttgtgtttattaattgatttgaggtatgattattcaacttc

SEQ ID NO: 38642 - DNA, 1754 bp, Zea Mays
aatctttcttgtaccactaagctagtggccacaactcgttggcaacgaggaagcagcaagccgagaagctacgccgcgccgccgccatatatggcacaggctgccggcaccgccgatgccactgatgaggctccactgctgctggcctcgtcggcggcggggtcgacgccgtcgccgccaggttcagcaccgcgccggaacagacctgacgctgatgagcggcgcggagctgttcatgcgggaggacgtggggctcaccgacggcgaggtcgaggtgctggcggggtccatgaacgtgttcatgctcgcgtccatcctcgccgccggctgggtggccgaccacctgggccgccgccgcaccctcgtgctcgccaacgccttcctcatggccggcgcgctcgccatgtcgctcggcaccagcttcgccgcgctcatggcggcgcgcttcgtcaccagcgtcggctccgggttcgcgcgcgtcgtcgcccccgtgtacaacgccgagatatcgcaggcggccacgcgtggcgtcctctcatccatgctcgacatattcatcaacgtcggcatcctgctcagctacgtgtccaactacgcgttcgcgggcctcccggtgcacatcgggtggcgtctcatgtacgccatcggcgtcatcccgcccgtgctcatcgccgccggggtgctcgtcatcatgccagagtcaccgcggtggctcgcgatgcagggccgccacgccgacgcgcgcgcggtgctgttgcgcacgtcggacagcccggcagacgccgacttccggctcggggagatcaagcgagccgccgacgcgccgtcgcccgctgctgcggcgcgccacggtggcggcggtgtctggagggagctcttcgtccggccatccaccacaaccacgagcgtgcggcgcgtcctcggctgcgtcctcgggctgcagttcttcgtgcaggcgtccggcgtcgacgccatcctcctctacagcccgctggtcttcaaggcggtcggcgtggcgtccacctccgccgtgctcggcgccaccgtgtccatcggagccgtcaagacgtgcttcgtcctcgtcgccatgctcttcaccgaccgcctcggccggcgcccgctcctcctcgccagcaccgccggcgtcgccgtgaccgcgaccgccctcgccgtgacgctgtgcgtgggcacggcgtcgccggcgacggccgcggcgtgcctggcgtccgtgctggccttcgtggccgcgtactccatcggctacgggtccgtggtgtcgacgtacagcgcggaggtcttgccgctacggctgcgcgcgcagggctccagcctgggcgtggccgtgaacaggctcacgtgcggccgtgcggggtggtcagcatgacgttcatctcgctcgccgacgccatcaccatgcccgggtgcttcttcctctacgctgcggtgacggcggctgcgtttgtgttcgtgtacacgcggctgccggagaccaagggccggagcctagaagacatggaagtgctcttccgcaagtgagggtggccggtggccacgtatagttgccattagcacaaggtcgcgttcggcagagttagtagaaattatccacaattaccagcagatttggaactccggtcccgcgcgctcgtcggtcgcagctacccccacggtcccacctagagatctcaacatcagatttgaacaccatatactacccatacctatgaagttatatatatctatctctatttccg

SEQ ID NO: 38643 - DNA, 2732 bp, Zea Mays
atcgaactctacgggcccaggcgcccagcgttcattcatcgccttcaccgccacacgctgccacgcgccatatataaccagccgttccctcctctcatgctcccctttccaaatccgtctccgccctcacgcacgcggcccaactagcctaacaaaccctagctagatttagaaaaaaaatttgtccccaatccgaaccgacgaggagctcgccgccgtgagatgtccgagtacgacgagcgctaccagggcaacggcgacatgcccgcagccgaaggcggctatccgcaggccgagtacgccgccgccgccgcgcctgccgccgggggttcgccgcccgcagacagcaagccctccgggttctccgaccacgccgacggccgctcctcccagcaccagcacgagacacaatcacatgacagtggttcctcgaaatctcgagaaagggaccgagaacgcgataagggcaaggatagggagcgtgacagggatcgtggccgagaaaaggggagggaccgagacagggataaggatcgtgaaagaagtgacagagatcgcgatcgccaccacagggaccatcgagagcgcagcgagaaaagggaacaccgtgatcgttctgatgatcgtgaccgtcaccgtgatggtcgtgaccgccaccgtgatgatcgtgattctgagaggagaagagatcgtgacagagatggtcatcgtaggcatcgctcccgctccccttctaagagtcgtgaccgtgaccgcagatctagatctcgttcacgctctcgatcaaagagcaagcgcgtgagtggttttgaccaagcacctccacaacatgcacttcctattgttgctgctggtgctatccctgaaggcaaccttggcgcactttgtcacctgctgccaatggattgagctgactgctgtagctttgatgtcagcttcctggtatcactgctcctattcccggggttggggtgcttccgaacttgtataatttggctgcaggacagttcaacccccttgttattcagccacaagccatgacacaacaggctacccggcatgctcggcgtgtctatgtgggtggacttcctccaacagctaatgagcagaccgttgccatattcttcaatggagttatggctgctattggaggaaacacagctggtccaggtgatgctgttcttaatgtctatataaaccatgacaagaaatttgcttttgtggagatgagatctgtggaggaagcaagcaatgcaatggctttagatggcataatgtttgagggagcaccagtgaaggttagaagaccaacggactataatccttccctagcagctgctcttggcccgagccagccaaatccaaatctcaatcttgctgctgttggcttaacacctggctctgctggaggattagaaggtccagaccggatctttgtaggtggtctaccatattatttcactgaggctcaagtgcgggagttgctcgagtccttcggacctctgcgtggattcgatcttgtgaaggatagagaaactggtaactcgaagggatatgccttctgtgtttaccaggatcttaatgtcaccgacattgcctgtgctgcccttaatggcatcaagatgggggacaagactcttactgttaggagggcaaaccaaggagcttctcagcctaggccagagcaagagagcatcctgctgcaggcacagcagcaggtgcaaatgcagaaactcgtataccaagtcggaggtgccctgccgacaaaagttgtctgcctgacacaggtagtgacagcagatgaactgagagacgatgaggaatacaatgacattgtggaggacatgagggaagaaggacgcaaatatgtcccacataatgccattgcagagtgttttatagtccgaccctatgcaatattggcaatcgggctttaacccacagaagacactattcttttgagtttgattaatcattatatcattagcctcttgcctatatatctctactcactaacacttggacaggtaacttggtgaaagttgtaattccacgacctgaccccagcgatgctccagttgctggtgttggaaaggtgtttttggaatatgcagatgtcgagggctcgaccaaagcaaagacggggatgcatgggcggaaatttggcgggaaccaggtggtggccgtgttctatcccgaggacaagttcgctgctgagcagtatgactgaaagttgtagaacctgttctagagttgcaacacacaatgaccagtcgataagcgataagtttgtgcaggaccattaggctttgtttgggtaattagtattgatcccaatccaaatctatatatgttaatgccttgttcagttattcttattccatatggattggagtgtatcggaatgagttttgacttgctatagatttaaacaaactcaatatcatccattccacatggattgacgaagaaatgaacaagccctaaggccttgttcggttattgatattacatgtgtattggagtgtattgggtggaattgagatgaattttgacttgttatagatttaaaccggctcaatcccacccaatacatgtagattatcaccaaaacgaacaagccctaaggtggattggggtcaatactagagtacccaaactaggccttagttggagggtttgtacttgctactagggcagctaagatgaattcattcgctgtttgttctggg

SEQ ID NO: 38644 - DNA, 2629 bp, Zea Mays
ccagcgttcattcatcgccttcaccgccacacgctgccacgcgccatatataaccagccgttccctcctctcatgctcccctttccaaatccgtctccgccctcacgcacgcggcccaactagcctaacaaaccctagctagatttagaaaaaaaatttgtccccaatccgaaccgacgaggagctcgccgccgtgagatgtccgagtacgacgagcgctaccagggcaacggcgacatgcccgcagccgaaggcggctatccgcaggccgagtacgccgccgccgccgcgcctgccgccgggggttcgccgcccgcagacagcaagccctccgggttctccgaccacgccgacggccgctcctcccagcaccagcacgagacacaatcacatgacagtggttcctcgaaatctcgagaaagggaccgagaacgcgataagggcaaggatagggagcgtgacagggatcgtggccgagaaaaggggagggaccgagacagggataaggatcgtgaaagaagtgacagagatcgcgatcgccaccacagggaccatcgagagcgcagcgagaaaagggaacaccgtgatcgttctgatgatcgtgaccgtcaccgtgatggtcgtgaccgccaccgtgatgatcgtgattctgagaggagaagagatcgtgacagagatggtcatcgtaggcatcgctcccgctccccttctaagagtcgtgaccgtgaccgcagatctagatctcgttcacgctctcgatcaaagagcaagcgcgtgagtggttttgaccaagcacctccacaacatgcacttcctattgttgctgctggtgctatccctgaaggcaaccttggcgcactttgtcacctgctgccaatggattgagctgactgctgtagctttgatgtcagcttcctggtatcactgctcctattcccggggttggggtgcttccgaacttgtataatttggctgcaggacagttcaacccccttgttattcagccacaagccatgacacaacaggctacccggcatgctcggcgtgtctatgtgggtggacttcctccaacagctaatgagcagaccgttgccatattcttcaatggagttatggctgctattggaggaaacacagctggtccaggtgatgctgttcttaatgtctatataaaccatgacaagaaatttgcttttgtggagatgagatctgtggaggaagcaagcaatgcaatggctttagatggcataatgtttgagggagcaccagtgaaggttagaagaccaacggactataatccttccctagcagctgctcttggcccgagccagccaaatccaaatctcaatcttgctgctgttggcttaacacctggctctgctggaggattagaaggtccagaccggatctttgtaggtggtctaccatattatttcactgaggctcaagtgcgggagttgctcgagtccttcggacctctgcgtggattcgatcttgtgaaggatagagaaactggtaactcgaagggatatgccttctgtgtttaccaggatcttaatgtcaccgacattgcctgtgctgcccttaatggcatcaagatgggggacaagactcttactgttaggagggcaaaccaaggagcttctcagcctaggccagagcaagagagcatcctgctgcaggcacagcagcaggtgcaaatgcagaaactcgtataccaagtcggaggtgccctgccgacaaaagttgtctgcctgacacaggtagtgacagcagatgaactgagagacgatgaggaatacaatgacattgtggaggacatgagggaagaaggacgcaaatatggtaacttggtgaaagttgtaattccacgacctgaccccagcgatgctccagttgctggtgttggaaaggtgtttttggaatatgcagatgtcgagggctcgaccaaagcaaagacggggatgcatgggcggaaatttggcgggaaccaggtggtggccgtgttctatcccgaggacaagttcgctgctgagcagtatgactgaaagttgtagaacctgttctagagttgcaacacacaatgtgtgtgttttttttaaaatctttgagggtaccgttttctcttgaatttgaatcttatctagttataagtttggtgcaggaccagtcgataagcgataagtttgtgcaggaccattaggctttgtttgggtaattagtattgatcccaatccaaatctatatatgttaatgccttgttcagttattcttattccatatggattggagtgtatcggaatgagttttgacttgctatagatttaaacaaactcaatatcatccattccacatggattgacgaagaaatgaacaagccctaaggccttgttcggttattgatattacatgtgtattggagtgtattgggtggaattgagatgaattttgacttgttatagatttaaaccggctcaatcccacccaatacatgtagattatcaccaaaacgaacaagccctaaggtggattggggtcaatactagagtacccaaactaggccttagttggagggtttgtacttgctactagggcagctaagatgaattcattcgctgtttgttctggg

SEQ ID NO: 38645 - DNA, 2647 bp, Zea Mays
ccagcgttcattcatcgccttcaccgccacacgctgccacgcgccatatataaccagccgttccctcctctcatgctcccctttccaaatccgtctccgccctcacgcacgcggcccaactagcctaacaaaccctagctagatttagaaaaaaaatttgtccccaatccgaaccgacgaggagctcgccgccgtgagatgtccgagtacgacgagcgctaccagggcaacggcgacatgcccgcagccgaaggcggctatccgcaggccgagtacgccgccgccgccgcgcctgccgccgggggttcgccgcccgcagacagcaagccctccgggttctccgaccacgccgacggccgctcctcccagcaccagcacgagacacaatcacatgacagtggttcctcgaaatctcgagaaagggaccgagaacgcgataagggcaaggatagggagcgtgacagggatcgtggccgagaaaaggggagggaccgagacagggataaggatcgtgaaagaagtgacagagatcgcgatcgccaccacagggaccatcgagagcgcagcgagaaaagggaacaccgtgatcgttctgatgatcgtgaccgtcaccgtgatggtcgtgaccgccaccgtgatgatcgtgattctgagaggagaagagatcgtgacagagatggtcatcgtaggcatcgctcccgctccccttctaagagtcgtgaccgtgaccgcagatctagatctcgttcacgctctcgatcaaagagcaagcgcgtgagtggttttgaccaagcacctccacaacatgcacttcctattgttgctgctggtgctatccctgaaggcaaccttggcgcactttgtcacctgctgccaatggattgagctgactgctgtagctttgatgtacgaggacactatctggtcagcttcctggtatcactgctcctattcccggggttggggtgcttccgaacttgtataatttggctgcaggacagttcaacccccttgttattcagccacaagccatgacacaacaggctacccggcatgctcggcgtgtctatgtgggtggacttcctccaacagctaatgagcagaccgttgccatattcttcaatggagttatggctgctattggaggaaacacagctggtccaggtgatgctgttcttaatgtctatataaaccatgacaagaaatttgcttttgtggagatgagatctgtggaggaagcaagcaatgcaatggctttagatggcataatgtttgagggagcaccagtgaaggttagaagaccaacggactataatccttccctagcagctgctcttggcccgagccagccaaatccaaatctcaatcttgctgctgttggcttaacacctggctctgctggaggattagaaggtccagaccggatctttgtaggtggtctaccatattatttcactgaggctcaagtgcgggagttgctcgagtccttcggacctctgcgtggattcgatcttgtgaaggatagagaaactggtaactcgaagggatatgccttctgtgtttaccaggatcttaatgtcaccgacattgcctgtgctgcccttaatggcatcaagatgggggacaagactcttactgttaggagggcaaaccaaggagcttctcagcctaggccagagcaagagagcatcctgctgcaggcacagcagcaggtgcaaatgcagaaactcgtataccaagtcggaggtgccctgccgacaaaagttgtctgcctgacacaggtagtgacagcagatgaactgagagacgatgaggaatacaatgacattgtggaggacatgagggaagaaggacgcaaatatggtaacttggtgaaagttgtaattccacgacctgaccccagcgatgctccagttgctggtgttggaaaggtgtttttggaatatgcagatgtcgagggctcgaccaaagcaaagacggggatgcatgggcggaaatttggcgggaaccaggtggtggccgtgttctatcccgaggacaagttcgctgctgagcagtatgactgaaagttgtagaacctgttctagagttgcaacacacaatgtgtgtgttttttttaaaatctttgagggtaccgttttctcttgaatttgaatcttatctagttataagtttggtgcaggaccagtcgataagcgataagtttgtgcaggaccattaggctttgtttgggtaattagtattgatcccaatccaaatctatatatgttaatgccttgttcagttattcttattccatatggattggagtgtatcggaatgagttttgacttgctatagatttaaacaaactcaatatcatccattccacatggattgacgaagaaatgaacaagccctaaggccttgttcggttattgatattacatgtgtattggagtgtattgggtggaattgagatgaattttgacttgttatagatttaaaccggctcaatcccacccaatacatgtagattatcaccaaaacgaacaagccctaaggtggattggggtcaatactagagtacccaaactaggccttagttggagggtttgtacttgctactagggcagctaagatgaattcattcgctgtttgttctggg

SEQ ID NO: 38646 - DNA, 2845 bp, Zea Mays
gttcattcatcgccttcaccgccacacgctgccacgcgccatatataaccagccgttccctcctctcatgctcccctttccaaatccgtctccgccctcacgcacgcggcccaactagcctaacaaaccctagctagatttagaaaaaaaatttgtccccaatccgaaccgacgaggagctcgccgccgtgagatgtccgagtacgacgagcgctaccagggcaacggcgacatgcccgcagccgaaggcggctatccgcaggccgagtacgccgccgccgccgcgcctgccgccgggggttcgccgcccgcagacagcaagccctccgggttctccgaccacgccgacggccgctcctcccagcaccagcacgagacacaatcacatgacagtggttcctcgaaatctcgagaaagggaccgagaacgcgataagggcaaggatagggagcgtgacagggatcgtggccgagaaaaggggagggaccgagacagggataaggatcgtgaaagaagtgacagagatcgcgatcgccaccacagggaccatcgagagcgcagcgagaaaagggaacaccgtgatcgttctgatgatcgtgaccgtcaccgtgatggtcgtgaccgccaccgtgatgatcgtgattctgagaggagaagagatcgtgacagagatggtcatcgtaggcatcgctcccgctccccttctaagagtcgtgaccgtgaccgcagatctagatctcgttcacgctctcgatcaaagagcaagcgcgtgagtggttttgaccaagcacctccacaacatgcacttcctattgttgctgctggtgctatccctgaaggcaaccttggcgcactttgtcacctgctgccaatggattgagctgactgctgtagctttgatcttcctggtatcactgctcctattcccggggttggggtgcttccgaacttgtataatttggctgcaggacagttcaacccccttgttattcagccacaagccatgacacaacaggctacccggcatgctcggcgtgtctatgtgggtggacttcctccaacagctaatgagcagaccgttgccatattcttcaatggagttatggctgctattggaggaaacacagctggtccaggtgatgctgttcttaatgtctatataaaccatgacaagaaatttgcttttgtggagatgagatctgtggaggaagcaagcaatgcaatggctttagatggcataatgtttgagggagcaccagtgaaggttagaagaccaacggactataatccttccctagcagctgctcttggcccgagccagccaaatccaaatctcaatcttgctgctgttggcttaacacctggctctgctggaggattagaaggtccagaccggatctttgtaggtggtctaccatattatttcactgaggctcaagtgcgggagttgctcgagtccttcggacctctgcgtggattcgatcttgtgaaggatagagaaactggtaactcgaagggatatgccttctgtgtttaccaggatcttaatgtcaccgacattgcctgtgctgcccttaatggcatcaagatgggggacaagactcttactgttaggagggcaaaccaaggagcttctcagcctaggccagagcaagagagcatcctgctgcaggcacagcagcaggtgcaaatgcagaaactcgtataccaagtcggaggtgccctgccgacaaaagttgtctgcctgacacaggtagtgacagcagatgaactgagagacgatgaggaatacaatgacattgtggaggacatgagggaagaaggacgcaaatatggtaaaccgcacgaggcccatcgagttctcttataccttctttgttttaaaagctcttacattcagctgttatgattatgattgcctaccctcagttactgaattggtttccttttgtgtttttgtcttttgtgtgtcttttttgtagtcccacataatgccattgcagagtgttttatagtccgaccctatgcaatattggcaatcgggctttaacccacagaagacactattcttttgagtttgattaatcattatatcattagcctcttgcctatatatctctactcactaacacttggacaggtaacttggtgaaagttgtaattccacgacctgaccccagcgatgctccagttgctggtgttggaaaggtgtttttggaatatgcagatgtcgagggctcgaccaaagcaaagacggggatgcatgggcggaaatttggcgggaaccaggtggtggccgtgttctatcccgaggacaagttcgctgctgagcagtatgactgaaagttgtagaacctgttctagagttgcaacacacaatgaccagtcgataagcgataagtttgtgcaggaccattaggctttgtttgggtaattagtattgatcccaatccaaatctatatatgttaatgccttgttcagttattcttattccatatggattggagtgtatcggaatgagttttgacttgctatagatttaaacaaactcaatatcatccattccacatggattgacgaagaaatgaacaagccctaaggccttgttcggttattgatattacatgtgtattggagtgtattgggtggaattgagatgaattttgacttgttatagatttaaaccggctcaatcccacccaatacatgtagattatcaccaaaacgaacaagccctaaggtggattggggtcaatactagagtacccaaactaggccttagttggagggtttgtacttgctactagggcagctaagatgaattcattcgctgtttgttctggg

SEQ ID NO: 38647 - DNA, 2797 bp, Zea Mays
atcgccttcaccgccacacgctgccacgcgccatatataaccagccgttccctcctctcatgctcccctttccaaatccgtctccgccctcacgcacgcggcccaactagcctaacaaaccctagctagatttagaaaaaaaatttgtccccaatccgaaccgacgaggagctcgccgccgtgagatgtccgagtacgacgagcgctaccagggcaacggcgacatgcccgcagccgaaggcggctatccgcaggccgagtacgccgccgccgccgcgcctgccgccgggggttcgccgcccgcagacagcaagccctccgggttctccgaccacgccgacggccgctcctcccagcaccagcacgagacacaatcacatgacagtggttcctcgaaatctcgagaaagggaccgagaacgcgataagggcaaggatagggagcgtgacagggatcgtggccgagaaaaggggagggaccgagacagggataaggatcgtgaaagaagtgacagagatcgcgatcgccaccacagggaccatcgagagcgcagcgagaaaagggaacaccgtgatcgttctgatgatcgtgaccgtcaccgtgatggtcgtgaccgccaccgtgatgatcgtgattctgagaggagaagagatcgtgacagagatggtcatcgtaggcatcgctcccgctccccttctaagagtcgtgaccgtgaccgcagatctagatctcgttcacgctctcgatcaaagagcaagcgcgtgagtggttttgaccaagcacctccacaacatgcacttcctattgttgctgctggtgctatccctgaaggcaaccttggcgcactttgtcacctgctgccaatggattgagctgactgctgtagctttgatgtacgaggacactatctggtttggtcagcttcctggtatcactgctcctattcccggggttggggtgcttccgaacttgtataatttggctgcaggacagttcaacccccttgttattcagccacaagccatgacacaacaggctacccggcatgctcggcgtgtctatgtgggtggacttcctccaacagctaatgagcagaccgttgccatattcttcaatggagttatggctgctattggaggaaacacagctggtccaggtgatgctgttcttaatgtctatataaaccatgacaagaaatttgcttttgtggagatgagatctgtggaggaagcaagcaatgcaatggctttagatggcataatgtttgagggagcaccagtgaaggttagaagaccaacggactataatccttccctagcagctgctcttggcccgagccagccaaatccaaatctcaatcttgctgctgttggcttaacacctggctctgctggaggattagaaggtccagaccggatctttgtaggtggtctaccatattatttcactgaggctcaagtgcgggagttgctcgagtccttcggacctctgcgtggattcgatcttgtgaaggatagagaaactggtaactcgaagggatatgccttctgtgtttaccaggatcttaatgtcaccgacattgcctgtgctgcccttaatggcatcaagatgggggacaagactcttactgttaggagggcaaaccaaggagcttctcagcctaggccagagcaagagagcatcctgctgcaggcacagcagcaggtgcaaatgcagaaactcgtataccaagtcggaggtgccctgccgacaaaagttgtctgcctgacacaggtagtgacagcagatgaactgagagacgatgaggaatacaatgacattgtggaggacatgagggaagaaggacgcaaatatgtcccacataatgccattgcagagtgttttatagtccgaccctatgcaatattggcaatcgggctttaacccacagaagacactattcttttgagtttgattaatcattatatcattagcctcttgcctatatatctctactcactaacacttggacaggtaacttggtgaaagttgtaattccacgacctgaccccagcgatgctccagttgctggtgttggaaaggtgtttttggaatatgcagatgtcgagggctcgaccaaagcaaagacggggatgcatgggcggaaatttggcgggaaccaggtggtggccgtgttctatcccgaggacaagttcgctgctgagcagtatgactgaaagttgtagaacctgttctagagttgcaacacacaatgtgtgtgttttttttaaaatctttgagggtaccgttttctcttgaatttgaatcttatctagttataagtttggtgcaggaccagtcgataagcgataagtttgtgcaggaccattaggctttgtttgggtaattagtattgatcccaatccaaatctatatatgttaatgccttgttcagttattcttattccatatggattggagtgtatcggaatgagttttgacttgctatagatttaaacaaactcaatatcatccattccacatggattgacgaagaaatgaacaagccctaaggccttgttcggttattgatattacatgtgtattggagtgtattgggtggaattgagatgaattttgacttgttatagatttaaaccggctcaatcccacccaatacatgtagattatcaccaaaacgaacaagccctaaggtggattggggtcaatactagagtacccaaactaggccttagttggagggtttgtacttgctactagggcagctaagatgaattcattcgctgtttgttctggg

SEQ ID NO: 38648 - DNA, 2546 bp, Zea Mays
atcgccttcaccgccacacgctgccacgcgccatatataaccagccgttccctcctctcatgctcccctttccaaatccgtctccgccctcacgcacgcggcccaactagcctaacaaaccctagctagatttagaaaaaaaatttgtccccaatccgaaccgacgaggagctcgccgccgtgagatgtccgagtacgacgagcgctaccagggcaacggcgacatgcccgcagccgaaggcggctatccgcaggccgagtacgccgccgccgccgcgcctgccgccgggggttcgccgcccgcagacagcaagccctccgggttctccgaccacgccgacggccgctcctcccagcaccagcacgagacacaatcacatgacagtggttcctcgaaatctcgagaaagggaccgagaacgcgataagggcaaggatagggagcgtgacagggatcgtggccgagaaaaggggagggaccgagacagggataaggatcgtgaaagaagtgacagagatcgcgatcgccaccacagggaccatcgagagcgcagcgagaaaagggaacaccgtgatcgttctgatgatcgtgaccgtcaccgtgatggtcgtgaccgccaccgtgatgatcgtgattctgagaggagaagagatcgtgacagagatggtcatcgtaggcatcgctcccgctccccttctaagagtcgtgaccgtgaccgcagatctagatctcgttcacgctctcgatcaaagagcaagcgcgtgagtggttttgaccaagcacctccacaacatgcacttcctattgttgctgctggtgctatccctgcttcctggtatcactgctcctattcccggggttggggtgcttccgaacttgtataatttggctgcaggacagttcaacccccttgttattcagccacaagccatgacacaacaggctacccggcatgctcggcgtgtctatgtgggtggacttcctccaacagctaatgagcagaccgttgccatattcttcaatggagttatggctgctattggaggaaacacagctggtccaggtgatgctgttcttaatgtctatataaaccatgacaagaaatttgcttttgtggagatgagatctgtggaggaagcaagcaatgcaatggctttagatggcataatgtttgagggagcaccagtgaaggttagaagaccaacggactataatccttccctagcagctgctcttggcccgagccagccaaatccaaatctcaatcttgctgctgttggcttaacacctggctctgctggaggattagaaggtccagaccggatctttgtaggtggtctaccatattatttcactgaggctcaagtgcgggagttgctcgagtccttcggacctctgcgtggattcgatcttgtgaaggatagagaaactggtaactcgaagggatatgccttctgtgtttaccaggatcttaatgtcaccgacattgcctgtgctgcccttaatggcatcaagatgggggacaagactcttactgttaggagggcaaaccaaggagcttctcagcctaggccagagcaagagagcatcctgctgcaggcacagcagcaggtgcaaatgcagaaactcgtataccaagtcggaggtgccctgccgacaaaagttgtctgcctgacacaggtagtgacagcagatgaactgagagacgatgaggaatacaatgacattgtggaggacatgagggaagaaggacgcaaatatggtaacttggtgaaagttgtaattccacgacctgaccccagcgatgctccagttgctggtgttggaaaggtgtttttggaatatgcagatgtcgagggctcgaccaaagcaaagacggggatgcatgggcggaaatttggcgggaaccaggtggtggccgtgttctatcccgaggacaagttcgctgctgagcagtatgactgaaagttgtagaacctgttctagagttgcaacacacaatgtgtgtgttttttttaaaatctttgagggtaccgttttctcttgaatttgaatcttatctagttataagtttggtgcaggaccagtcgataagcgataagtttgtgcaggaccattaggctttgtttgggtaattagtattgatcccaatccaaatctatatatgttaatgccttgttcagttattcttattccatatggattggagtgtatcggaatgagttttgacttgctatagatttaaacaaactcaatatcatccattccacatggattgacgaagaaatgaacaagccctaaggccttgttcggttattgatattacatgtgtattggagtgtattgggtggaattgagatgaattttgacttgttatagatttaaaccggctcaatcccacccaatacatgtagattatcaccaaaacgaacaagccctaaggtggattggggtcaatactagagtacccaaactaggccttagttggagggtttgtacttgctactagggcagctaagatgaattcattcgctgtttgttctggg

SEQ ID NO: 38649 - DNA, 2046 bp, Zea Mays
gtacgaggacactatctggtcagcttcctggtatcactgctcctattcccggggttggggtgcttccgaacttgtataatttggctgcaggacagttcaacccccttgttattcagccacaagccatgacacaacaggctacccggcatgctcggcgtgtctatgtgggtggacttcctccaacagctaatgagcagaccgttgccatattcttcaatggagttatggctgctattggaggaaacacagctggtccaggtgatgctgttcttaatgtctatataaaccatgacaagaaatttgcttttgtggagatgagatctgtggaggaagcaagcaatgcaatggctttagatggcataatgtttgagggagcaccagtgaaggttagaagaccaacggactataatccttccctagcagctgctcttggcccgagccagccaaatccaaatctcaatcttgctgctgttggcttaacacctggctctgctggaggattagaaggtccagaccggatctttgtaggtggtctaccatattatttcactgaggctcaagtgcgggagttgctcgagtccttcggacctctgcgtggattcgatcttgtgaaggatagagaaactggtaactcgaagggatatgccttctgtgtttaccaggatcttaatgtcaccgacattgcctgtgctgcccttaatggcatcaagatgggggacaagactcttactgttaggagggcaaaccaaggagcttctcagcctaggccagagcaagagagcatcctgctgcaggcacagcagcaggtgcaaatgcagaaactcgtataccaagtcggaggtgccctgccgacaaaagttgtctgcctgacacaggtagtgacagcagatgaactgagagacgatgaggaatacaatgacattgtggaggacatgagggaagaaggacgcaaatatggtaaaccgcacgaggcccatcgagttctcttataccttctttgttttaaaagctcttacattcagctgttatgattatgattgcctaccctcagttactgaattggtttccttttgtgtttttgtcttttgtgtgtcttttttgtagtcccacataatgccattgcagagtgttttatagtccgaccctatgcaatattggcaatcgggctttaacccacagaagacactattcttttgagtttgattaatcattatatcattagcctcttgcctatatatctctactcactaacacttggacaggtaacttggtgaaagttgtaattccacgacctgaccccagcgatgctccagttgctggtgttggaaaggtgtttttggaatatgcagatgtcgagggctcgaccaaagcaaagacggggatgcatgggcggaaatttggcgggaaccaggtggtggccgtgttctatcccgaggacaagttcgctgctgagcagtatgactgaaagttgtagaacctgttctagagttgcaacacacaatgtgtgtgttttttttaaaatctttgagggtaccgttttctcttgaatttgaatcttatctagttataagtttggtgcaggaccagtcgataagcgataagtttgtgcaggaccattaggctttgtttgggtaattagtattgatcccaatccaaatctatatatgttaatgccttgttcagttattcttattccatatggattggagtgtatcggaatgagttttgacttgctatagatttaaacaaactcaatatcatccattccacatggattgacgaagaaatgaacaagccctaaggccttgttcggttattgatattacatgtgtattggagtgtattgggtggaattgagatgaattttgacttgttatagatttaaaccggctcaatcccacccaatacatgtagattatcaccaaaacgaacaagccctaaggtggattggggtcaatactagagtacccaaactaggccttagttggagggtttgtacttgctactagggcagctaagatgaattcattcgctgtttgttctggg

SEQ ID NO: 38650 - DNA, 1986 bp, Zea Mays
cgaggacactatctggtcagcttcctggtatcactgctcctattcccggggttggggtgcttccgaacttgtataatttggctgcaggacagttcaacccccttgttattcagccacaagccatgacacaacaggctacccggcatgctcggcgtgtctatgtgggtggacttcctccaacagctaatgagcagaccgttgccatattcttcaatggagttatggctgctattggaggaaacacagctggtccaggtgatgctgttcttaatgtctatataaaccatgacaagaaatttgcttttgtggagatgagatctgtggaggaagcaagcaatgcaatggctttagatggcataatgtttgagggagcaccagtgaaggttagaagaccaacggactataatccttccctagcagctgctcttggcccgagccagccaaatccaaatctcaatcttgctgctgttggcttaacacctggctctgctggaggattagaaggtccagaccggatctttgtaggtggtctaccatattatttcactgaggctcaagtgcgggagttgctcgagtccttcggacctctgcgtggattcgatcttgtgaaggatagagaaactggtaactcgaagggatatgccttctgtgtttaccaggatcttaatgtcaccgacattgcctgtgctgcccttaatggcatcaagatgggggacaagactcttactgttaggagggcaaaccaaggagcttctcagcctaggccagagcaagagagcatcctgctgcaggcacagcagcaggtgcaaatgcaggtagtgacagcagatgaactgagagacgatgaggaatacaatgacattgtggaggacatgagggaagaaggacgcaaatatggtaaaccgcacgaggcccatcgagttctcttataccttctttgttttaaaagctcttacattcagctgttatgattatgattgcctaccctcagttactgaattggtttccttttgtgtttttgtcttttgtgtgtcttttttgtagtcccacataatgccattgcagagtgttttatagtccgaccctatgcaatattggcaatcgggctttaacccacagaagacactattcttttgagtttgattaatcattatatcattagcctcttgcctatatatctctactcactaacacttggacaggtaacttggtgaaagttgtaattccacgacctgaccccagcgatgctccagttgctggtgttggaaaggtgtttttggaatatgcagatgtcgagggctcgaccaaagcaaagacggggatgcatgggcggaaatttggcgggaaccaggtggtggccgtgttctatcccgaggacaagttcgctgctgagcagtatgactgaaagttgtagaacctgttctagagttgcaacacacaatgtgtgtgttttttttaaaatctttgagggtaccgttttctcttgaatttgaatcttatctagttataagtttggtgcaggaccagtcgataagcgataagtttgtgcaggaccattaggctttgtttgggtaattagtattgatcccaatccaaatctatatatgttaatgccttgttcagttattcttattccatatggattggagtgtatcggaatgagttttgacttgctatagatttaaacaaactcaatatcatccattccacatggattgacgaagaaatgaacaagccctaaggccttgttcggttattgatattacatgtgtattggagtgtattgggtggaattgagatgaattttgacttgttatagatttaaaccggctcaatcccacccaatacatgtagattatcaccaaaacgaacaagccctaaggtggattggggtcaatactagagtacccaaactaggccttagttggagggtttgtacttgctactagggcagctaagatgaattcattcgctgtttgttctggg

SEQ ID NO: 38651 - DNA, 1764 bp, Zea Mays
tatctgcttcctggtatcactgctcctattcccggggttggggtgcttccgaacttgtataatttggctgcaggacagttcaacccccttgttattcagccacaagccatgacacaacaggctacccggcatgctcggcgtgtctatgtgggtggacttcctccaacagctaatgagcagaccgttgccatattcttcaatggagttatggctgctattggaggaaacacagctggtccaggtgatgctgttcttaatgtctatataaaccatgacaagaaatttgcttttgtggagatgagatctgtggaggaagcaagcaatgcaatggctttagatggcataatgtttgagggagcaccagtgaagaaggtccagaccggatctttgtaggtggtctaccatattatttcactgaggctcaagtgcgggagttgctcgagtccttcggacctctgcgtggattcgatcttgtgaaggatagagaaactggtaactcgaagggatatgccttctgtgtttaccaggatcttaatgtcaccgacattgcctgtgctgcccttaatggcatcaagatgggggacaagactcttactgttaggagggcaaaccaaggagcttctcagcctaggccagagcaagagagcatcctgctgcaggcacagcagcaggtgcaaatgcagaaactcgtataccaagtcggaggtgccctgccgacaaaagttgtctgcctgacacaggtagtgacagcagatgaactgagagacgatgaggaatacaatgacattgtggaggacatgagggaagaaggacgcaaatatgtcccacataatgccattgcagagtgttttatagtccgaccctatgcaatattggcaatcgggctttaacccacagaagacactattcttttgagtttgattaatcattatatcattagcctcttgcctatatatctctactcactaacacttggacaggtaacttggtgaaagttgtaattccacgacctgaccccagcgatgctccagttgctggtgttggaaaggtgtttttggaatatgcagatgtcgagggctcgaccaaagcaaagacggggatgcatgggcggaaatttggcgggaaccaggtggtggccgtgttctatcccgaggacaagttcgctgctgagcagtatgactgaaagttgtagaacctgttctagagttgcaacacacaatgtgtgtgttttttttaaaatctttgagggtaccgttttctcttgaatttgaatcttatctagttataagtttggtgcaggaccagtcgataagcgataagtttgtgcaggaccattaggctttgtttgggtaattagtattgatcccaatccaaatctatatatgttaatgccttgttcagttattcttattccatatggattggagtgtatcggaatgagttttgacttgctatagatttaaacaaactcaatatcatccattccacatggattgacgaagaaatgaacaagccctaaggccttgttcggttattgatattacatgtgtattggagtgtattgggtggaattgagatgaattttgacttgttatagatttaaaccggctcaatcccacccaatacatgtagattatcaccaaaacgaacaagccctaaggtggattggggtcaatactagagtacccaaactaggccttagttggagggtttgtacttgctactagggcagctaagatgaattcattcgctgtttgttctggg

SEQ ID NO: 38652 - DNA, 1719 bp, Zea Mays
gcttcctggtatcactgctcctattcccggggttggggtgcttccgaacttgtataatttggctgcaggacagttcaacccccttgttattcagccacaagccatgacacaacaggctacccggcatgctcggcgtgtctatgtgggtggacttcctccaacagctaatgagcagaccgttgccatattcttcaatggagttatggctgctattggaggaaacacagctggtccaggtgatgctgttcttaatgtctatataaaccatgacaagaaatttgcttttgtggagatgagatctgtggaggaagcaagcaatgcaatggctttagatggcataatgtttgagggagcaccagtgaaggttagaagaccaacggactataatccttccctagcagctgctcttggcccgagccagccaaatccaaatctcaatcttgctgctgttggcttaacacctggctctgctggaggattagaaggtccagaccggatctttgtaggtggtctaccatattatttcactgaggctcaagtgcgggagttgctcgagtccttcggacctctgcgtggattcgatcttgtgaaggatagagaaactggtaactcgaagggatatgccttctgtgtttaccaggatcttaatgtcaccgacattgcctgtgctgcccttaatggcatcaagatgggggacaagactcttactgttaggagggcaaaccaaggagcttctcagcctaggccagagcaagagagcatcctgctgcaggcacagcagcaggtgcaaatgcagaaactcgtataccaagtcggaggtgccctgccgacaaaagttgtctgcctgacacaggtagtgacagcagatgaactgagagacgatgaggaatacaatgacattgtggaggacatgagggaagaaggacgcaaatatggtaacttggtgaaagttgtaattccacgacctgaccccagcgatgctccagttgctggtgttggaaaggtgtttttggaatatgcagatgtcgagggctcgaccaaagcaaagacggggatgcatgggcggaaatttggcgggaaccaggtggtggccgtgttctatcccgaggacaagttcgctgctgagcagtatgactgaaagttgtagaacctgttctagagttgcaacacacaatgtgtgtgttttttttaaaatctttgagggtaccgttttctcttgaatttgaatcttatctagttataagtttggtgcaggaccagtcgataagcgataagtttgtgcaggaccattaggctttgtttgggtaattagtattgatcccaatccaaatctatatatgttaatgccttgttcagttattcttattccatatggattggagtgtatcggaatgagttttgacttgctatagatttaaacaaactcaatatcatccattccacatggattgacgaagaaatgaacaagccctaaggccttgttcggttattgatattacatgtgtattggagtgtattgggtggaattgagatgaattttgacttgttatagatttaaaccggctcaatcccacccaatacatgtagattatcaccaaaacgaacaagccctaaggtggattggggtcaatactagagtacccaaactaggccttagttggagggtttgtacttgctactagggcagctaagatgaattcattcgctgtttgttctggg

SEQ ID NO: 38653 - DNA, 2654 bp, Zea Mays
aaactgatgaatgcctgaaacgtaatgagaaaattcttcttcctaagtggcaggatgcattcgaggatactccataggccgagtagaaagccactgttcttgaaaaacagggtgcattgaaggacacttatatattgaagaagatgataaatcatacttgtgcgtgaattatcttttttttgtttgatattgaagtaatttgaggtagagggaggctaaactagaactactccctatgcgtaaggtaaaaacgataagtagacttgatttgatcgattgtgggggcttcaatcggtcgtagcccttcatctatataaaggggaggtctggacccgttacacgtcgtttcctgagttaatcccgcggatttagctaacaaatcccgcaagaaactcggaaccctaaaaggttctgcgcacgcgcggaccgtcgagcctcaggttgacgaacatatgccccgtgccttttggtggaggttgacgaaccaaaagcatatgaactaagtctgatgcgagtcaccggcttttcaatccaatatggtgatcattcaatagagccccaatgcataaaggccgtttcggattgcatctttctcggctatgaccatttgatcaatggatcaaaatgaatagaatggaggtgccctcagcccgaatagacgaagggactatgcatataccacggtttcatcgtcgtatcattccatatttgaacatgacaatatatcgatgatgagtaggcgggtggaaagcatcctggcatcacaggatgaataggcgatgcttgttgcgtcgccttttgggccgttttgttttagcgggtgacctaggtttcttcgttggccgatcactattttgagaggtacagtttagtcaggttcataaagacggtccagaaggccggcctgtttgtacatctctgcatcggtccctacatttgtggcgagtggaacttcggtggcttcccagtttggttgaagtatgtaccggactaccgggcatcagcttcaggacagacaacgaacctttcaagatggccatgcagggtttcactcagaaaattgtgggaatgatgaagagcgaaaacctctttgcatcccaaggtgtcccaattatcctctctcagattgagaatgaatacgggccagaaggcagggagtttcgtcccgcaggtcaggcatatatcaacaaggcagcaaagatggcagtcggattgggtactggtgtgccgtgggtgatgtggaaggaggaggatgcacctgatccagtgatcaatgcatgcaatggtttctactgtgatgcattttctcctaacaaaccttacaagcccacaatgtggactgaagcttggagtggctagttcacggaatttgttgggaccatccgccaacggccggttgaagatcttgcatttgctcgatttgtacaaaagggtggttcttttatcaattactacatgtaccatggaggaacaaattttgggcgcactgctgggggtcccttcatcacaacaagctatgattatgatgctccaattgatgaatatggactttttagagaaccaaagcacagtcatcttaaagaactccacagagctgttaagttatgcgagcaggctttggtttctgttgacccagcaattactacccttgtaccatgcaagagctttccttgcaaactacaattctaactcctatgcgaatgttgtattcaacaatgagcaatacagcctaccacattggtcgattagcatccttcctgattgcaaaaatgttgtttttaacagtgtcacagttggtgttcagacatctcagatgcaaatgtgtggagatgatgcctcatcaatgacgtggaagaggtatgatgaggaggtttattctctggcagctgctccattgctcaccacgactagtttgcttgagcagcttaatgtcacgagagacaacagtgattatttgtggtacatcaccagtgttgacataagctcatctgaaaactttctacaaggtggcggcaagcctctgtctctcagtgtgcagtctgctggtcatgccttgcatgtctttgtcaatggacagcttcaaggttctgcatatggtactagggaagattgaagaatcaaatacaatggcaatgctaaccttcgagccggcactaacaaaatttccatgctaagtgttgcctgtggattgccgaatgttggagtgcattatgagacgtggaacactggtgttggtggtcctgttgtgcttcataggctggatgaaggttcacgagaccttacttggcagacttggtcctatcaggtcgcccgagtgctacttgtgctaccgagtgctgctgtgcagcctatgctacctggtgtgtgactgcgtggtgactgcttggtgcttggctgcttgctgccgagtgtaagacgccaggaccaggaggcaggaccgccggagcagcgagtaggagccaggagcccaacctaggtccatgtggcgagcacagatgtgcagagaagataggcagacaacaaaatctaccttgtagttcaagtatacccttacccaaacccaatactttgggtacttgaaatttcaggtacctaaaatattcagctcaagttcggtttgacctgttagatacctgaaatatataaaacccgaa

SEQ ID NO: 38654 - DNA, 1376 bp, Zea Mays
atggccatgcagggtttcactcagaaaattgtgggaatgatgaagagcgaaaacctctttgcatcccaaggtgtcccaattatcctctctcagattgagaatgaatacgggccagaaggcagggagtttcgtcccgcaggtcaggcatatatcaacaaggcagcaaagatggcagtcggattgggtactggtgtgccgtgggtgatgtggaaggaggaggatgcacctgatccagtgatcaatgcatgcaatggtttctactgtgatgcattttctcctaacaaaccttacaagcccacaatgtggactgaagcttggagtggctagttcacggaatttgttgggaccatccgccaacggccggttgaagatcttgcatttgctcgatttgtacaaaagggtggttcttttatcaattactacatgtaccatggaggaacaaattttgggcgcactgctgggggtcccttcatcacaacaagctatgattatgatgctccaattgatgaatatggttggtgttcagacatctcagatgcaaatgtgtggagatgatgcctcatcaatgacgtggaagaggtatgatgaggaggtttattctctggcagctgctccattgctcaccacgactagtttgcttgagcagcttaatgtcacgagagacaacagtgattatttgtggtacatcaccagtgttgacataagctcatctgaaaactttctacaaggtggcggcaagcctctgtctctcagtgtgcagtctgctggtcatgccttgcatgtctttgtcaatggacagcttcaaggttctgcatatggtactagggaagattgaagaatcaaatacaatggcaatgctaaccttcgagccggcactaacaaaatttccatgctaagtgttgcctgtggattgccgaatgttggagtgcattatgagacgtggaacactggtgttggtggtcctgttgtgcttcataggctggatgaaggttcacgagaccttacttggcagacttggtcctatcaggtcgcccgagtgctacttgtgctaccgagtgctgctgtgcagcctatgctacctggtgtgtgactgcgtggtgactgcttggtgcttggctgcttgctgccgagtgtaagacgccaggaccaggaggcaggaccgccggagcagcgagtaggagccaggagcccaacctaggtccatgtggcgagcacagatgtgcagagaagataggcagacaacaaaatctaccttgtagttcaagtatacccttacccaaacccaatactttgggtacttgaaatttcaggtacctaaaatattcagctcaagttcggtttgacctgttagatacctgaaatatataaaacccgaa

SEQ ID NO: 38655 - DNA, 1656 bp, Zea Mays
atggccatgcagggtttcactcagaaaattgtgggaatgatgaagagcgaaaacctctttgcatcccaaggtgtcccaattatcctctctcagattgagaatgaatacgggccagaaggcagggagtttcgtcccgcaggtcaggcatatatcaacaaggcagcaaagatggcagtcggattgggtactggtgtgccgtgggtgatgtggaaggaggaggatgcacctgatccagtgatcaatgcatgcaatggtttctactgtgatgcattttctcctaacaaaccttacaagcccacaatgtggactgaagcttggagtggctagttcacggaatttgttgggaccatccgccaacggccggttgaagatcttgcatttgctcgatttgtacaaaagggtggttcttttatcaattactacatgtaccatggaggaacaaattttgggcgcactgctgggggtcccttcatcacaacaagctatgattatgatgctccaattgatgaatatggactttttagagaaccaaagcacagtcatcttaaagaactccacagagctgttaagttatgcgagcaggctttggtttctgttgacccagcaattactacccttgtaccatgcaagaggcccacgtcttccaatctccatctggttgtgcagctttccttgcaaactacaattctaactcctatgcgaatgttgtattcaacaatgagcaatacagcctaccacattggtcgattagcatccttcctgattgcaaaaatgttgtttttaacagtgtcacagttggtgttcagacatctcagatgcaaatgtgtggagatgatgcctcatcaatgacgtggaagaggtatgatgaggaggtttattctctggcagctgctccattgctcaccacgactagtttgcttgagcagcttaatgtcacgagagacaacagtgattatttgtggtacatcaccagtgttgacataagctcatctgaaaactttctacaaggtggcggcaagcctctgtctctcagtgtgcagtctgctggtcatgccttgcatgtctttgtcaatggacagcttcaaggttctgcatatggtactagggaagattgaagaatcaaatacaatggcaatgctaaccttcgagccggcactaacaaaatttccatgctaagtgttgcctgtggattgccgaatgttggagtgcattatgagacgtggaacactggtgttggtggtcctgttgtgcttcataggctggatgaaggttcacgagaccttacttggcagacttggtcctatcaggtcgcccgagtgctacttgtgctaccgagtgctgctgtgcagcctatgctacctggtgtgtgactgcgtggtgactgcttggtgcttggctgcttgctgccgagtgtaagacgccaggaccaggaggcaggaccgccggagcagcgagtaggagccaggagcccaacctaggtccatgtggcgagcacagatgtgcagagaagataggcagacaacaaaatctaccttgtagttcaagtatacccttacccaaacccaatactttgggtacttgaaatttcaggtacctaaaatattcagctcaagttcggtttgacctgttagatacctgaaatatataaaacccgaa

SEQ ID NO: 38656 - DNA, 1522 bp, Zea Mays
atggccatgcagggtttcactcagaaaattgtgggaatgatgaagagcgaaaacctctttgcatcccaaggtgtcccaattatcctctctcagattgagaatgaatacgggccagaaggcagggagtttcgtcccgcaggtcaggcatatatcaacaaggcagcaaagatggcagtcggattgggtactggtgtgccgtgggtgatgtggaaggaggaggatgcacctgatccagtgatcaatgcatgcaatggtttctactgtgatgcattttctcctaacaaaccttacaagcccacaatgtggactgaagcttggagtggctataccatggaggaacaaattttgggcgcactgctgggggtcccttcatcacaacaagctatgattatgatgctccaattgatgaatatggactttttagagaaccaaagcacagtcatcttaaagaactccacagagctgttaagttatgcgagcaggctttggtttctgttgacccagcaattactacccttgtaccatgcaagagctttccttgcaaactacaattctaactcctatgcgaatgttgtattcaacaatgagcaatacagcctaccacattggtcgattagcatccttcctgattgcaaaaatgttgtttttaacagtgtcacagttggtgttcagacatctcagatgcaaatgtgtggagatgatgcctcatcaatgacgtggaagaggtatgatgaggaggtttattctctggcagctgctccattgctcaccacgactagtttgcttgagcagcttaatgtcacgagagacaacagtgattatttgtggtacatcaccagtgttgacataagctcatctgaaaactttctacaaggtggcggcaagcctctgtctctcagtgtgcagtctgctggtcatgccttgcatgtctttgtcaatggacagcttcaaggttctgcatatggtactagggaagattgaagaatcaaatacaatggcaatgctaaccttcgagccggcactaacaaaatttccatgctaagtgttgcctgtggattgccgaatgttggagtgcattatgagacgtggaacactggtgttggtggtcctgttgtgcttcataggctggatgaaggttcacgagaccttacttggcagacttggtcctatcaggtcgcccgagtgctacttgtgctaccgagtgctgctgtgcagcctatgctacctggtgtgtgactgcgtggtgactgcttggtgcttggctgcttgctgccgagtgtaagacgccaggaccaggaggcaggaccgccggagcagcgagtaggagccaggagcccaacctaggtccatgtggcgagcacagatgtgcagagaagataggcagacaacaaaatctaccttgtagttcaagtatacccttacccaaacccaatactttgggtacttgaaatttcaggtacctaaaatattcagctcaagttcggtttgacctgttagatacctgaaatatataaaacccgaa

SEQ ID NO: 38657 - DNA, 748 bp, Zea Mays
cctaattcttccagagctttacgggggactaagggcagcttatagattatataatctggattataatctaaaatatataatttagattataatctagatatattataatctaaatgtagttgtttggtagtttagattatataaatatagattattcacaaagacaacaacacacttgtttgtttatttgaggtgggaaaagaaggatgacatatattgtaatttctatttacataaacatgggtagtgggtcttttgccaaaataatctcaaataagctacacttgaggagattatgagattatcataatctgggctttagattatataatctgaacccataatctagttgtttgtttacctattggattatttgcgctggattatataatctggagagattataatctgaaacaaacagggcctaagctaaccataaaaaaagagtgaggaccttaacagatccatggagtccctatcacaagcaggtcgtccacattctaaaaaagcgaaaagaaccgagatcctgctatacagagaaaggagcgtcgcgggatagttaccagacgcgggagccagggccgtagttcttagggtgcgagttccacacgttggagtggcccatcgcgtcgtgctccttgctcctcctcttccttccgtcacggcggcggcggcggcgggtggatactatatatacatagcgaggtgtggcaggcgtggaagaaaccctactctgtgaccgggcctt

SEQ ID NO: 38658 - DNA, 991 bp, Zea Mays
atttccttcttcttgttgccgactgaatgataagattgcgcgcgagaaggggggaaacatcggcttgaaccttcaccgacaacaggtactaaccgaggcatggacagggagcagatgaggatggccatcctgaaccaagaacggatcttcagacaacaggtactactaaccgaggccacatttcatatccgcggtttatgtatcgcgactaaaaacgcgctgaacaatctctctgcatcttctctcgcctctgctgcgaggttacctactaccgttaccccccagtttcttctcaccgtactctctgtctgcctgcgttcctaccgatcgaatcgaccaggtacacgagctgcaccggctgtaccacgcccagaagcagctgatgatgcagcaggcgcagacggctcctgctccggcggtcgtcgacgccgagccgagaccgagaccgccgcagctggatatctggtgcggcgagagggcgacagcaagtcctcagcagcacatcatcagcttccacgaggccgcagcacctgcggctgcgctggccaaggaatgcaaccttgagctgacactggcgaccggccgggcaagcagcagcagcagcagcgacgcggaaaggcgacagggaataataaagcggctcaaggcggcgccgtccaactcggactccggcgcgaccgcggtgtcgtccacgtcgaccgactccgagctggcgccgttccgggaggtggtggaggacgtggcgacgccggtgaggtttcgcggcgaggttagcgggaggaggaggatggacgaggtggggcagggtccgtggttgtaccagcctcagcctgagtacggcgtgatgacgatgctgtactctacgtcgtaggatctggggatttggggttagagttgggagggagacagcactgtttgtgttttacatgcacaactgtacatcacagattcacagaggtgtttgacaaggcaacgaagagattaaaaaaag

SEQ ID NO: 38659 - DNA, 2123 bp, Zea Mays
gcaaccaaactttttgtggtgtgttcctacactatgtagacctacatgtatcatttgtggacaattttaacagagttttcaatcgttagtagatttagttcgtttatttgaatttcttcggaaaatttagatttgaactgtaggtcagtcgaaacttgaaaaaccgtgcatgcaaaaatgatattcatgttacttagcataagttacgaccgattccaggagcggaccggaaacttcgagcaacatgctcactaaacatgaccgtgaacttgccatacacatgtttaaaaattgtataaaacacaaacaaagtcagaaaatcctgaaacttgtccacttgtcatgatatcatatgtacaggctgtgataaaaattttagaatgtttggagaaagttgtgggacactatgtgtagaaacctaagagaactacattgaaactctaaacatgaccgaaacaaggctaatttacaaaaaaaaaaaaaaaagttggtgctgagcagacgctggctgcacgggcgctcgctgttgacaggcacggcgctggggcgggaggcggaagggccgttacggcctagtatggcccgcgccatacctcctcgacccggcccaagagaggtgccctagcttccctcccaatcccaccaggccgccgccaccacatcgcgccctcgcccgcttgccgccgaccctgaccggctgagcccctgaccagctcgtccaggcggacagcggcctgcggcaggccagcgcccagccaacagcgactgcctgactggtgagaggtgcgcatggtatggccggcctgatcagcttgcgcgccggtccgaggagttcaccgtcacttgcccggtcgtcgtccgcctgggcatcaccaccggcttcacatgtggcggttcgtttgccaagcccactgtttcgctgtgccaaacttcgtaggagccgtagtctactggcagcagcactggagatctctaaggacggttccgccgcggttctggccaacagcctgccttcccaaggggctatcgagacgttgcggaatgccgatgcagtgtgtttcgacgttgatagcaccgtcatcctggacgagggcattgacgagcttgctgatttctgcggggcggggaaagctgttgctgaatggactgcaaaggccatgacagggactgttccgtttgaggaggcgctggcagccaggctgtctttaatcaagccatctctctcccaggtggaggagtgcctggagaagaggccaccaaggatttctcctggaatggctgatttggttaagaagctaaaatccaataatattgatgtgttccttgtgtcaggaggcttccgacacatgatcaaaccagtggcatttgagcttggcattcctcctgaaaacatcactgcaaaccaattgttatttggcacattgggggagtacgccggatttgatcccacagagcccacttcacgcagtgggggtaaagcaaaagcagtgcagcaaataaaacaggaccatggctacaagacagttgttatgattggtgatggcgcaactgatctggaggctcggcaacctggcggagcagacttgttcatctgttacgccggggttcagatgagagagccagtcgcagcacaagctgactgggtggtttttgattttcaagagctgatcactaagttgccatgaattcattacctaccgcaatttatgaacctttgcattgtcggctaaataattgcggccgcattttaaagctgtagatttcactagcaattcttggagataaactgaattattacccggctgtaaagtattttttttatttgttttcccgcattatttgtatgatcctgaaccatgaatgcggaggttgtgttccgacgttgtcagtgaaattgtcctctaagcaaatgttgagtatgtgagtgattaatgaatcacatcacagtttattaagcgccggattcgaaccgtcgtttatgcaagtattattgttggattgagccaagaatgctcacatgctgtctgattcacaccgtcgtttatgcaagtattgttgacttgttgattcgcaccattcgttggtttctcatgagcttgattggtatttctcatgaacttgat

SEQ ID NO: 38660 - DNA, 1327 bp, Zea Mays
cggggccattccctttccctatggattttcaacgttaacgatcaagcgaggagatttccagtctgtgtgtttgggcgtgaggtgcgcatggtatggccggcctgatcagcttgcgcgccggtccgaggagttcaccgtcacttgcccggtcgtcgtccgcctgggcatcaccaccggcttcacatgtggcggttcgtttgccaagcccactgtttcgctgtgccaaacttcgtaggagccgtagtctactggcagcagcactggagatctctaaggacggttccgccgcggttctggccaacagcctgccttcccaaggggctatcgagacgttgcggaatgccgatgcagtgtgtttcgacgttgatagcaccgtcatcctggacgagggcattgacgagcttgctgatttctgcggggcggggaaagctgttgctgaatggactgcaaaggccatgacagggactgttccgtttgaggaggcgctggcagccaggctgtctttaatcaagccatctctctcccaggtggaggagtgcctggagaagaggccaccaagccagtggcatttgagcttggcattcctcctgaaaacatcactgcaaaccaattgttatttggcacattgggggagtacgccggatttgatcccacagagcccacttcacgcagtgggggtaaagcaaaagcagtgcagcaaataaaacaggaccatggctacaagacagttgttatgattggtgatggcgcaactgatctggaggctcggcaacctggcggagcagacttgttcatctgttacgccggggttcagatgagagagccagtcgcagcacaagctgactgggtggtttttgattttcaagagctgatcactaagttgccatgaattcattacctaccgcaatttatgaacctttgcattgtcggctaaataattgcggccgcattttaaagctgtagatttcactagcaattcttggagataaactgaattattacccggctgtaaagtattttttttatttgttttcccgcattatttgtatgatcctgaaccatgaatgcggaggttgtgttccgacgttgtcagtgaaattgtcctctaagcaaatgttgagtatgtgagtgattaatgaatcacatcacagtttattaagcgccggattcgaaccgtcgtttatgcaagtattattgttggattgagccaagaatgctcacatgctgtctgattcacaccgtcgtttatgcaagtattgttgacttgttgattcgcaccattcgttggtttctcatgagcttgattggtatttctcatgaacttgat

SEQ ID NO: 38661 - DNA, 1439 bp, Zea Mays
gggccattccctttccctatggattttcaacgttaacgatcaagcgaggagatttccagtctgtgtgtttgggcgtgaggtgcgcatggtatggccggcctgatcagcttgcgcgccggtccgaggagttcaccgtcacttgcccggtcgtcgtccgcctgggcatcaccaccggcttcacatgtggcggttcgtttgccaagcccactgtttcgctgtgccaaacttcgtaggagccgtagtctactggcagcagcactggagatctctaaggacggttccgccgcggttctggccaacagcctgccttcccaaggggctatcgagacgttgcggaatgccgatgcagtgtgtttcgacgttgatagcaccgtcatcctggacgagggcattgacgagcttgctgatttctgcggggcggggaaagctgttgctgaatggactgcaaaggccatgacagggactgttccgtttgaggaggcgctggcagccaggctgtctttaatcaagccatctctctcccaggtggaggagtgcctggagaagaggccaccaagaactctcttttggtttgcaggatttctcctggaatggctgatttggttaagaagctaaaatccaataatattgatgtgttccttgtgtcaggaggcttccgacacatgatcaaaccagtggcatttgagcttggcattcctcctgaaaacatcactgcaaaccaattgttatttggcacattgggggagtacgccggatttgatcccacagagcccacttcacgcagtgggggtaaagcaaaagcagtgcagcaaataaaacaggaccatggctacaagacagttgttatgattggtgatggcgcaactgatctggaggctcggcaacctggcggagcagacttgttcatctgttacgccggggttcagatgagagagccagtcgcagcacaagctgactgggtggtttttgattttcaagagctgatcactaagttgccatgaattcattacctaccgcaatttatgaacctttgcattgtcggctaaataattgcggccgcattttaaagctgtagatttcactagcaattcttggagataaactgaattattacccggctgtaaagtattttttttatttgttttcccgcattatttgtatgatcctgaaccatgaatgcggaggttgtgttccgacgttgtcagtgaaattgtcctctaagcaaatgttgagtatgtgagtgattaatgaatcacatcacagtttattaagcgccggattcgaaccgtcgtttatgcaagtattattgttggattgagccaagaatgctcacatgctgtctgattcacaccgtcgtttatgcaagtattgttgacttgttgattcgcaccattcgttggtttctcatgagcttgattggtatttctcatgaacttgat

SEQ ID NO: 38662 - DNA, 1409 bp, Zea Mays
ttccctttccctatggattttcaacgttaacgatcaagcgaggagatttccagtctgtgtgtttgggcgtgaggtgcgcatggtatggccggcctgatcagcttgcgcgccggtccgaggagttcaccgtcacttgcccggtcgtcgtccgcctgggcatcaccaccggcttcacatgtggcggttcgtttgccaagcccactgtttcgctgtgccaaacttcgtaggagccgtagtctactggcagcagcactggagatctctaaggacggttccgccgcggttctggccaacagcctgccttcccaaggggctatcgagacgttgcggaatgccgatgcagtgtgtttcgacgttgatagcaccgtcatcctggacgagggcattgacgagcttgctgatttctgcggggcggggaaagctgttgctgaatggactgcaaaggccatgacagggactgttccgtttgaggaggcgctggcagccaggctgtctttaatcaagccatctctctcccaggtggaggagtgcctggagaagaggccaccaaggatttctcctggaatggctgatttggttaagaagctaaaatccaataatattgatgtgttccttgtgtcaggaggcttccgacacatgatcaaatggcatttgagcttggcattcctcctgaaaacatcactgcaaaccaattgttatttggcacattgggggagtacgccggatttgatcccacagagcccacttcacgcagtgggggtaaagcaaaagcagtgcagcaaataaaacaggaccatggctacaagacagttgttatgattggtgatggcgcaactgatctggaggctcggcaacctggcggagcagacttgttcatctgttacgccggggttcagatgagagagccagtcgcagcacaagctgactgggtggtttttgattttcaagagctgatcactaagttgccatgaattcattacctaccgcaatttatgaacctttgcattgtcggctaaataattgcggccgcattttaaagctgtagatttcactagcaattcttggagataaactgaattattacccggctgtaaagtattttttttatttgttttcccgcattatttgtatgatcctgaaccatgaatgcggaggttgtgttccgacgttgtcagtgaaattgtcctctaagcaaatgttgagtatgtgagtgattaatgaatcacatcacagtttattaagcgccggattcgaaccgtcgtttatgcaagtattattgttggattgagccaagaatgctcacatgctgtctgattcacaccgtcgtttatgcaagtattgttgacttgttgattcgcaccattcgttggtttctcatgagcttgattggtatttctcatgaacttgat

SEQ ID NO: 38663 - DNA, 1408 bp, Zea Mays
tttccctatggattttcaacgttaacgatcaagcgaggagatttccagtctgtgtgtttgggcgtgaggtgcgcatggtatggccggcctgatcagcttgcgcgccggtccgaggagttcaccgtcacttgcccggtcgtcgtccgcctgggcatcaccaccggcttcacatgtggcggttcgtttgccaagcccactgtttcgctgtgccaaacttcgtaggagccgtagtctactggcagcagcactggagatctctaaggacggttccgccgcggttctggccaacagcctgccttcccaaggggctatcgagacgttgcggaatgccgatgcagtgtgtttcgacgttgatagcaccgtcatcctggacgagggcattgacgagcttgctgatttctgcggggcggggaaagctgttgctgaatggactgcaaaggccatgacagggactgttccgtttgaggaggcgctggcagccaggctgtctttaatcaagccatctctctcccaggtggaggagtgcctggagaagaggccaccaaggatttctcctggaatggctgatttggttaagaagctaaaatccaataatattgatgtgttccttgtgtcaggaggcttccgacacatgatcaaaccagtggcatttgagcttggcattcctcctgaaaacatcactgcaaaccaattgttatttggcacattgggggagtacgccggatttgatcccacagagcccacttcacgcagtgggggtaaagcaaaagcagtgcagcaaataaaacaggaccatggctacaagacagttgttatgattggtgatggcgcaactgatctggaggctcggcaacctggcggagcagacttgttcatctgttacgccggggttcagatgagagagccagtcgcagcacaagctgactgggtggtttttgattttcaagagctgatcactaagttgccatgaattcattacctaccgcaatttatgaacctttgcattgtcggctaaataattgcggccgcattttaaagctgtagatttcactagcaattcttggagataaactgaattattacccggctgtaaagtattttttttatttgttttcccgcattatttgtatgatcctgaaccatgaatgcggaggttgtgttccgacgttgtcagtgaaattgtcctctaagcaaatgttgagtatgtgagtgattaatgaatcacatcacagtttattaagcgccggattcgaaccgtcgtttatgcaagtattattgttggattgagccaagaatgctcacatgctgtctgattcacaccgtcgtttatgcaagtattgttgacttgttgattcgcaccattcgttggtttctcatgagcttgattggtatttctcatgaacttgat

SEQ ID NO: 38664 - DNA, 884 bp, Zea Mays
cccatctccgggccctactcatgatttctcctggaatggctgatttggttaagaagctaaaatccaataatattgatgtgttccttgtgtcaggaggcttccgacacatgatcaaaccagtggcatttgagcttggcattcctcctgaaaacatcactgcaaaccaattgttatttggcacattgggggagtacgccggatttgatcccacagagcccacttcacgcagtgggggtaaagcaaaagcagtgcagcaaataaaacaggaccatggctacaagacagttgttatgattggtgatggcgcaactgatctggaggctcggcaacctggcggagcagacttgttcatctgttacgccggggttcagatgagagagccagtcgcagcacaagctgactgggtggtttttgattttcaagagctgatcactaagttgccatgaattcattacctaccgcaatttatgaacctttgcattgtcggctaaataattgcggccgcattttaaagctgtagatttcactagcaattcttggagataaactgaattattacccggctgtaaagtattttttttatttgttttcccgcattatttgtatgatcctgaaccatgaatgcggaggttgtgttccgacgttgtcagtgaaattgtcctctaagcaaatgttgagtatgtgagtgattaatgaatcacatcacagtttattaagcgccggattcgaaccgtcgtttatgcaagtattattgttggattgagccaagaatgctcacatgctgtctgattcacaccgtcgtttatgcaagtattgttgacttgttgattcgcaccattcgttggtttctcatgagcttgattggtatttctcatgaacttgat

SEQ ID NO: 38665 - DNA, 2523 bp, Zea Mays
taaccttttccatcgtaatggaaccacagtacagcaggaacagatgcaaccgcactttctttgatctccctctcccctgcgcgcgcgctgagcctcacaggacgagagcacacggttcctctgttcttgttcgtttcaaactccatgctagctacacagagccctcaacaatcatatataaattacagactttattagctgaagaatccgatcccatttgtcttgaacagcactgaacactcatatagtaactagctatggccaatcacacgttgacagcaagaacatatgctccgatccgtgcagagcagtcatggagagacacgaacaatggacagcaaaacgcaaccccctgcctaatgaacacatttatttattcgttccaagagtatagttcaccatgcatgttcctgtcaaatccaaagcaacaccaccaccattcttcacatgacgctacacgccgccgacgggtcgtcgtcgctgaacgtccggcagcccctgtaggccccgcacggcgctggcaacgggcggacggtcgtgccgtacagcctgccgcagcagtagcacctgcagccttcgtagtagccctggtagcacggcgcgcagcacgggcacccgcacggccccacgggcggcgccgccggccacgacgggatctccaccgtcgggatcacgcactccgccggcatcagcatcggcatcggcggcggcggcggtctctcgttcccaggcatcggcattggcattggcggcggcgggtggtgctggtgctgcggcgacggcggcaggtccatggggggcctcatctccttgggcggcgggggagacatgggtggctgaggctccagctccgctctgggcggcctctcctccacgtactgcggctgaggcaccaccgccgccatcccgcggtcaggcggaggaggcgggtggtggtggacgtggaccggggacggcggcatcatcgcctcgggcggcggaggtcccggcgctgtctccggcggcggcggcggcggaggcgacggaggccgctcggtcggcggcggctgctgctgctgctgctgcttgttcttgttcttgttcttgctcttcccgccgctcctcactggcgccggcgccggcgcgggtggcccgtcgtccggcacgttctgtggaggaggaggcttgccgccgccgccgccgccgccgttggcgtcgacgatgtagacgtcccgcaccaccttgccgcccttgcagcggagcttgcacgcgagccgctgcgggtcgaacgggcccaccatggtgaccgtcttgctcttgtcgtcgaaggagatggtgcggatcctctcatggtctgcataatccacacgagtgaaacaggatgactgagactgagatcgagcgctcgtagaggatatatcatcgtcccatcccatgcagcttgttgctcgtgctcgtaataataataaggaaaggattattaagcgtagtatggattggaggagagtatatatataccttgcagttggcagagaatcttgcggatcttgtggtagcacttgcggcaatcaaggtcaaccacgatgattagcgtcgacatctgcaattcaaaccacttgaaatacaaaataataaagggaacgaagaaatgaaaaccattaattgcagctggtggcacgcacacacacgagaaaccgaaatgaaaaccattaatcacacgtacgtacgttaccaataattaagcaaatatatgcgtttctgtttcagtacgtaactctccgtcgtccccatgcatgaattcgatcagcctcgaaccatacatgtatatatttttggccatactattacaattcagaatatatatatatatatatatatatgtgtatatatatatatgtatatgtatgtaaataacaggacaattatatatgcatattcgcttgtcaaagtgcccacgaaagaatatatatattctctcgccaaagagaaagaaataaggcaccaaaaagcatatatatgcgaatgcgatacgaacacaggaaccagctagctagctagattctgaaataaagaagaatgggggttttttattcctatacagatcgatcaacatatagtatagtataggtggagagcttttcgatatattcctgctgcgctccactgcactgttgctgcttccgttttcgaaagaagaaaggaaaaaaaatagaacagcatgtgcagatcgacgagcacgcaaattaattcaggtacatcgaaacgtaaacttcgcataaagaacaaacaatttaaaagcgtgcatcgaaacagaaaccatctacggtacgactgtttttatgtgtgcagaacgactcgatcttgtcagcttcaaattctgcaaggtgagtttgggagagagagagagagagagagagagagagagagagagagagagagagagagagagagagagagagagatcatcaccttctctgccatgctgcttaattactagagaggcgtttctcacatgtggagaccgctagggagagggagagtgag

SEQ ID NO: 38666 - DNA, 4927 bp, Zea Mays
ctgcgctgcgctgcgctggaatggatagggtgtctcgcagctccagacggccacgtcggccagccgtcggccactcgcttcgactggcaggctcctacccttgcagacaaaaaacgcaaacacgaggacgaggacgaaggttcgttcagttcaagaccagacgaggaggaagagaggcgcgcaagcggtccggtctcatggcgcccttccccgccctccgctcatcgtcgccggtggccgccgccgcggcgccgtcgctcggtcgcgtgtccggccacgcatctgcggcgcccagcaagaggcgcgtcgtctcctgcagggccgtcagcagcaggtcgctgtccatcatcaggtgcgagcagagcgcgaagaagggcggcgggccggacacatggctgggccgcgcggccatggtcggcttcgcctccgcgatcgccgtcgaggtggccaccggcaagggcttccttcagaacttgggcgtgggtactccggcgccgacgctggcgctggccgtgtcggggctcgtcgtcggcctcgccgtcttcttcctgctgcagtcgggaggaggcacgcgagactgacgactgatggaacccatgagctgagctgagcacgcgtcgaacatcgtctccccactcgacatcagtcgttgctgtaatggttggtgaagcgaagatgaaaacccaggacatatatcagcatcatgtcatgtgtaacaaagacgacaactctcatgtgttggtgttgtctgctgctgttgtacgacatccgccgctcgcttgtacgaccgtactgcacttcatctgccggccgggcgagcacagccgttctttaataacatgacgggcgcatgcacacgccagctgactcttcatgtcgattgcgtccagacaattttgttaggactggtttgttattaggagcagacctgccgtttccatgtgcttgcttcacggagcacggcagctctgtaaacggcagactcgacgtagcttgcacgcacaggggttttcagctaaaaaatcctctagcgacagttcattggttgcccagttcaccgactgcctttataaacagggagctcgagctcgagtggtagcagcacaggcacaagtgcggtgccataagtgacagccacctcagtctctgtctgtggagctctctctcgcgcgcgttgccatctcgcaggttcttcatctcgtcgctctgttcaggcgcaggcggcgacaggagatggacggggagcaggcggcgcggtgggcggcggcgcaggagggggttcccgtcggggcggaccttgtcgcggcggcgctgcggcagctgcgcttcctcgcggcggtggaccgccgccggtggctctacgacgagggcccgctgctcgaccgggccatacgcaggtacaaagcatgctggcttccgcttcttgacaagcacactaagggtgtggttgtagatggtccattggttgttcctcttgattgtgagtggatatggcactgccatcgccttaacccggttcagtacataagggactgcaagaaagtgtatggcagaatactgaacaataacaacgttgagtcgtccactcaaacaaagtcgacacttgagtcagaaaaagtttggaaagagctgtatcctgaggagcccttcgaattgttgttcacaagaacctttgacactgccgtggatgtcaaccctgcaggtgcagaggaggacattacctatgatctggtctcggctgttaagagacaatcctctttctattatcaggttggaacaccaacaatgcatgatccacggtttctccaagaagctctagctcgatacaaggcgtttctttacctgatcaagatgaatcaagaaaaaggattgcagcgcttccgtgtaccaacctatgatgtggatctgttgtggcacactcaccagctgcatcctattacctaccgcaacgacatggtgaagcttcttggaaaagttctggagcatgatgacaccgatgctgatcgatctgaagggaagaaactcgatgttggatttaccgagactactgaacagttcgagagtacctttggtgtaagatactggaaggctggatgtatgtaccgtggcaacgtgccatctcctgtgacatccactcctcagacattcagtgctgaggttggtactgggtcttacatctgcaaagcccagaaagatcttaatgcccttgatgtaacagttgtagagttatatttacaaattgtagacatcaagaatttaccatctgctgttcaaaaagaaaatgtgtatgtacggttcgccaagaatcaatcagatatgttcatcagtgacggcggcaggttggatatctcaacagttacagggaagaacaccggagtttgtttacagtgtgaacctaccggagaactcattcttgcagtaatggttgatcaattatcaaagaaaccagaaccgatagggaaggtttctttcccactgcacgatttgacagggcctgattctaagctctccttcgagaagtggtttgaactgaaagctcatggtgggcatgccgcttcacctcctgttagtcttcgtgttgcagcttctgctactgtcccaagcagcgctcagaaggtgttcaccatggtcaggatggagccattctctctcaagtcatgtcttttgccacattccatcaaggatcagaacacgggcagctggactcgtttcgtaaatgattgtggtaccgagcttatccgtctccagataagagagcacaaggcgaagaatagcatggccgtcgttcgagaattggttggagtattgaagtcaacaaaaaagcaaattcaacttgcagaattcaaggaaaacaagtggaccctaaaagactccaacttgccaataagtcatggcactgatggcagtctactcgatctcaaaggtgacaaccatctgatcaagctttatcggggaaggaaactggaatacgagcgcaaatgttgcagcgctcactctgaggacgtatcagctgttactgctgtaaagttctgtgctgaacatccatatggcaaagccgttgccttgctagacactgaagctcagcttatcatggtgaacgaggattggctcctacttccatggatctccatatcagtcctgtttatggacggcgatggcggtacgaaacttggcggcggtgccatggttcagaaaggtacagtgtttggatccgacactagcatggtgctagagacacagaccgtcggagcagggagcgtggcatccaatctagcacaatgtggcacttgcagcgccgtgttcggtggtgatgataaagaaatggcgaactgcaaggttgagcatgcgagctctggcgcttctcgcacggttgttgcaagtggtgagaatgggcacactgagactgctggctgtggaggcggctgtggtagcaattgtggacccatgatggctgaagaccccaaggccggcaatgccaagtccggaggctgtggttcggggtgtggtggtggctgcggtggcgcgggaggttgtgggaccatggccaacgaaggccaatccaggtccggaggtgttggcaccttgttgagctccaacgccatgggtggtgagggccagcaggcccattcagctggctgtggctccggctgtggtggtggctgcggcagcggcatggtcatcgaaggctccaaggttaacaacgttaacgccatgtccggcggctgtggctctggttgtggtggtggttgcggcagtggcatggtcatcgaaggctccaaggccaacaacgccatgtccggtggctgtggctctggttgcggtggtggatgcggcagcggcatgctcatcgaaggctccaaggccaacaaagccatgtccggcggctgtggctctggttgtggtggtggttgcggcagcggcatggtcatcgaatgctccaaggccaacaacaccatgtccggcggctgtggctctggttgcggtggtggttgcggcagtggcatggtcatcgaaggctccaaggccaacaacgccatgtccggcggctgtggctctggttgtggtggtggttgcggcagtggcatggtcaacgaaggctccaaggccgccaacaccatgtccggcggctgtggctccggttgcggtggtggttgcggtgccctgttcaacgctagcactgctgccggagagggcctgcacaataagtcggctgggtgcggcggcggcgggtgcggctccgggtgcggcggtggcggcggctgtggtagcggcatggctatcgaaggcttcaaggccaaccacgccaagtctggtggctgcggctctggctgcggtggtggtggctgcggcaccctgttcagctccagcgctgcggccagccaaggccagtccagatccggcggctgcggctctggctgcggtggtggaggctgtggcactggcagcatggtcgctgaaggctccaacggcgggaacgccaagtccggcggctgtggcggcggttgcggtggcggaggtggctgcggcggcggaggctgtggcgggggttgcggcgccgtgttcaacgcatgatctcggtggagtggaggcatttgtgcagacatgcagtcgtcgtcgtctactgctagataccacatgctacagcatactgtgtattgctgtgcataatctactaaataaaaggaatgaataaacaatggatggatcggctgcctccgtggcgtttctgcaaacgaaaaatctcggtgttgttgggtgcagggatgaggatgaaaacgatttcaaacggtccgaaacgatatcgtctatttaacggttggttaagaaattacctgatttatgaattaattaatttattaatgaatttcatattaatagatatttaaaatttaatttttaaatgcgataattttaatatagtcacgag

SEQ ID NO: 38667 - DNA, 935 bp, Zea Mays
ggatagggtgtctcgcagctccagacggccacgtcggccagccgtcggccactcgcttcgactggcaggctcctacccttgcagacaaaaaacgcaaacacgaggacgaggacgaaggttcgttcagttcaagaccagacgaggaggaagagaggcgcgcaagcggtccggtctcatggcgcccttccccgccctccgctcatcgtcgccggtggccgccgccgcggcgccgtcgctcggtcgcgtgtccggccacggcgttctgtctatgtcttatattcacttgtgagtgagtgagttccgtcgtcgaaactcgaaacgcagcatctgcggcgcccagcaagaggcgcgtcgtctcctgcagggccgtcagcagcaggtcgctgtccatcatcaggtgcgagcagagcgcgaagaagggcggcgggccggacacatggctgggccgcgcggccatggtcggcttcgcctccgcgatcgccgtcgaggtggccaccggcaagggcttccttcagaacttgggcgtgggtactccggcgccgacgctggcgctggccgtgtcggggctcgtcgtcggcctcgccgtcttcttcctgctgcagtcgggaggaggcacgcgagactgacgactgatggaacccatgagctgagctgagcacgcgtcgaacatcgtctccccactcgacatcagtcgttgctgtaatggttggtgaagcgaagatgaaaacccaggacatatatcagcatcatgtcatgtgtaacaaagacgacaactctcatgtgttggtgttgtctgctgctgttgtacgacatccgccgctcgcttgtacgaccgtactgcacttcatctgccggccgggcgagcacagccgttctttaataacatgacgggcgcatgcacacgccagctgactcttcatgtcgattgcgtccag

SEQ ID NO: 38668 - DNA, 940 bp, Zea Mays
ggatagggtgtctcgcagctccagacggccacgtcggccagccgtcggccactcgcttcgactggcaggctcctacccttgcagacaaaaaacgcaaacacgaggacgaggacgaaggttcgttcagttcaagaccagacgaggaggaagagaggcgcgcaagcggtccggtctcatggcgcccttccccgccctccgctcatcgtcgccggtggccgccgccgcggcgccgtcgctcggtcgcgtgtccggccacgttcaggcgttctgtctatgtcttatattcacttgtgagtgagtgagttccgtcgtcgaaactcgaaacgcagcatctgcggcgcccagcaagaggcgcgtcgtctcctgcagggccgtcagcagcaggtcgctgtccatcatcaggtgcgagcagagcgcgaagaagggcggcgggccggacacatggctgggccgcgcggccatggtcggcttcgcctccgcgatcgccgtcgaggtggccaccggcaagggcttccttcagaacttgggcgtgggtactccggcgccgacgctggcgctggccgtgtcggggctcgtcgtcggcctcgccgtcttcttcctgctgcagtcgggaggaggcacgcgagactgacgactgatggaacccatgagctgagctgagcacgcgtcgaacatcgtctccccactcgacatcagtcgttgctgtaatggttggtgaagcgaagatgaaaacccaggacatatatcagcatcatgtcatgtgtaacaaagacgacaactctcatgtgttggtgttgtctgctgctgttgtacgacatccgccgctcgcttgtacgaccgtactgcacttcatctgccggccgggcgagcacagccgttctttaataacatgacgggcgcatgcacacgccagctgactcttcatgtcgattgcgtccag

SEQ ID NO: 38669 - DNA, 5317 bp, Zea Mays
ggatagggtgtctcgcagctccagacggccacgtcggccagccgtcggccactcgcttcgactggcaggctcctacccttgcagacaaaaaacgcaaacacgaggacgaggacgaaggttcgttcagttcaagaccagacgaggaggaagagaggcgcgcaagcggtccggtctcatggcgcccttccccgccctccgctcatcgtcgccggtggccgccgccgcggcgccgtcgctcggtcgcgtgtccggccacgcatctgcggcgcccagcaagaggcgcgtcgtctcctgcagggccgtcagcagcaggtcgctgtccatcatcaggtgcgagcagagcgcgaagaagggcggcgggccggacacatggctgggccgcgcggccatggtcggcttcgcctccgcgatcgccgtcgaggtggccaccggcaagggcttccttcagaacttgggcgtgggtactccggcgccgacgctggcgctggccgtgtcggggctcgtcgtcggcctcgccgtcttcttcctgctgcagtcgggaggaggcacgcgagactgacgactgatggaacccatgagctgagctgagcacgcgtcgaacatcgtctccccactcgacatcagtcgttgctgtaatggttggtgaagcgaagatgaaaacccaggacatatatcagcatcatgtcatgtgtaacaaagacgacaactctcatgtgttggtgttgtctgctgctgttgtacgacatccgccgctcgcttgtacgaccgtactgcacttcatctgccggccgggcgagcacagccgttctttaataacatgacgggcgcatgcacacgccagctgactcttcatgtcgattgcgtccagacaattttgttaggactggtttgttattaggagcagacctgccgtttccatgtgcttgcttcacggagcacggcagctctgtaaacggcagactcgacgtagcttgcacgcacaggggttttcagctaaaaaatcctctagcgacagttcattggttgcccagttcaccgactgcctttataaacagggagctcgagctcgagtggtagcagcacaggcacaagtgcggtgccataagtgacagccacctcagtctctgtctgtggagctctctctcgcgcgcgttgccatctcgcaggttcttcatctcgtcgctctgttcaggttcatcggctggcgttagcgtttgttctctctcatacgactatttcatgcgtcctctgctgcatctcttcgattcatccgtagtatcttctttttacagctagtttgggaacccattttcttaacaattctatttttttttcaaaaaaatgaactaattttctttaataaaataaaaggtttctaaactagtccttaagtaaaaaaaaggggcggtcccgagcaaagtcaaacggtcccgagcaagcaagaaaccgtgtcgtcgattctcttttctctctggctttccgtggcagcaagaagaagggatcaaaggaccggacccgtccgtccgtccggccggcctcctgatcgcgtcgcgcgcgcccctcgaaaagccacaccccgccgtctgacctcgtggtgaccggtcccgcaggcggcgacaggagatggacggggagcaggcggcgcggtgggcggcggcgcaggagggggttcccgtcggggcggaccttgtcgcggcggcgctgcggcagctgcgcttcctcgcggcggtggaccgccgccggtggctctacgacgagggcccgctgctcgaccgggccatacgcaggtacaaagcatgctggcttccgcttcttgacaagcacactaagggtgtggttgtagatggtccattggttgttcctcttgattgtgagtggatatggcactgccatcgccttaacccggttcagtacataagggactgcaagaaagtgtatggcagaatactgaacaataacaacgttgagtcgtccactcaaacaaagtcgacacttgagtcagaaaaagtttggaaagagctgtatcctgaggagcccttcgaattgttgttcacaagaacctttgacactgccgtggatgtcaaccctgcaggtgcagaggaggacattacctatgatctggtctcggctgttaagagacaatcctctttctattatcaggttggaacaccaacaatgcatgatccacggtttctccaagaagctctagctcgatacaaggcgtttctttacctgatcaagatgaatcaagaaaaaggattgcagcgcttccgtgtaccaacctatgatgtggatctgttgtggcacactcaccagctgcatcctattacctaccgcaacgacatggtgaagcttcttggaaaagttctggagcatgatgacaccgatgctgatcgatctgaagggaagaaactcgatgttggatttaccgagactactgaacagttcgagagtacctttggtgtaagatactggaaggctggatgtatgtaccgtggcaacgtgccatctcctgtgacatccactcctcagacattcagtgctgaggttggtactgggtcttacatctgcaaagcccagaaagatcttaatgcccttgatgtaacagttgtagagttatatttacaaattgtagacatcaagaatttaccatctgctgttcaaaaagaaaatgtgtatgtacggttcgccaagaatcaatcagatatgttcatcagtgacggcggcaggttggatatctcaacagttacagggaagaacaccggagtttgtttacagtgtgaacctaccggagaactcattcttgcagtaatggttgatcaattatcaaagaaaccagaaccgatagggaaggtttctttcccactgcacgatttgacagggcctgattctaagctctccttcgagaagtggtttgaactgaaagctcatggtgggcatgccgcttcacctcctgttagtcttcgtgttgcagcttctgctactgtcccaagcagcgctcagaaggtgttcaccatggtcaggatggagccattctctctcaagtcatgtcttttgccacattccatcaaggatcagaacacgggcagctggactcgtttcgtaaatgattgtggtaccgagcttatccgtctccagataagagagcacaaggcgaagaatagcatggccgtcgttcgagaattggttggagtattgaagtcaacaaaaaagcaaattcaacttgcagaattcaaggaaaacaagtggaccctaaaagactccaacttgccaataagtcatggcactgatggcagtctactcgatctcaaaggtgacaaccatctgatcaagctttatcggggaaggaaactggaatacgagcgcaaatgttgcagcgctcactctgaggacgtatcagctgttactgctgtaaagttctgtgctgaacatccatatggcaaagccgttgccttgctagacactgaagctcagcttatcatggtgaacgaggattggctcctacttccatggatctccatatcagtcctgtttatggacggcgatggcggtacgaaacttggcggcggtgccatggttcagaaaggtacagtgtttggatccgacactagcatggtgctagagacacagaccgtcggagcagggagcgtggcatccaatctagcacaatgtggcacttgcagcgccgtgttcggtggtgatgataaagaaatggcgaactgcaaggttgagcatgcgagctctggcgcttctcgcacggttgttgcaagtggtgagaatgggcacactgagactgctggctgtggaggcggctgtggtagcaattgtggacccatgatggctgaagaccccaaggccggcaatgccaagtccggaggctgtggttcggggtgtggtggtggctgcggtggcgcgggaggttgtgggaccatggccaacgaaggccaatccaggtccggaggtgttggcaccttgttgagctccaacgccatgggtggtgagggccagcaggcccattcagctggctgtggctccggctgtggtggtggctgcggcagcggcatggtcatcgaaggctccaaggttaacaacgttaacgccatgtccggcggctgtggctctggttgtggtggtggttgcggcagtggcatggtcatcgaaggctccaaggccaacaacgccatgtccggtggctgtggctctggttgcggtggtggatgcggcagcggcatgctcatcgaaggctccaaggccaacaaagccatgtccggcggctgtggctctggttgtggtggtggttgcggcagcggcatggtcatcgaatgctccaaggccaacaacaccatgtccggcggctgtggctctggttgcggtggtggttgcggcagtggcatggtcatcgaaggctccaaggccaacaacgccatgtccggcggctgtggctctggttgtggtggtggttgcggcagtggcatggtcaacgaaggctccaaggccgccaacaccatgtccggcggctgtggctccggttgcggtggtggttgcggtgccctgttcaacgctagcactgctgccggagagggcctgcacaataagtcggctgggtgcggcggcggcgggtgcggctccgggtgcggcggtggcggcggctgtggtagcggcatggctatcgaaggcttcaaggccaaccacgccaagtctggtggctgcggctctggctgcggtggtggtggctgcggcaccctgttcagctccagcgctgcggccagccaaggccagtccagatccggcggctgcggctctggctgcggtggtggaggctgtggcactggcagcatggtcgctgaaggctccaacggcgggaacgccaagtccggcggctgtggcggcggttgcggtggcggaggtggctgcggcggcggaggctgtggcgggggttgcggcgccgtgttcaacgcatgatctcggtggagtggaggcatttgtgcagacatgcagtcgtcgtcgtctactgctagataccacatgctacagcatactgtgtattgctgtgcataatctactaaataaaaggaatgaataaacaatggatggatcggctgcctccgtggcgtttctgcaaacgaaaaatctcggtgttgttgggtgcagggatgaggatgaaaacgatttcaaacggtccgaaacgatatcgtctatttaacggttggttaagaaattacctgatttatgaattaattaatttattaatgaatttcatattaatagatatttaaaatttaatttttaaatgcgataattttaatatagtcacgag

SEQ ID NO: 38670 - DNA, 3945 bp, Zea Mays
tcacggagcacggcagctctgtaaacggcagactcgacgtagcttgcacgcacaggggttttcagctaaaaaatcctctagcgacagttcattggttgcccagttcaccgactgcctttataaacagggagctcgagctcgagtggtagcagcacaggcacaagtgcggtgccataagtgacagccacctcagtctctgtctgtggagctctctctcgcgcgcgttgccatctcgcaggcggcgacaggagatggacggggagcaggcggcgcggtgggcggcggcgcaggagggggttcccgtcggggcggaccttgtcgcggcggcgctgcggcagctgcgcttcctcgcggcggtggaccgccgccggtggctctacgacgagggcccgctgctcgaccgggccatacgcaggtacaaagcatgctggcttccgcttcttgacaagcacactaagggtgtggttgtagatggtccattggttgttcctcttgattgtgagtggatatggcactgccatcgccttaacccggttcagtacataagggactgcaagaaagtgtatggcagaatactgaacaataacaacgttgagtcgtccactcaaacaaagtcgacacttgagtcagaaaaagtttggaaagagctgtatcctgaggagcccttcgaattgttgttcacaagaacctttgacactgccgtggatgtcaaccctgcaggtgcagaggaggacattacctatgatctggtctcggctgttaagagacaatcctctttctattatcaggttggaacaccaacaatgcatgatccacggtttctccaagaagctctagctcgatacaaggcgtttctttacctgatcaagatgaatcaagaaaaaggattgcagcgcttccgtgtaccaacctatgatgtggatctgttgtggcacactcaccagctgcatcctattacctaccgcaacgacatggtgaagcttcttggaaaagttctggagcatgatgacaccgatgctgatcgatctgaagggaagaaactcgatgttggatttaccgagactactgaacagttcgagagtacctttggtgtaagatactggaaggctggatgtatgtaccgtggcaacgtgccatctcctgtgacatccactcctcagacattcagtgctgaggttggtactgggtcttacatctgcaaagcccagaaagatcttaatgcccttgatgtaacagttgtagagttatatttacaaattgtagacatcaagaatttaccatctgctgttcaaaaagaaaatgtgtatgtacggttcgccaagaatcaatcagatatgttcatcagtgacggcggcaggttggatatctcaacagttacagggaagaacaccggagtttgtttacagtgtgaacctaccggagaactcattcttgcagtaatggttgatcaattatcaaagaaaccagaaccgatagggaaggtttctttcccactgcacgatttgacagggcctgattctaagctctccttcgagaagtggtttgaactgaaagctcatggtgggcatgccgcttcacctcctgttagtcttcgtgttgcagcttctgctactgtcccaagcagcgctcagaaggtgttcaccatggtcaggatggagccattctctctcaagtcatgtcttttgccacattccatcaaggatcagaacacgggcagctggactcgtttcgtaaatgattgtggtaccgagcttatccgtctccagataagagagcacaaggcgaagaatagcatggccgtcgttcgagaattggttggagtattgaagtcaacaaaaaagcaaattcaacttgcagaattcaaggaaaacaagtggaccctaaaagactccaacttgccaataagtcatggcactgatggcagtctactcgatctcaaaggtgacaaccatctgatcaagctttatcggggaaggaaactggaatacgagcgcaaatgttgcagcgctcactctgaggacgtatcagctgttactgctgtaaagttctgtgctgaacatccatatggcaaagccgttgccttgctagacactgaagctcagcttatcatggtgaacgaggattggctcctacttccatggatctccatatcagtcctgtttatggacggcgatggcggtacgaaacttggcggcggtgccatggttcagaaaggtacagtgtttggatccgacactagcatggtgctagagacacagaccgtcggagcagggagcgtggcatccaatctagcacaatgtggcacttgcagcgccgtgttcggtggtgatgataaagaaatggcgaactgcaaggttgagcatgcgagctctggcgcttctcgcacggttgttgcaagtggtgagaatgggcacactgagactgctggctgtggaggcggctgtggtagcaattgtggacccatgatggctgaagaccccaaggccggcaatgccaagtccggaggctgtggttcggggtgtggtggtggctgcggtggcgcgggaggttgtgggaccatggccaacgaaggccaatccaggtccggaggtgttggcaccttgttgagctccaacgccatgggtggtgagggccagcaggcccattcagctggctgtggctccggctgtggtggtggctgcggcagcggcatggtcatcgaaggctccaaggttaacaacgttaacgccatgtccggcggctgtggctctggttgtggtggtggttgcggcagtggcatggtcatcgaaggctccaaggccaacaacgccatgtccggtggctgtggctctggttgcggtggtggatgcggcagcggcatgctcatcgaaggctccaaggccaacaaagccatgtccggcggctgtggctctggttgtggtggtggttgcggcagcggcatggtcatcgaatgctccaaggccaacaacaccatgtccggcggctgtggctctggttgcggtggtggttgcggcagtggcatggtcatcgaaggctccaaggccaacaacgccatgtccggcggctgtggctctggttgtggtggtggttgcggcagtggcatggtcaacgaaggctccaaggccgccaacaccatgtccggcggctgtggctccggttgcggtggtggttgcggtgccctgttcaacgctagcactgctgccggagagggcctgcacaataagtcggctgggtgcggcggcggcgggtgcggctccgggtgcggcggtggcggcggctgtggtagcggcatggctatcgaaggcttcaaggccaaccacgccaagtctggtggctgcggctctggctgcggtggtggtggctgcggcaccctgttcagctccagcgctgcggccagccaaggccagtccagatccggcggctgcggctctggctgcggtggtggaggctgtggcactggcagcatggtcgctgaaggctccaacggcgggaacgccaagtccggcggctgtggcggcggttgcggtggcggaggtggctgcggcggcggaggctgtggcgggggttgcggcgccgtgttcaacgcatgatctcggtggagtggaggcatttgtgcagacatgcagtcgtcgtcgtctactgctagataccacatgctacagcatactgtgtattgctgtgcataatctactaaataaaaggaatgaataaacaatggatggatcggctgcctccgtggcgtttctgcaaacgaaaaatctcggtgttgttgggtgcagggatgaggatgaaaacgatttcaaacggtccgaaacgatatcgtctatttaacggttggttaagaaattacctgatttatgaattaattaatttattaatgaatttcatattaatagatatttaaaatttaatttttaaatgcgataattttaatatagtcacgag

SEQ ID NO: 38671 - DNA, 4139 bp, Zea Mays
gtgcggtgccataagtgacagccacctcagtctctgtctgtggagctctctctcgcgcgcgttgccatctcgcaggcggcgacaggagatggacggggagcaggcggcgcggtgggcggcggcgcaggagggggttcccgtcggggcggaccttgtcgcggcggcgctgcggcagctgcgcttcctcgcggcggtggaccgccgccggtggctctacgacgagggcccgctgctcgaccgggccatacgcaggtacaaagcatgctggcttccgcttcttgacaagcacactaagggtgtggttgtagatggtccattggttgttcctcttgattgtgagtggatatggcactgccatcgccttaacccggttcagtacataagggactgcaagaaagtgtatggcagaatactgaacaataacaacgttgagtcgtccactcaaacaaagtcgacacttgagtcagaaaaagtttggaaagagctgtatcctgaggagcccttcgaattgttgttcacaagaacctttgacactgccgtggatgtcaaccctgcaggtgcagaggaggacattacctatgatctggtctcggctgttaagagacaatcctctttctattatcaggttggaacaccaacaatgcatgatccacggtttctccaagaagctctagctcgatacaaggcgtttctttacctgatcaagatgaatcaagaaaaaggattgcagcgcttccgtgtaccaacctatgatgtggatctgttgtggcacactcaccagctgcatcctattacctaccgcaacgacatggtgaagcttcttggaaaagttctggagcatgatgacaccgatgctgatcgatctgaagggaagaaactcgatgttggatttaccgagactactgaacagttcgagagtacctttggtgtaagatactggaaggctggatgtatgtaccgtggcaacgtgccatctcctgtgacatccactcctcagacattcagtgctgaggttggtactgggtcttacatctgcaaagcccagaaagatcttaatgcccttgatgtaacagttgtagagttatatttacaaattgtagacatcaagaatttaccatctgctgttcaaaaagaaaatgtgtatgtacggttcgccaagaatcaatcagatatgttcatcagtgacggcggcaggttggatatctcaacagttacagggaagaacaccggagtttgtttacagtgtgaacctaccggagaactcattcttgcagtaatggttgatcaattatcaaagaaaccagaaccgatagggaaggtttctttcccactgcacgatttgacagggcctgattctaagctctccttcgagaagtggtttgaactgaaagctcatggtgggcatgccgcttcacctcctgttagtcttcgtgttgcagcttctgctactgtcccaagcagcgctcagaaggtgttcaccatggtcaggatggagccattctctctcaagtcatgtcttttgccacattccatcaaggatcagaacacgggcagctggactcgtttcgtaaatgattgtggtaccgagcttatccgtctccagataaggtaattttcttgaattaatgaaatgcatggatactttatctgcaactgaacagattggtagaactgtaagtttgcaatgtgtttcaaatacaaagttcatttcactagtggaaggactttagctactggtatatagaacagtatgtctttattcacaccccacatttcaaatcccaggtcatgcaggttgagaaatgtttatgttcctgtaaaggttaacagtttgtcaattaatgctaatctgaatcatgactccactctatctcagagagcacaaggcgaagaatagcatggccgtcgttcgagaattggttggagtattgaagtcaacaaaaaagcaaattcaacttgcagaattcaaggaaaacaagtggaccctaaaagactccaacttgccaataagtcatggcactgatggcagtctactcgatctcaaaggtgacaaccatctgatcaagctttatcggggaaggaaactggaatacgagcgcaaatgttgcagcgctcactctgaggacgtatcagctgttactgctgtaaagttctgtgctgaacatccatatggcaaagccgttgccttgctagacactgaagctcagcttatcatggtacacttctatcagtcgtaccatttcgaaacctgaattttcttctttttttttgcactaacataactgtgatcatcattcttatataggtgaacgaggattggctcctacttccatggatctccatatcagtcctgtttatggacggcgatggcggtacgaaacttggcggcggtgccatggttcagaaaggtacagtgtttggatccgacactagcatggtgctagagacacagaccgtcggagcagggagcgtggcatccaatctagcacaatgtggcacttgcagcgccgtgttcggtggtgatgataaagaaatggcgaactgcaaggttgagcatgcgagctctggcgcttctcgcacggttgttgcaagtggtgagaatgggcacactgagactgctggctgtggaggcggctgtggtagcaattgtggacccatgatggctgaagaccccaaggccggcaatgccaagtccggaggctgtggttcggggtgtggtggtggctgcggtggcgcgggaggttgtgggaccatggccaacgaaggccaatccaggtccggaggtgttggcaccttgttgagctccaacgccatgggtggtgagggccagcaggcccattcagctggctgtggctccggctgtggtggtggctgcggcagcggcatggtcatcgaaggctccaaggttaacaacgttaacgccatgtccggcggctgtggctctggttgtggtggtggttgcggcagtggcatggtcatcgaaggctccaaggccaacaacgccatgtccggtggctgtggctctggttgcggtggtggatgcggcagcggcatgctcatcgaaggctccaaggccaacaaagccatgtccggcggctgtggctctggttgtggtggtggttgcggcagcggcatggtcatcgaatgctccaaggccaacaacaccatgtccggcggctgtggctctggttgcggtggtggttgcggcagtggcatggtcatcgaaggctccaaggccaacaacgccatgtccggcggctgtggctctggttgtggtggtggttgcggcagtggcatggtcaacgaaggctccaaggccgccaacaccatgtccggcggctgtggctccggttgcggtggtggttgcggtgccctgttcaacgctagcactgctgccggagagggcctgcacaataagtcggctgggtgcggcggcggcgggtgcggctccgggtgcggcggtggcggcggctgtggtagcggcatggctatcgaaggcttcaaggccaaccacgccaagtctggtggctgcggctctggctgcggtggtggtggctgcggcaccctgttcagctccagcgctgcggccagccaaggccagtccagatccggcggctgcggctctggctgcggtggtggaggctgtggcactggcagcatggtcgctgaaggctccaacggcgggaacgccaagtccggcggctgtggcggcggttgcggtggcggaggtggctgcggcggcggaggctgtggcgggggttgcggcgccgtgttcaacgcatgatctcggtggagtggaggcatttgtgcagacatgcagtcgtcgtcgtctactgctagataccacatgctacagcatactgtgtattgctgtgcataatctactaaataaaaggaatgaataaacaatggatggatcggctgcctccgtggcgtttctgcaaacgaaaaatctcggtgttgttgggtgcagggatgaggatgaaaacgatttcaaacggtccgaaacgatatcgtctatttaacggttggttaagaaattacctgatttatgaattaattaatttattaatgaatttcatattaatagatatttaaaatttaatttttaaatgcgataattttaatatagtcacgag

SEQ ID NO: 38672 - DNA, 3696 bp, Zea Mays
gtgcggtgccataagtgacagccacctcagtctctgtctgtggagctctctctcgcgcgcgttgccatctcgcaggttcttcatctcgtcgctctgttcaggcgcaggcggcgacaggagatggacggggagcaggcggcgcggtgggcggcggcgcaggagggggttcccgtcggggcggaccttgtcgcggcggcgctgcggcagctgcgcttcctcgcggcggtggaccgccgccggtggctctacgacgagggcccgctgctcgaccgggccatacgcaggttcagtacataagggactgcaagaaagtgtatggcagaatactgaacaataacaacgttgagtcgtccactcaaacaaagtcgacacttgagtcagaaaaagtttggaaagagctgtatcctgaggagcccttcgaattgttgttcacaagaacctttgacactgccgtggatgtcaaccctgcaggtgcagaggaggacattacctatgatctggtctcggctgttaagagacaatcctctttctattatcaggttggaacaccaacaatgcatgatccacggtttctccaagaagctctagctcgatacaaggcgtttctttacctgatcaagatgaatcaagaaaaaggattgcagcgcttccgtgtaccaacctatgatgtggatctgttgtggcacactcaccagctgcatcctattacctaccgcaacgacatggtgaagcttcttggaaaagttctggagcatgatgacaccgatgctgatcgatctgaagggaagaaactcgatgttggatttaccgagactactgaacagttcgagagtacctttggtgtaagatactggaaggctggatgtatgtaccgtggcaacgtgccatctcctgtgacatccactcctcagacattcagtgctgaggttggtactgggtcttacatctgcaaagcccagaaagatcttaatgcccttgatgtaacagttgtagagttatatttacaaattgtagacatcaagaatttaccatctgctgttcaaaaagaaaatgtgtatgtacggttcgccaagaatcaatcagatatgttcatcagtgacggcggcaggttggatatctcaacagttacagggaagaacaccggagtttgtttacagtgtgaacctaccggagaactcattcttgcagtaatggttgatcaattatcaaagaaaccagaaccgatagggaaggtttctttcccactgcacgatttgacagggcctgattctaagctctccttcgagaagtggtttgaactgaaagctcatggtgggcatgccgcttcacctcctgttagtcttcgtgttgcagcttctgctactgtcccaagcagcgctcagaaggtgttcaccatggtcaggatggagccattctctctcaagtcatgtcttttgccacattccatcaaggatcagaacacgggcagctggactcgtttcgtaaatgattgtggtaccgagcttatccgtctccagataagagagcacaaggcgaagaatagcatggccgtcgttcgagaattggttggagtattgaagtcaacaaaaaagcaaattcaacttgcagaattcaaggaaaacaagtggaccctaaaagactccaacttgccaataagtcatggcactgatggcagtctactcgatctcaaaggtgacaaccatctgatcaagctttatcggggaaggaaactggaatacgagcgcaaatgttgcagcgctcactctgaggacgtatcagctgttactgctgtaaagttctgtgctgaacatccatatggcaaagccgttgccttgctagacactgaagctcagcttatcatggtgaacgaggattggctcctacttccatggatctccatatcagtcctgtttatggacggcgatggcggtacgaaacttggcggcggtgccatggttcagaaaggtacagtgtttggatccgacactagcatggtgctagagacacagaccgtcggagcagggagcgtggcatccaatctagcacaatgtggcacttgcagcgccgtgttcggtggtgatgataaagaaatggcgaactgcaaggttgagcatgcgagctctggcgcttctcgcacggttgttgcaagtggtgagaatgggcacactgagactgctggctgtggaggcggctgtggtagcaattgtggacccatgatggctgaagaccccaaggccggcaatgccaagtccggaggctgtggttcggggtgtggtggtggctgcggtggcgcgggaggttgtgggaccatggccaacgaaggccaatccaggtccggaggtgttggcaccttgttgagctccaacgccatgggtggtgagggccagcaggcccattcagctggctgtggctccggctgtggtggtggctgcggcagcggcatggtcatcgaaggctccaaggttaacaacgttaacgccatgtccggcggctgtggctctggttgtggtggtggttgcggcagtggcatggtcatcgaaggctccaaggccaacaacgccatgtccggtggctgtggctctggttgcggtggtggatgcggcagcggcatgctcatcgaaggctccaaggccaacaaagccatgtccggcggctgtggctctggttgtggtggtggttgcggcagcggcatggtcatcgaatgctccaaggccaacaacaccatgtccggcggctgtggctctggttgcggtggtggttgcggcagtggcatggtcatcgaaggctccaaggccaacaacgccatgtccggcggctgtggctctggttgtggtggtggttgcggcagtggcatggtcaacgaaggctccaaggccgccaacaccatgtccggcggctgtggctccggttgcggtggtggttgcggtgccctgttcaacgctagcactgctgccggagagggcctgcacaataagtcggctgggtgcggcggcggcgggtgcggctccgggtgcggcggtggcggcggctgtggtagcggcatggctatcgaaggcttcaaggccaaccacgccaagtctggtggctgcggctctggctgcggtggtggtggctgcggcaccctgttcagctccagcgctgcggccagccaaggccagtccagatccggcggctgcggctctggctgcggtggtggaggctgtggcactggcagcatggtcgctgaaggctccaacggcgggaacgccaagtccggcggctgtggcggcggttgcggtggcggaggtggctgcggcggcggaggctgtggcgggggttgcggcgccgtgttcaacgcatgatctcggtggagtggaggcatttgtgcagacatgcagtcgtcgtcgtctactgctagataccacatgctacagcatactgtgtattgctgtgcataatctactaaataaaaggaatgaataaacaatggatggatcggctgcctccgtggcgtttctgcaaacgaaaaatctcggtgttgttgggtgcagggatgaggatgaaaacgatttcaaacggtccgaaacgatatcgtctatttaacggttggttaagaaattacctgatttatgaattaattaatttattaatgaatttcatattaatagatatttaaaatttaatttttaaatgcgataattttaatatagtcacgag

SEQ ID NO: 38673 - DNA, 670 bp, Zea Mays
cgccactcgccagttcggccagtgcagtcagccactcgccagttcaccaccaggctcgccattcgcacacaacagtcctatgtcaacaccaacggagcagtcctctaatgaagtatggtttgattttgtctctgtgttgtcttctttttagtgatttttgcttcaaatgtttatttgtgtctgtgtggccactataatataggtcctaaatgccaccaaggaatcagcaccgaccgccggcaacactactgaggaaaagaaagaagataacgcgaagaaaaggaaggagattgcacctagatcagaagtatggtctcactttgtcaagatttgtgttgatggacacttgaagaaagggaaatgcaagtattgcagccgtgagatcaagtgtgacccaaatttgaatgggtaagttgagtgatggaaaagtggtggcagtgaagcagctctctcggtcctctaaccagggaaagatgcagtttgcggcagaaatcgaaaccatttcccgagtgcagcaccgtaacagttccaggatggactaagttgtttatgtgggaaacatttgtatgactgtattgtatattcacatttttattctattcggtttgactaagttgtatgactgtattgtgtattcacatttttataaccaggatggactaagttgtat

SEQ ID NO: 38674 - DNA, 747 bp, Zea Mays
gctcccaaattagtagttaaccatcacccataatattttgaacattcagaaacacacctagcgaagcgcactagcaacgacctaacaacaatggctaccaagatattatccctccttgcgcttcttgccctttttgtgagcgcaacaaatgcgttcattattccacaatattagttatactcttaatgtcacgatgtatatgtttgattaaattgtttaatagatataatcaaagataaataacttgcatggctccgtaggatattatgtgtatcttgttcatgatcactaatggtcctcataggcaccatttgatttgctgctcccattgtctcaatttccattgtattgtcatcgttgacccccgacgctcgaaattctgcaggtggtgttacaatatgtctccgtggactcgtagcacagtttggagatttaagtcttagggtgagcgctgttggtagaccactaagaaacatcaccagtttcttcttctccaccgtcaaccatgggtcaacaatgcagcgacgccgccagttccctttcttatatgcaccgctctgtctagtctcgggtagccatgtttacgctattttttgtggtcatttacggtctataaagtttgttcctgcatgcatggagatattatcggagacgtgacaactacccgatagattttatctcggtttgttgaaacaattttgtatttactcaactaaatgaaaccagttacgcaattttctgtatata

SEQ ID NO: 38675 - DNA, 1149 bp, Zea Mays
ttgatttctaaagtccaattatatttctagtcagcaatcacatattaactacacaagcaaagtgcagagatatattatgttcctttttgaaacaatttcgccttttccagtggtaatacttgacagagaaatcctgaaccaagcgcaaaccttctgcaagacctggtaacttattttaggggctagaaataggcgacgacagttcaggccttgttttttacaccaatccaaccctggattagcaatgatttttatgcagctcttgtttgttacgactactcatggcaccatttatgcatacatctgaactatttatgctgttgatatgtttctagtgtggcaatgatttttttacatatagatgcttaccaaaagttcaaaatctttccggtcggtagcagtagaagcagcacacccaatttgtcatacactctgtaatttttatttcctaaatatgtctttttatgctaatttgaatacgctattacgcccaattactagatcgcgcgtatgctccattttgtaaacacgtagaccaccaaattgtacattttttatgttctttttatgcttttattctgagttgaattggtcctcacatgatcatgcatcaatacccaatggttcagactcatctaatgcttctgcttccttacatgaacatgcattagcacatcagtcatctagcgctacttactataacaagcacacattatccaccgatatgattcttattcctgctaattttaatgtgttattatgctcaattatcagatctcgtgtacgctccgcattgtaaacacgtagaccaattctcctacattgtttttgttcttccttttatgcttttacgatgatttgaattggtccttttcagaacaatgcacccccagtacgtagtccactctagagcagtatacgacagatacgcccagtacctccagtaagtatatgctctttatttttgtgatctactgcccaagtatccagaaggcaaactagattttgatgtctgcatattaaaattgccgatatcaaataaatcgtccatgagttgtcctagagtttctagtgtgaaggatatgcattgaatcagttttatatgttttcggaatgatggacaaggtacaacatgataggagaattttt

SEQ ID NO: 38676 - DNA, 1059 bp, Zea Mays
tagttaatccatcacctataatattttgagcattcagaaacacaccaagcgaagcacattagcaacaacctaacaacaatggctaccaagatattatccctccttgcgcttcttgcgctttttgcgagcgcaacaaatgcgttcattattccacaatgctcacttgctccaagttccattattacacagttcctcccaccagttacttcaatgggcttcgaacacccagctgtgcaagcctataggctacaacaagcaattgcggcgagcgtcttacaacaaccaatttcccagttgcaacaacaatccttggcacatctaacaatacaaaccatcgcaacgcaacagcaacaacaattcctaccagcactgagccacctagccatggtgaaccctgccgcctacttgcaacagcagttgcttgcatcaaacccacttgctctggcaaacgtagttgcaaaccagccacaacaacagctgcaacagtttctgccagcgctcagtcaactagccatggtgaaccctgccgcctacctacaacagcaacaactgctttcatctagcccgctcgctgtggccaatgcacctacatacctgcaacaacaattgttgcaacagattgtaccagctctgactcagctagttgtggcaaaccctgctgcctacttgcaacagctgcttccattcaaccaactgactatgtcgaactctgctgcgtacctacaacagcgacaacagttacttaatccactagcagtggctaacccattggtcgctgccttcctacagcagcaacaattgctgccatacaaccagttctctttgatgaaccctgccttgtcgtggcagcaacccatcgttggtggtgccatcttttagattacatatgagatgtactcgataatggtgccctcatagcggcatgtgtttcctaaaaataatcaatatattgattgagatttatctcgatatatttctgaactatgttcatcatataaataattgaaaacatcatatcataattataaacttatgcttggtcaatacatagacaataca

SEQ ID NO: 38677 - DNA, 1610 bp, Zea Mays
tactgtgttatagattactccaactctgaatgactccatcggagaatcctcctctcacatttgtcaattgtaaaatccttctcacacctcaactgccactatcctgtcattcctgtggctcacacccagcggatccaactcctctaacttgccaccattacgtcactgtcatctcaatttacagtctatcatgctcgctgatgcttgccagtatcatgcagcaccataccatttcccacaccaggtttgtcccattttccgagagaatctgatatttgccattataatgaaacaggttcgcaaaattgccagcagacccacgtttcagactcagatggacttacaattcatagacacagtggcaaatataacaatgaggcaacgttttgagtggtaaaataccaattatttcccccttttccccattctcaatctatagtcagagaatctgccctggtgaaaccaaacccaaatatataagatactcatgcaagttcacaaaacccaagtgcacacacaaacatgaatacaccaatcaccctacacctacatcatcatgctgatcacctctaaaagtccccaccaattccaagccactactgccaagtgcaactgcaaagtttccatgtttacattagttctcttgactgacgggtccacggaatttaaagaaaaatatgttaaattatcaggaatacacggctcagatacatgagttttctccgtctactgttgtctaaacatattattatacagctgcttgacaatttaaaccctagaaatgaggcaatcacgagcatttagaagcatgactgatccattgcagctctttgtttttctgtttgtttatcccatttgcaatatttagctaacaaagggcaaagtcacaacagctaaaatggccccaacaatcagtaaaaaattgctgatccaaccaaccctgcagagcatgcaacgcaagatgtgtattgaaggatatgcatggagggtatgccataaaaaaatcaaagacagcatgcacagtacggtacagacattaggagaagtaatactttttgggtgtaaaacacaatacttgtcaaaacatatttggaatgggatcaactttgtctatttgtgaaagtatcaagtatggaacacctgtcagaagtcaaaacaagataaaaataaccccagtggagaagtggaaagatatggccttctaataataggggttcgattaaaaacactcagcaaattaagtagcatttgtaattatcacgagcaatggtgaaccaacgaaaatcaatgtagtcagctgtatttcaaatatcaaccatcagcattgtccacaagaaatgctcttaattatctcccatctctctaagagaatatgtgtttgatctttacggaaatcgactcaactatatgaccccacattcagacagaatttacaaacaaatgtaaaatcaaatatcccgccaaaaaagtagaaatagaactactggggtacagaaacatttgagaaacccaatccaagtcatacaacgaatgtcggctgattggcccatctcacatcaaatacagttcttcgtttttaacctcgatcacctggcctgaggaatcacaag

SEQ ID NO: 38678 - DNA, 2359 bp, Zea Mays
caccccgcaaggccgcaacgcctccgctttcattcttctcttcccctcggcttcgagggttatttttatttctttctttccttttttcgtttttattttctttttattttcttttttcttccttttctcgttcccccgttggggttttgagctccgacgaaccctaataatcgccggggaccggcggccgatcgcccgccggcatgcaccatcagcagcggatgaagcaggcggcggcggccgcggccgcggcgcagcagcagcagctgatgcagcaggcactgctcctgcagcagcagcagcagtcgcaggcgcagccgcccttgttccccgggcaccacccgcaccccggcctcctcgccgcaccacagatagagcccatagtcagtggaaacctgcctcctgggtttgattcaagtacatgccgcagcgtgtatgttggcaatatccatcttcaagtgacggacacagtactgcaggaagtcttccaaagcattggtccagtagaagggtgcaagctcatcagaaaagaaaagtcatcctttggtttcattgactactatgaccgcagatatgctgcactagcaattttatctctcaatggcagacaactgtatggtcagccgattaaagtcaattgggcatatacaagtactccgagggaggacacatcaggtcattttaatatttttgttggggatctttgcccggaagtcactgatgctactttgtttgcatttttctctggatactctacttgctcagatgctagggttatgtgggaccagaaaacaggacgatccagagggtttggttttgtttctttcaggaaccagcaggatgctcaaagtgcgataaatgacttgaatgggaagtggcttgggaaccgtcaaattcgttgcaattgggcaacgaaaggtgctaatgctggtgaagagaaacagattctggacactaaggttgacctgtcaaatggttcatcagaatctggaaaagagaatccaaatgaagatggtcctgaaaataaccctcagtttactactgtttatgttggcaatcttcctcacgaggctaccatgaatgatgtgcacctgtttttccattcactgggggctggttcaattgaggaagtccgtgtaactcgtgataaaggctttggctttgtgaggtacagcacccatgaggaggctgcattggcaattcagatgggtaatggccaacttattggcgggaggcagataaaggtaccgcaagatcatgtctgggtgcagggtgacaatatctttgcttctaacgattcgaggcaatttggagctgtgccttatgggctgattacagggaagatcttttgccgggtttggccgccagagagttttggcgcaattgatgacgcaacgaagcagtcttaacgctgaggaggagccgaggaggtactgagagcacatggacccatattgtttgctcgcccccagagattctataatagccaactgcaggggggcccttccttgagctcgagagctttcgacgacctaccgcagcgcatttctacagcgaagcaaagagcgttgtgtgtcttgattgatgtcccgtgtttttacagttttggtgtgacaagttctgaaacccgtgtttttacaactacactacaacttcacatgcttattcgaaacatttgaactgatttgtcagtcctcgttttgcagaagggcgtgtctgtttgtttatccatgtccatgtcaaaacacacgacgattattgttcagcatgtccatgtcaaaacatacatcgatcttgaggttattatgccatatactatatataacactgtaataaagtcatccatccggcctctacgtcgacgcggcggcggcggcggtggcgctgggctccggtgctgctgccgccgctagctggaaccgatggtgctgctgctgcagcagaagcagcgacgacttgcactgggcgcacatgcagatctgctgggtggtgcagaagccgccgacgtagcccttgtcctggcagcgggcgatgcagagcagtggcgcgtcgcggcactccgggacgatgctgcggaacagcgggcacatgcccttgccgtctgagggtgacggcaaaataaggaaggagaacatgatcagtagtagggcatcagttgcagccatgacgaccaccttggaagaagccatggcactggttgtagcttccgcttccgatctgcaggcggaacgaataatcggtttcaggctttcagctgtgctgcttagatgtactgtctgtacttacatatatatgcatgcgccggggcgataataaggaaaagagctaggagttttaattttcttcttcttcctttttt

SEQ ID NO: 38679 - DNA, 2390 bp, Zea Mays
caacgcctccgctttcattcttctcttcccctcggcttcgagggttatttttatttctttctttccttttttcgtttttattttctttttattttcttttttcttccttttctcgttcccccgttggggttttgagctccgacgaaccctaataatcgccggggaccggcggccgatcgcccgccggcatgcaccatcagcagcggatgaagcaggcggcggcggccgcggccgcggcgcagcagcagcagctgatgcagcaggcactgctcctgcagcagcagcagcagtcgcaggcgcagccgcccttgttccccgggcaccacccgcaccccggcctcctcgccgcaccacagatagagcccatagtcagtggaaacctgcctcctgggtttgattcaagtacatgccgcagcgtgtatgttggcaatatccatcttcaagtgacggacacagtactgcaggaagtcttccaaagcattggtccagtagaagggtgcaagctcatcagaaaagaaaagtcatcctttggtttcattgactactatgaccgcagatatgctgcactagcaattttatctctcaatggcagacaactgtatggtcagccgattaaagtcaattgggcatatacaagtactccgagggaggacacatcaggtcattttaatatttttgttggggatctttgcccggaagtcactgatgctactttgtttgcatttttctctggatactctacttgctcagatgctagggttatgtgggaccagaaaacaggacgatccagagggtttggttttgtttctttcaggaaccagcaggatgctcaaagtgcgataaatgacttgaatgggaagtggcttgggaaccgtcaaattcgttgcaattgggcaacgaaaggtgctaatgctggtgaagagaaacagattctggacactaaggttgacctgtcaaatggttcatcagaatctggaaaagagaatccaaatgaagatggtcctgaaaataaccctcagtttactactgtttatgttggcaatcttcctcacgaggctaccatgaatgatgtgcacctgtttttccattcactgggggctggttcaattgaggaagtccgtgtaactcgtgataaaggctttggctttgtgaggtacagcacccatgaggaggctgcattggcaattcagatgggtaatggccaacttattggcgggaggcagataaagtccagcaagcacgaactgcagctcctgtcaaccttgagtgccacctttagatcgtgcacctggacatcaacccatctcaaccaccgtctacgatggtgcctatgagcttaggacaaccgaggaatctgaccactgcaaggggtcgtcttccgtggagttcctgctggagggcatcctgctggagggcaacgatgctgtcaggcagggtggtgacctcctgtacgatgctggcaccacgtgtatgccctgcacccacatctatgtcactccaatcaagtgcttcttccagaccctgtcggctgtcagggtgctcggtttcatcatgacctaccttgtggctgcccagccgccggacgagagcttattgacggatgaaggacgctgctgcgacacatgcgaggtgatcatccgccagggcgagccgtgcagcagtggcgtagcagagagcagcgaggacaagcgtttagctgtgttcctggggaagcaagccgactccacaagggacagcatccttgcctctgcctcctccagcactggcaccattctccactggagtgtcggccaccgacttgctggcctaccagcgcctggctctgagcaagatggcctcgaaccacccagccctaatgggtcagcactccttgaagcaggtcgctgcattggggattggcggcggagccagccagtccatctatgatggcggcttccagggcatcaatactgtcaccggcacaacttccgcccagcagcagcagcagctcatgtactactagagtactactactccatgaggcacccagctacctatcccttcaagaggaaggcgaggatgaatggatgatgccccttactatacccctatacatatagtagatgatgaagtcattactaggaccttttttccctaatctttttaagacccatctaagtaacatgtcctctctatgctagctatataattgtgtatttctggatacataaagccaaggttcttagtagtataatcttctgtgtttgaccatcttttattgtgatgtatggattttcgttggcaattaccgtatgtcactggataggggtggtaatggatcgtgatccaaatgcttcttcacaatattgtagagtcctaaataaatttcagtttaaaaatgaatagaaata

SEQ ID NO: 38680 - DNA, 1838 bp, Zea Mays
aacgcctccgctttcattcttctcttcccctcggcttcgagggttatttttatttctttctttccttttttcgtttttattttctttttattttcttttttcttccttttctcgttcccccgttggggttttgagctccgacgaaccctaataatcgccggggaccggcggccgatcgcccgccggcatgcaccatcagcagcggatgaagcaggcgcagccgcccttgttccccgggcaccacccgcaccccggcctcctcgccgcaccacagatagagcccatagtcagtggaaacctgcctcctgggtttgattcaagtacatgccgcagcgtgtatgttggcaatatccatcttcaagtgacggacacagtactgcaggaagtcttccaaagcattggtccagtagaagggtgcaagctcatcagaaaagaaaagtcatcctttggtttcattgactactatgaccgcagatatgctgcactagcaattttatctctcaatggcagacaactgtatggtcagccgattaaagtcaattgggcatatacaagtactccgagggaggacacatcaggtcattttaatatttttgttggggatctttgcccggaagtcactgatgctactttgtttgcatttttctctggatactctacttgctcagatgctagggttatgtgggaccagaaaacaggacgatccagagggtttggttttgtttctttcaggaaccagcaggatgctcaaagtgcgataaatgacttgaatgggaagtggcttgggaaccgtcaaattcgttgcaattgggcaacgaaaggtgctaatgctggtgaagagaaacagattctggacactaaggttgacctgtcaaatggttcatcagaatctggaaaagagaatccaaatgaagatggtcctgaaaataaccctcagtttactactgtttatgttggcaatcttcctcacgaggctaccatgaatgatgtgcacctgtttttccattcactgggggctggttcaattgaggaagtccgtgtaactcgtgataaaggctttggctttgtgaggtacagcacccatgaggaggctgcattggcaattcagatgggtaatggccaacttattggcgggaggcagataaagtgttcctggggaagcaagccgactccacaagggacagcatccttgcctctgcctcctccagcactggcaccattctccactggagtgtcggccaccgacttgctggcctaccagcgcctggctctgagcaagatggcctcgaaccacccagccctaatgggtcagcactccttgaagcaggtcgctgcattggggattggcggcggagccagccagtccatctatgatggcggcttccagggcatcaatactgtcaccggcacaacttccgcccagcagcagcagcagctcatgtactactagagtactactactccatgaggcacccagctacctatcccttcaagaggaaggcgaggatgaatggatgatgccccttactatacccctatacatatagtagatgatgaagtcattactaggaccttttttccctaatctttttaagacccatctaagtaacatgtcctctctatgctagctatataattgtgtatttctggatacataaagccaaggttcttagtagtataatcttctgtgtttgaccatcttttattgtgatgtatggattttcgttggcaattaccgtatgtcactggataggggtggtaatggatcgtgatccaaatgcttcttcacaatattgtagagtcctaaataaatttcagtttaaaaatgaatagaaata

SEQ ID NO: 38681 - DNA, 1428 bp, Zea Mays
cggagaggctgcttcaaatccatgacatgtcatcctttggtttcattgactactatgaccgcagatatgctgcactagcaattttatctctcaatggcagacaactgtatggtcagccgattaaagtcaattgggcatatacaagtactccgagggaggacacatcaggtcattttaatatttttgttggggatctttgcccggaagtcactgatgctactttgtttgcatttttctctggatactctacttgctcagatgctagggttatgtgggaccagaaaacaggacgatccagagggtttggttttgtttctttcaggaaccagcaggatgctcaaagtgcgataaatgacttgaatgggaagtggcttgggaaccgtcaaattcgttgcaattgggcaacgaaaggtgctaatgctggtgaagagaaacagattctggacactaaggttgacctgtcaaatggttcatcagaatctggaaaagagaatccaaatgaagatggtcctgaaaataaccctcagtttactactgtttatgttggcaatcttcctcacgaggctaccatgaatgatgtgcacctgtttttccattcactgggggctggttcaattgaggaagtccgtgtaactcgtgataaaggctttggctttgtgaggtacagcacccatgaggaggctgcattggcaattcagatgggtaatggccaacttattggcgggaggcagataaagtgttcctggggaagcaagccgactccacaagggacagcatccttgcctctgcctcctccagcactggcaccattctccactggagtgtcggccaccgacttgctggcctaccagcgcctggctctgagcaagatggcctcgaaccacccagccctaatgggtcagcactccttgaagcaggtcgctgcattggggattggcggcggagccagccagtccatctatgatggcggcttccagggcatcaatactgtcaccggcacaacttccgcccagcagcagcagcagctcatgtactactagagtactactactccatgaggcacccagctacctatcccttcaagaggaaggcgaggatgaatggatgatgccccttactatacccctatacatatagtagatgatgaagtcattactaggaccttttttccctaatctttttaagacccatctaagtaacatgtcctctctatgctagctatataattgtgtatttctggatacataaagccaaggttcttagtagtataatcttctgtgtttgaccatcttttattgtgatgtatggattttcgttggcaattaccgtatgtcactggataggggtggtaatggatcgtgatccaaatgcttcttcacaatattgtagagtcctaaataaatttcagtttaaaaatgaatagaaata

SEQ ID NO: 38682 - DNA, 1152 bp, Zea Mays
caacttatggtcagccgattaaagtcaattgggcatatacaagtactccgagggaggacacatcaggtcattttaatatttttgttggggatctttgcccggaagtcactgatgctactttgtttgcatttttctctggatactctacttgctcagatgctagggttatgtgggaccagaaaacaggacgatccagagggtttggttttgtttctttcaggaaccagcaggatgctcaaagtgcgataaatgacttgaatgggaagtggcttgggaaccgtcaaattcgttgcaattgggcaacgaaaggtgctaatgctggtgaagagaaacagattctggacactaaggttgacctgtcaaatggttcatcagaatctggaaaagagaatccaaatgaagatggtcctgaaaataaccctcagtttactactgtttatgttggcaatcttcctcacgagtgttcctggggaagcaagccgactccacaagggacagcatccttgcctctgcctcctccagcactggcaccattctccactggagtgtcggccaccgacttgctggcctaccagcgcctggctctgagcaagatggcctcgaaccacccagccctaatgggtcagcactccttgaagcaggtcgctgcattggggattggcggcggagccagccagtccatctatgatggcggcttccagggcatcaatactgtcaccggcacaacttccgcccagcagcagcagcagctcatgtactactagagtactactactccatgaggcacccagctacctatcccttcaagaggaaggcgaggatgaatggatgatgccccttactatacccctatacatatagtagatgatgaagtcattactaggaccttttttccctaatctttttaagacccatctaagtaacatgtcctctctatgctagctatataattgtgtatttctggatacataaagccaaggttcttagtagtataatcttctgtgtttgaccatcttttattgtgatgtatggattttcgttggcaattaccgtatgtcactggataggggtggtaatggatcgtgatccaaatgcttcttcacaatattgtagagtcctaaataaatttcagtttaaaaatgaatagaaata

SEQ ID NO: 38683 - DNA, 1651 bp, Zea Mays
agcgacattaattcatccaagggtctaaacttaattaaaaaaaattcaaataatataaaattcgtccccagcatgtgggacttgtgggccgaaagaaactaagaagcccaagcccagctgaccaagagaggtagctgagcgaagcatccggtgtgttccctcgccatccgccgccgccgccatgccgggcttcgctcagcgtctcgcgggcatcccgtggcggagcatcgcgaggcaaggcctctcccgcgtgttcctggtggcgaaggcctactgcgtgatccacgtcgtcaacgaccacctctgctcggtgaccttagtgcggggcgccagcatgctgccgtccctgaacctggcgggcgacgcggtggcggtggacagggtcagcgtgaggctcggccgggtcgcgccgggggacatcgtgctgatgatctcccctgaggacccgcgcaaatcggtcgtcaagcgcgtcgtcgggatgcagggggactccgtcacctaccttgtcgaccccggcaaaagcgactcctccagaaccgtcgtggtaccgcaagatcatgtctgggtgcagggtgacaatatctttgcttctaacgattcgaggcaatttggagctgtgccttatgggctgattacagggaagatcttttgccgggtttggccgccagagagttttggcgcaattgatgacgcaacgaagcagtcttaacgctgaggaggagccgaggagagcacatggacccatattgtttgctcgcccccagagattctataatagccaactgcaggggggcccttccttgagctcgagagctttcgacgacctaccgcagcgcatttctacagcgaagcaaagagcgttgtgtgtcttgattgatgtcccgtgtttttacagttttggtgtgacaagttctgaaacccgtgtttttacaactacactacaacttcacatgcttattcgaaacatttgaactgatttgtcagtcctcgttttgcagaagggcgtgtctgtttgtttatccatgtccatgtcaaaacacacgacgattattgttcagcatgtccatgtcaaaacatacatcgatcttgaggttattatgccatatactatatataacactgtaataaagtcatccatccggcctctacgtcgacgcggcggcggcggcggtggcgctgggctccggtgctgctgccgccgctagctggaaccgatggtgctgctgctgcagcagaagcagcgacgacttgcactgggcgcacatgcagatctgctgggtggtgcagaagccgccgacgtagcccttgtcctggcagcgggcgatgcagagcagtggcgcgtcgcggcactccgggacgatgctgcggaacagcgggcacatgcccttgccgtctgagggtgacggcaaaataaggaaggagaacatgatcagtagtagggcatcagttgcagccatgacgaccaccttggaagaagccatggcactggttgtagcttccgcttccgatctgcaggcggaacgaataatcggtttcaggctttcagctgtgctgcttagatgtactgtctgtacttacatatatatgcatgcgccggggcgataataaggaaaagagctaggagttttaattttcttcttcttcctttttt

SEQ ID NO: 38684 - DNA, 1658 bp, Zea Mays
aaagaaactaagaagcccaagcccagctgaccaagagaggtagctgagcgaagcatccggtgtgttccctcgccatccgccgccgccgccatgccgggcttcgctcagcgtctcgcgggcatcccgtggcggagcatcgcgaggcaaggcctctcccgcgtgttcctggtggcgaaggcctactgcgtgatccacgtcgtcaacgaccacctctgctcggtgaccttagtgcggggcgccagcatgctgccgtccctgaacctggcgggcgacgcggtggcggtggacagggtcagcgtgaggctcggccgggtcgcgccgggggacatcgtgctgatgatctcccctgaggacccgcgcaaatcggtcgtcaagcgcgtcgtcgggatgcagggggactccgtcacctaccttgtcgaccccggcaaaagcgactcctccagaaccgtcgtggtaccgcaagatcatgtctgggtgcagggtgacaatatctttgcttctaacgattcgagtttaggagggctgctgcaacctctggagcaaacgtttttgctttatggcaccattaagccgggggggacacaatgcaagcaactatcaattgttgactttgctgaaaaggaaaaaaagctaccatgtttcctaaggcttaaggtttggccgccagagagttttggcgcaattgatgacgcaacgaagcagtcttaacgctgaggaggagccgaggaggtactgagagcacatggacccatattgtttgctcgcccccagagattctataatagccaactgcaggggggcccttccttgagctcgagagctttcgacgacctaccgcagcgcatttctacagcgaagcaaagagcgttgtgtgtcttgattgatgtcccgtgtttttacagttttggtgtgacaagttctgaaacccgtgtttttacaactacactacaacttcacatgcttattcgaaacatttgaactgatttgtcagtcctcgttttgcagaagggcgtgtctgtttgtttatccatgtccatgtcaaaacacacgacgattattgttcagcatgtccatgtcaaaacatacatcgatcttgaggttattatgccatatactatatataacactgtaataaagtcatccatccggcctctacgtcgacgcggcggcggcggcggtggcgctgggctccggtgctgctgccgccgctagctggaaccgatggtgctgctgctgcagcagaagcagcgacgacttgcactgggcgcacatgcagatctgctgggtggtgcagaagccgccgacgtagcccttgtcctggcagcgggcgatgcagagcagtggcgcgtcgcggcactccgggacgatgctgcggaacagcgggcacatgcccttgccgtctgagggtgacggcaaaataaggaaggagaacatgatcagtagtagggcatcagttgcagccatgacgaccaccttggaagaagccatggcactggttgtagcttccgcttccgatctgcaggcggaacgaataatcggtttcaggctttcagctgtgctgcttagatgtactgtctgtacttacatatatatgcatgcgccggggcgataataaggaaaagagctaggagttttaattttcttcttcttcctttttt

SEQ ID NO: 38685 - DNA, 1070 bp, Zea Mays
cacaatgcaagcaactatcaattgttgactttgctgaaaaggaaaaaaagctaccatgtttcctaaggcttaaggtttggccgccagagagttttggcgcaattgatgacgcaacgaagcagtcttaacgctgaggaggagccgaggagagcacatggacccatattgtttgctcgcccccagagattctataatagccaactgcaggggggcccttccttgagctcgagagctttcgacgacctaccgcagcgcatttctacagcgaagcaaagagcgttgtgtgtcttgattgatgtcccgtgtttttacagttttggtgtgacaagttctgaaacccgtgtttttacaactacactacaacttcacatgcttattcgaaacatttgaactgatttgtcagtcctcgttttgcagaagggcgtgtctgtttgtttatccatgtccatgtcaaaacacacgacgattattgttcagcatgtccatgtcaaaacatacatcgatcttgaggttattatgccatatactatatataacactgtaataaagtcatccatccggcctctacgtcgacgcggcggcggcggcggtggcgctgggctccggtgctgctgccgccgctagctggaaccgatggtgctgctgctgcagcagaagcagcgacgacttgcactgggcgcacatgcagatctgctgggtggtgcagaagccgccgacgtagcccttgtcctggcagcgggcgatgcagagcagtggcgcgtcgcggcactccgggacgatgctgcggaacagcgggcacatgcccttgccgtctgagggtgacggcaaaataaggaaggagaacatgatcagtagtagggcatcagttgcagccatgacgaccaccttggaagaagccatggcactggttgtagcttccgcttccgatctgcaggcggaacgaataatcggtttcaggctttcagctgtgctgcttagatgtactgtctgtacttacatatatatgcatgcgccggggcgataataaggaaaagagctaggagttttaattttcttcttcttcctttttt

SEQ ID NO: 38686 - DNA, 2041 bp, Zea Mays
ctattctattactagtttgcttcgtagttcgtacacacacattactgtagtccgtctcctctgaaaacggtttccggctcctcacagagtagtagctcctctgaaagctcggtcagggtgaccaaccaagaacacacacacacatgtccatggagctcaagtcctcctcctccacctccacctcaacaacaagaggagcaagcaagcaagcgaccaccacttgtctctgttttcttcacccaccaagaccagtaaacacagagcaaccaccaagcctgtttcctggagcgtctactctttcacgagacggtttcaccacacttgtctgaacgtgaaagagaccctccgagttcgtcagaccgtcctcctttccccatggccaccaccctcgccatgagcagcagcagcagcaacgggcacggacgccgccacgaggcctccaccacctcgtcttcgtcgtcgtcctccacggcctcggctcagaaacgaaggggggagtcgcagcagcaggccgccgtcgtcccggcgacgccgggtccggcgctgcagttcctcgcgagccccgcgcaccaccacaaccacccccagacccagctcgtcgccccgaggaggtcggtgccgtccaagtgggaggacgcggagaagtggctgcggcagtcgtcgtcgtcctcgggttccgaccaccacctccacggcaacgcgagggccgccttctccaggcagcggagcggcgggctcggacaccgaggcggcgccggaggcgggggtggggacgagaagagcgcggcggtggcggtgaggaggtcggtggacgcgctccgggacgcccactcgctcgcgctgtacgcggcgccggcagcggagacaagttcaccgacaatgaggagccgtccaaggagagcttcgtgttccggagctcgtgctgcgaggctgctgaaccggcgaagggcgccgacgacgacgacgacggtcgctgccagcggaggagggacgtcggcacggagacgacgccgctgggcagctcgtgtcacacgccgctcaagagcgcgtccccggcgcggcacaacacgccggcgagccggtcgtcgggcccgctggtgccgtacgccggcggcggcggcgggacggacatctcggagctggcgggattccgcctcgccaagctggacctgggcgcgcggttcggcgcccacgccacgctcgtcggctggagctccaaggaggaggaagaggacgacgaggacgtgtccaagagcctcaggcacttcgaggccaccgtcggcgggatagcctgcgatagacgcggcggcgactgccgttgggatgacgacgacagggccaagagctgtatcaggtatcagagggaagaggcgaagatccaggcctgggttaacctggagagcgccaaggctgaagcgcagtcaagaaagctggaggtgaagatccagaagatgcggtgcaacctagaggagaagctgatgcggcggatgacgacggtgcagcggcgcgcgggggagtggcgcgccacggcgcgggcgcagcacctccagcagctgcggcgcgcggccgcccacggcgacggcgacggacggcggctcagggccacggccacgtccacggcccaccaccaccgccacctgccgggcagcagcgaggcgccctcctgcgcctgcttcccctgcagcaccagcaccagcggcggcggtaacaacgtcgtcagcggcggcctcctcagctactactagctagcttgcttgctggtgtcgttgttgttgttttctttgaggtctgcgaacggagagattggtcggcacggcagtgcagctgtgccgcgcacttgagaatcagtgttctaacccaagctccagacctgatctaactattatgcaattcgtatttaaaaaaagagagtcatggatcatcatctaactattatccataatcgtgaggaatacgtacgcgacaaaactattgccagttagttttctttctttcttcaaaagccatttcagtgtccacggaaatacggcggcagtttttc

SEQ ID NO: 38687 - DNA, 2702 bp, Zea Mays
ctattctattactagtttgcttcgtagttcgtacacacacattactgtagtccgtctcctctgaaaacggtttccggctcctcacagagtagtagctcctctgaaagctcggtcagggtgaccaaccaagaacacacacacacatgtccatggagctcaagtcctcctcctccacctccacctcaacaacaagaggagcaagcaagcaagcgaccaccacttgtctctgttttcttcacccaccaagaccagtaaacacagagcaaccaccaagcctgtttcctggagcgtctactctttcacgagacggtttcaccacacttgtctgaacgtgaaagagaccctccgagttcgtcagaccgtcctcctttccccatggccaccaccctcgccatgagcagcagcagcagcaacgggcacggacgccgccacgaggcctccaccacctcgtcttcgtcgtcgtcctccacggcctcggctcagaaacgaaggggggagtcgcagcagcaggccgccgtcgtcccggcgacgccgggtccggcgctgcagttcctcgcgagccccgcgcaccaccacaaccacccccagacccagctcgtcgccccgaggaggtcggtgccgtccaagtgggaggacgcggagaagtggctgcggcagtcgtcgtcgtcctcgggttccgaccaccacctccacggcaacgcgagggccgccttctccaggcagcggagcggcgggctcggacaccgaggcggcgccggaggcgggggtggggacgagaagagcgcggcggtggcggtgaggaggtcggtggacgcgctccgggacgcccactcgctcgcgctgtacgcggcgccggcagcggaggtgctcctcaaagacaagttcaccgacaatgaggagccgtccaaggagagcttcgtgttccggagctcgtgctgcgaggctgctgaaccggcgaagggcgccgacgacgacgacgacggtcgctgccagcggaggagggacgtcggcacggagacgacgccgctgggcagctcgtgtcacacgccgctcaagagcgcgtccccggcgcggcacaacacgccggcgagccggtcgtcgggcccgctggtgccgtacgccggcggcggcggcgggacggacatctcggagctggcgggattccgcctcgccaagctggacctgggcgcgcggttcggcgcccacgccacgctcgtcggctggagctccaaggaggaggaagaggacgacgaggacgtgtccaagagcctcaggcacttcgaggccaccgtcggcgggatagcctgcgatagacgcggcggcgactgccgttgggatgacgacgacagggccaagagctgtatcaggtatcagagggaagaggcgaagatccaggcctgggttaacctggagagcgccaaggctgaagcgcagtcaagaaagctggaggtaaaattaaaccaggttcagtaccatctttgggcaggatttttctttgttttcatcggcaaatgtcattggcttcattccccaccaccccttgattcatctttcggactgatttggtgaatagggatcaccagagattggaggggattgagagataatttgttcattttcctttcaatcctctcgtgatccacttgtcagcccttagagtttaagggttttagtaaggcaatatttggagccagagttttttttttagatccatgtctacttccattcacgttacatatcctgttcaaactccgcacatcgcgttccaaagaatggccagcgcgtgtgagtagaaacagatcgaagctgttggttgcttagaacgtgagaccctttagttgcttattagaacgttgtgaggcatgattgttcgttgttgctttctatgcaaatgaaaccccccccccccccccccccccccacacgcggcggttcatcggaactcgaattagttagctgctcttgttctcaacttggtcgactaggcagccatgtgacaaaactccgaaggcgtgcatggagttcaaagtttgaaaccttttttttttctctctctctccctccatgctgcactgctcaaggcagcaacgacagtgcgtgaagatccagaagatgcggtgcaacctagaggagaagctgatgcggcggatgacgacggtgcagcggcgcgcgggggagtggcgcgccacggcgcgggcgcagcacctccagcagctgcggcgcgcggccgcccacggcgacggcgacggacggcggctcagggccacggccacgtccacggcccaccaccaccgccacctgccgggcagcagcgaggcgccctcctgcgcctgcttcccctgcagcaccagcaccagcggcggcggtaacaacgtcgtcagcggcggcctcctcagctactactagctagcttgcttgctggtgtcgttgttgttgttttctttgaggtctgcgaacggagagattggtcggcacggcagtgcagctgtgccgcgcacttgagaatcagtgttctaacccaagctccagacctgatctaactattatgcaattcgtatttaaaaaaagagagtcatggatcatcatctaactattatccataatcgtgaggaatacgtacgcgacaaaactattgccagttagttttctttctttcttcaaaagccatttcagtgtccacggaaatacggcggcagtttttc

SEQ ID NO: 38688 - DNA, 2054 bp, Zea Mays
ctattctattactagtttgcttcgtagttcgtacacacacattactgtagtccgtctcctctgaaaacggtttccggctcctcacagagtagtagctcctctgaaagctcggtcagggtgaccaaccaagaacacacacacacatgtccatggagctcaagtcctcctcctccacctccacctcaacaacaagaggagcaagcaagcaagcgaccaccacttgtctctgttttcttcacccaccaagaccagtaaacacagagcaaccaccaagcctgtttcctggagcgtctactctttcacgagacggtttcaccacacttgtctgaacgtgaaagagaccctccgagttcgtcagaccgtcctcctttccccatggccaccaccctcgccatgagcagcagcagcagcaacgggcacggacgccgccacgaggcctccaccacctcgtcttcgtcgtcgtcctccacggcctcggctcagaaacgaaggggggagtcgcagcagcaggccgccgtcgtcccggcgacgccgggtccggcgctgcagttcctcgcgagccccgcgcaccaccacaaccacccccagacccagctcgtcgccccgaggaggtcggtgccgtccaagtgggaggacgcggagaagtggctgcggcagtcgtcgtcgtcctcgggttccgaccaccacctccacggcaacgcgagggccgccttctccaggcagcggagcggcgggctcggacaccgaggcggcgccggaggcgggggtggggacgagaagagcgcggcggtggcggtgaggaggtcggtggacgcgctccgggacgcccactcgctcgcgctgtacgcggcgccggcagcggaggtgctcctcaaagacaagttcaccgacaatgaggagccgtccaaggagagcttcgtgttccggagctcgtgctgcgaggctgctgaaccggcgaagggcgccgacgacgacgacgacggtcgctgccagcggaggagggacgtcggcacggagacgacgccgctgggcagctcgtgtcacacgccgctcaagagcgcgtccccggcgcggcacaacacgccggcgagccggtcgtcgggcccgctggtgccgtacgccggcggcggcggcgggacggacatctcggagctggcgggattccgcctcgccaagctggacctgggcgcgcggttcggcgcccacgccacgctcgtcggctggagctccaaggaggaggaagaggacgacgaggacgtgtccaagagcctcaggcacttcgaggccaccgtcggcgggatagcctgcgatagacgcggcggcgactgccgttgggatgacgacgacagggccaagagctgtatcaggtatcagagggaagaggcgaagatccaggcctgggttaacctggagagcgccaaggctgaagcgcagtcaagaaagctggaggtgaagatccagaagatgcggtgcaacctagaggagaagctgatgcggcggatgacgacggtgcagcggcgcgcgggggagtggcgcgccacggcgcgggcgcagcacctccagcagctgcggcgcgcggccgcccacggcgacggcgacggacggcggctcagggccacggccacgtccacggcccaccaccaccgccacctgccgggcagcagcgaggcgccctcctgcgcctgcttcccctgcagcaccagcaccagcggcggcggtaacaacgtcgtcagcggcggcctcctcagctactactagctagcttgcttgctggtgtcgttgttgttgttttctttgaggtctgcgaacggagagattggtcggcacggcagtgcagctgtgccgcgcacttgagaatcagtgttctaacccaagctccagacctgatctaactattatgcaattcgtatttaaaaaaagagagtcatggatcatcatctaactattatccataatcgtgaggaatacgtacgcgacaaaactattgccagttagttttctttctttcttcaaaagccatttcagtgtccacggaaatacggcggcagtttttc

SEQ ID NO: 38689 - DNA, 1305 bp, Zea Mays
ggtggaacgcttacttgtagttgtagctgctgctcctccgacggactacgaggagaggtcgagatgcgaggagcgcgagatggccgcctgcctggaggcggcgagggaggcctgcgctaagttcgcgaaggcaaaatgcgcggggccattccaggacgcaaggatcgcccacgagggcgtcctagcgaacacgggtttcgatgtgtggggggccgctgctgacaagagttcctcaacggcggcggcggccgcctgtgccctgaacggccagccgccgcgtgtgtagcccaggtcctggtggcgcgacaaactacagaagggagcaatgtatgtgcttggcagattgtgcaaccaaaaaggtgacagcggctctggacggtgaccgcccgtaggcgcgctggaacagtgtccagacatggcgcgagtggagtcgggaatttggaatcggacgcggcaatcatcaaatggcggaacacgcgagcgaggcccccccggtgtttgtttgcagttgtgctacactgaagggtagttagtttctgggtgctggaaatctgtagggagggagaaggcacggagcggaggccttgtccgctgagagagcatggggtctgtttggttcagcttttttctgaccagcttttccgagaatctagctgtgtagagaatctgagtatcattagaattacgtgcggagaaagataaagttgtccatggggctcaggatctataaagtgacggattactactattgcgacgactcaactgattatatgtttatgttgattttgaatgttttttatccaaacgaattttatagaagctggctgaaaagctgagtgtttggcagtccgcagcacatgatcggtggacatggagcgtggaacaagacaacccctgctgcttttgcggttgttttgttttagatcattgtgcgaatcagggtaacaagactgaacatgtgtgatgttttctcactagtaaggtttggaggtttgtaccttggataggaactcgttgctgaattctccttccatttgtagaggtcagaatatgttcagatgtgtctacgcagtctgaatatatatattttttttgttgtatcgcaatggttttaaccgttgatgtagagtggccaagtacttggtacactgtgtcatttgtgatgttggtgcatttctttgcacgcattgccaacggacatgtgccggtgtggagtggtaaagcgatggtgtgagctctgcctagtttggatactctagtaatgatccaatacatatgtattgatttaaacgaagcctgagaatg

SEQ ID NO: 38690 - DNA, 649 bp, Zea Mays
gaacagtgtccagacatggcgcgagtggagtcgggaatttggaatcggacgcggcaatcatcaaatggcggaacacgcgagcgaggcccccccggtgtttgtttgcagttgtgctacactgaagggtagttagtttctgggtgctggaaatctgtagggagggagaaggcacggagcggaggccttgtccgctgagagagcatgatcggtggacatggagcgtggaacaagacaacccctgctgcttttgcggttgttttgttttagatcattgtgcgaatcagggtaacaagactgaacatgtgtgatgttttctcactagtaaggtttggaggtttgtaccttggataggaactcgttgctgaattctccttccatttgtagaggtcagaatatgttcagatgtgtctacgcagtctgaatatatatattttttttgttgtatcgcaatggttttaaccgttgatgtagagtggccaagtacttggtacactgtgtcatttgtgatgttggtgcatttctttgcacgcattgccaacggacatgtgccggtgtggagtggtaaagcgatggtgtgagctctgcctagtttggatactctagtaatgatccaatacatatgtattgatttaaacgaagcctgagaatg

SEQ ID NO: 38691 - DNA, 1872 bp, Zea Mays
  misc_feature (1)..(2): n is a, c, g, or t
nnaaccattcaacaactccagtagccaggatctggttgtctactatcatacagaagggatcactaaaaccctatacaatatgttctaagtgtgacctgtgcttcttccccacgtgtttaaccacactctgttcttcagcctagacactactaaaaagtattggatgtagctattggtataacaagtgggttttttgacatgtgtactgtggagcagtgtcaaccacgacactaaaggtaagtagtcatgagctggtttgctctcttcaatgtatgcagctgctatacttattggctggcagagcttaagccagccaactcggccagctgcaatggcaaatcaaatcccttcagcacattaggcaggacagaacaagatttatttaaaaaaaagaggggaaggggctctgtctcagcgatggctgataaaatcgatgatcgatactatttgagatagaaacatcaagtacaaataggttttccctagaagaagagaacataagttgcacatgcttgagaagctacatgaagaacaaaagaaaaaacataactcgtctgattaaaagcacgtattatctttttgcgagcagaaccatctacaatgtactctaattaatgttgttgctgttttcccataaaagcaggagagcgctagcgtccagttaatcaggcaacaactaatcaacgtgagacgaagtcaactgtggcttcgctcaatgtgtaaaagcatgatacttgaaacagctaggatgaagcaaaaaaaaactagattggaagaaagcaaatagaaatggggcatgaaaggacaagaacacgtacacctgaataagctaaagcgctcgacttatctgcgtttaccgactactacataaccggcatgcttgagaagctacatgaaaaacaagagaaaaaacataactcatctgattaaaagcacgtattatctttttgcgagcagaaccatctacaatgtactctagttaatgttgttgctgttttcccataaaagcaggagagcgctagcgtccagttaatcaggcaacaactaatcaacgtgagacgaagtcaactgtggcttcgttcaacgtgtaaaagcatgatacttgaaacagctaggatgaagcaaacaaaaaaacattggaagaaagcaaataaaaatggggcatggaaggacaagaacgagtacacttgaataagctaaaggactcggcttatctacgtttaccgactactacataaccgccattccacacagaaggcatcgcgactatatagcacggtccaccctgaccactggaattcagatgccaggaggtgatttgtactctttgcccccaactggggtgaaactggaaacagcattttcaaaaaggaaacaaatataaatgccacattgaaagtccagtggttatgtgggcattgtcaaccctaaccattcgggtttccacaaagaacacatcgtcacaaagtaaaaaaaaacataagtgaaacaaacatagtccggcgattatgggggcattgtcaaccctaaccactgagctccagtagccaggagctggtttgccctccttgatatttgcagctgctaaacttactgccttgcatgactaccgcgaggcacctcggccagctgcaacaacaacaacaacaacatgatcacaattgacatgtggtgtccagcattcgtacgtgctgacgcgctaagacaccggaaagatctaagataaacgctggatctatcccaatcctactcgcgtggctgcattctcaggccaggccactcatgacctcgcattgctcccacgctttcccgaaaatttcatcactttgccaacacaggaacgacctgagacgtgagaagacgggggattac

SEQ ID NO: 38692 - DNA, 705 bp, Zea Mays
cttttgagtccgctggattgggcctgggaacgaggattcattaccgggccgggcccttcatatttggtctctgtccttgaaaccctctggattcattccgccgcagccggcagcggcgcgccgtgtgctgacgcggccgcattttcgggttggggtctttgcaggacggagtatgaccgtcgcggccggcgagctcgaagacgaagacggcgtgcgcgggcggagccgtggcccgtgtcgtcagagcaggagcgggagcgggtggcggagcgtgggcgccgctcgccctgggtgttcagcagccgagacgtcgctgttgctgccgcgcccaagccgcccgcggacccgagcagcgggcgccgggccgaggacgaggtgcagctggccgccggtgcgcggcgcgggaacgcgaccgcggcgcgcttgaagctcaggctgcgcaggctttgcgcgtagggcggttctcgtcggagcggcggcggcggcgacggctacacggcagctctctccctaaccctagctttgtataccatgatgaattgagaattttgcaaacatgacacggctacggcgggcttcaaacttttggcaccgccgtcgtggcaattgaaagtgtggcattgaaatctctctcgaattgtaaatttggcatcgagcgcgcttaatggtgtttagcccttgtgcagtgctcgtgctgccctcgcg

SEQ ID NO: 38693 - DNA, 2088 bp, Zea Mays
gtcatttttccccctcagtggaggacaaagtcgtaatttctttcgtcgtctctctcttgtgctttcctcgctatagtcactgccaactgtttgagtacctctgctgcacaagtagcttcggctcccggcagtaccgcaactcctcttccaccaaactccagaggcatccaacagcaggcgaggaaagcaagacacgcccacccacccgctccggcagccagcggctatgcagcagcagatgcccatgccgccggcgcccgctgccgccgcggcggcggcgcccccggcggccggcatcactaccgagcagatccagaagtatttggacgaaaataagcaacttattttggccatcctggaaaatcagaacttagggaagttggctgaatgtgctcagtatcaagctcaacttcaaaagaacctcttgtacctggctgcgattgctgatgcccaaccccagcctccgcaaaaccctgcaggtcgccctcagatgatgcagcctggtatagtgcctggtgcggggcattacatgtcacaagtaccaatgttccctccaagaaccccattaaccccacagcagatgcaggagcagcagcaacaacaacagtttcagcagcagcagcagcaagtgcaggctcttacatttcctggacagatggtcatgagaccaggcaccatcaacggtatgcagcaggcgaaaaataatgccttgtatactagcaacgaaagaaaaaaagagtctttgaatgacagctactagcccctaccagtttactgtgtggtttagatgatgtagaacaaagtttagattggtgatgatgtaaaccgtccaatattgatactgcgttcttacattgctgtagtcaattatatgaataatttcatataagcatgttgccctagtggattttacctatgttttatgagctgatgtaaccaaaaacactgagcagcttttaattcagtatggcaattctgcagagttttcaccaatctgataagctgctccacacaattaaccctaagaattaacccaagcggaagcatttcaatacattcactcatacagatagacaaacatttatcaatacatagatgacatgtttccttaacaagaaaatgtcgatgagcaactaaaaacaaaacgagatgaaacacaggacaacttttcatttccagtacactattaaaatcgggcccctagcatcgatgcctttacttcttgccttcgatagggagtatttccaatccagccatccattcaagtaatgcaagccatttctgagataaatagccattggtttctctccttgtctcctttggataaaagccctactgccgtcgccgctttctcgtaacttcctttgggaacttgagaggggctgggagcgtcatgaaagtagacttaaaagcaccttctgtcacagatttgcatcccaactggtcatagtatggtttaagattttggcgggtcattttaaggtcctcacatatgtcgctggggttggatctgaagtcatcggcaaaaagtgttaggaccaatatgtagttggtcagaagctcttttttctctgttggcatgacactggaccccggttctgtaaacatgaacagcagcctgcgatatacagcctgcggggttgctggtccatggcttatctggttttcatttctgcctttccatttgcgattggacatggagccattccgcgccaatagagataggagatgttggatgtaggaaagtatccaagcaaacctctttttatcttcaccctaatgcaagagaaaagttgtttcttttagaaaacatatggaaaacatccatgaacacgatgtattaacaaaataaaaaatggcataagagcaagaattgtctgccatcattttggcagccaaactgtcacttccaaaagaggcgcacacagagcagtgccattcaacttgtcaacattgcagtagcaatggtgtctgctacactgttatcagcatgttatacaagtaaaaacggtcatgctaaggatcaattataaactgtcacaagttcaataagaagaaaaacaaaggcactccaaattaccacaaaac

SEQ ID NO: 38694 - DNA, 4270 bp, Zea Mays
ctcgtttcgccaagaaacggacgggtacttctcctcgggtggctggctcctgcgcgcgccgtgcctcctccttgctttgtcgggctcgtgcgccgccgactcgtccgttttgcccttcctcctatggctgcgtcggttttaggggttggttccaatcaaagattgggtcttttcggctggctgtttggttagggcgagattgggcgtccttgtgcctttttccattatcgcagattgctggattgagtgcttaggtcagtcggtgggtggcagtactgtaatagcagattcttgaatcgagagttttatttcaatcagcgagtaacagtagtttggtggcgtgctctggctgtttggagtgctatgctcgcctcaccaaacttgacttagaacagaactcgaggaggtcgagctggaggaggcggtcaacagtgcaaaccctcgatgctgtacggttgtggttagtgactaatcattgaaggactttggcaccactgagggggtgtttcaatgcactagagagctcataggtagttggctaaaaaaatgctagtgaaattagctaggtaactattagctaatttgctataaaagtagctaatagctggattataagttagactgtttgagacgtctttagctaattttagcggtgttagcccgagtgctttcaaacaccccctacaacgtgttttttttttaaatgccaaaaatgggcaaggcaccctattatgtcattgaggtaccattcttgttgttgtttcagtataaatgcaaaatgtgggtaatatgcctttgaaattttggcataggccaagtgaccagtaggatcatgacatgcgttcaaatcagttttgaactttggtcaaaggccatgtgagcaatgacactaatttgctatttgaatattcagttttgaatttttggtaaaggctaaatatggcactatagctagccggcactgtgccacacgggttctcaacctgtgcttatattgcagtttgtggtggggcagctaaccagcccttgttcctctggtatgcagtaatgcagtttggcacaataattagccagtcctgtgccatgtggcacaggttctaagcctgtgctttatattaccctgtggtggggcagctaactgggcccttagttctctgccttgcagtttgacactttggcttactggtctgaagtcacttttacggccccgtttggatccttggaattgaattccattctaataatagtaatttaggcatgtatcaattaagctaatacagttttataagaaatatatttgtatattattattagcaagatgtgtgagatatttatgtgctacatttttacataaaggagtgagccgaagaacgtcttataagttgcagattagaaacattgtctgctgatatataaaatcatttctcattctccgtcccatgaatttgagataggcttctatctgaaatttggaaagtggtggaatgtcaaattccaaaccaaataggttactttatttagtaaattccaattcctccaaaatgaatggatccatatgctgcttgtgtgcattcaagcatgatatggcgacttctagtgtaacttcctgtgtctttgtgacaattcgttctgacctgcatggctgcaacttctttttaatggattcttcaagatgagcaccaaactgcatgagcagagagtgcaaacaatggagtgctaggtcagattaaatgttatggaggtgctatgatccacactagaaatcatcatgccacgttagaatccactcaagcagcatgcaatgtggtcaatggcggtaaatctaggaagagacacaggtgctagaatacaaaagcaaaagttgtagggcggtttgatgaaccccatatttacagatgggttttaggaatttccccttagcacgatcgtcatccaacaatgctcttctgtcaaccatgcttaataattcttagacaaaattctctttgccatggagtgtagcctgctggtataatactatcggctttgtcagtcttccattcacagataatgtggtttgttaggctacactatcttgatctggttactagctgtgacatgctagcagtcatgtactgtcctccacaatgtgttggtgtctaaaactgaaactcgcaaccaaaattctggagttaatgcacaattaagcttggctttcaagcaacggagcataactgcaggaaagatggaaatatcaggcctctatacttttgaataaaaccacttgcaccattctttcgcagagaagtatttggacgaaaataagcaacttattttggccatcctggaaaatcagaacttagggaagttggctgaatgtgctcagtatcaagctcaacttcaaaagaacctcttgtacctggctgcgattgctgatgcccaaccccagcctccgcaaaaccctgcaggtcgccctcagatgatgcagcctggtatagtgcctggtgcggggcattacatgtcacaagtaccaatgttccctccaagaaccccattaaccccacagcagatgcaggagcagcagcaacaacaacagtttcagcagcagcagcagcaagtgcaggctcttacatttcctggacagatggtcatgagaccaggcaccatcaacggtatgcagcagcagcagcctatgcaggctgaccctgcccgggcagcagcggagctgcagcaggcagcacctatcccagctgacgggcgaggaagcaagcaggacaccgcgggtggggcgagctcagagccttctgccaatgagagccacaagagcgccaccggagcagataccgaggcaggtggcgacgtggccgagaaatcctaagtcgagcagcctgggcagggcgaaaaataatgccttgtatactagcaacgaaagaaaaaaagagtctttgaatgacagctactagcccctaccagtttactgtgtggtttagatgatgtagaacaaagtttagattggtgatgatgtaaaccgtccaatattgatactgcgttcttacattgctgtagtcaattatatgaataatttcatataagcatgttgccctagtggattttacctatgttttatgagctgatgtaaccaaaaacactgagcagcttttaattcagtatggcaattctgcagagttttcaccaatctgataagctgctccacacaattaaccctaagaattaacccaagcggaagcatttcaatacattcactcatacagatagacaaacatttatcaatacatagatgacatgtttccttaacaagaaaatgtcgatgagcaactaaaaacaaaacgagatgaaacacaggacaacttttcatttccagtacactattaaaatcgggcccctagcatcgatgcctttacttcttgccttcgatagggagtatttccaatccagccatccattcaagtaatgcaagccatttctgagataaatagccattggtttctctccttgtctcctttggataaaagccctactgccgtcgccgctttctcgtaacttcctttgggaacttgagaggggctgggagcgtcatgaaagtagacttaaaagcaccttctgtcacagatttgcatcccaactggtcatagtatggtttaagattttggcgggtcattttaaggtcctcacatatgtcgctggggttggatctgaagtcatcggcaaaaagtgttaggaccaatatgtagttggtcagaagctcttttttctctgttggcatgacactggaccccggttctgtaaacatgaacagcagcctgcgatatacagcctgcggggttgctggtccatggcttatctggttttcatttctgcctttccatttgcgattggacatggagccattccgcgccaatagagataggagatgttggatgtaggaaagtatccaagcaaacctctttttatcttcaccctaatgcaagagaaaagttgtttcttttagaaaacatatggaaaacatccatgaacacgatgtattaacaaaataaaaaatggcataagagcaagaattgtctgccatcattttggcagccaaactgtcacttccaaaagaggcgcacacagagcagtgccattcaacttgtcaacattgcagtagcaatggtgtctgctacactgttatcagcatgttatacaagtaaaaacggtcatgctaaggatcaattataaactgtcacaagttcaataagaagaaaaacaaaggcactccaaattaccacaaaac

SEQ ID NO: 38695 - DNA, 2383 bp, Zea Mays
tcgtacgttcagccactgacgaaggctgccccgtacgatacatgcaccgccttctactccaccagctacatgaacctacccgacgtgcagaaggccatgcatgccaacgccagcggcttcaaagaatacccatggcactattgtagcatgcccatatacgataactggacgacgtacgatcccatcgtttccatgctgctcatctacaagctaggagctcattggagctggcctcaagatctgggttttcagtggtgacacggacactgcggtgccgctgagcgcgaccaggcgctagcagctctctcgccgccctgccctgggccttcccgtaaagaccagttggtacccctggtacatcgtcgtggcgaccgaggttggcggctggagcatggagtacgacgaagggctgagcctgcttggtcaccgtccgcggcgccgggcacgaggtcccgctgcaccaccgcccggagcaggcgctcttcgtgttccagcaattcctgctgggcgaacccatgccggccgaggtgatcgatcagggttgatttggtgacaagggaatcacgggaggattggagatgattgagggggaaatgaactaatttccccctcaattccctacaatcctttcggaatcccgggtcaccaaatcagctctcagtgtttttttttcagcgtactgtgttagctccacactgatctgaaacataggtaacgaaccagctgctcatggaatttgtgaactgatgaaagctggtgttggtttttcaggcaaagaatggcagcagcctcatcctccttcctgcttcctcccagtgagaagagaccgcctgctgatacgatggatctgatcaaccagataaggttcattccacgatcgaccgctgaataaaagctactatgaattgaactagtggttggcgcacgctctgcgcgcgtaattttttattgtaggatacttttatatgaggaagggatataaccaaacttgaattataacaatatacaattagtagtcttcgtgataaagaaagtttgaaaacaacaaaatggatcattgaaaaatatgtggaaaaaaatattagttgaacgtgtctacagccaaataagcctttaccagcataatacctgtttttcaaaaaaaaattgtttttgtgccacgaggttcggcggctgttgctacgaaggttctaggagcattacagacacgatacatgcacaagacagtagtgaacattgtaaaaaagacaacagttatatgttacaatgagttgctcacaatttgagtttaatgaagcacttcaattctgattggtgacattgatgttcatctgtgatatgcttattatactagagagtggtggcccaaacactaacataggctgatgggcacattgactttcagttaaatgtggctacatgttaacaacataggaagggttttaaagagaagttccaggataagaactgtgctgaaacattgaactttagattgaacattcgtgattaaagtgctcaaagcattgacttttcaagtcctgtatcattcgcctcaatctccatccacaatagaattacacatactgatctcagatggagcgcttatggtaaaatcatatatctgaatatactgttgcaaggtcatcataaaaaaggaagtctgcattataggagacaggtcggtatgcatgtgtggcaagttctaaaacataactccagctagcatgcatgctgatttatcaatactggcatgtgcatctgctaacctctgggcacggcgtctcggcgggcgacgagggggtagcgaagtcaggcgtacacgacgctggaggagcccaagcgaagtctccagcgcatccgccgccgctgcttcagcacgacctccttgccgaaccccaccacacgctccatggtgaccttgttccgctcacagagaggggcgtaaaacactgaaggaactgatagctattggtcatagcctggtttctcctccttggggttgtgggcacgtgaagtctgtggccaagaatgaaactaaaaagaacaggaggcttcccaggtgtccaggacaagatgggatggggagcgatgcggggagccagggagggagcgagtcacaacgaaagagcgatggggagcagcgggagagagggcgggcggacgacaccaggttcgaccggagattcgtatggtccaagagcgcggagacgacgatgggaatgaagactcgccgtttttcatggaggtcgtcgccctgtggaagctatcacccaagagagttctggagacatcgtgtcgtgtgtactgtgtggagtggaggcaatgaaacgactcgaagtcgacgatgtgttcgcgtgtccattgattgcagagcgatgtttcg

SEQ ID NO: 38696 - DNA, 2671 bp, Zea Mays
tcgtacgttcagccactgacgaaggctgccccgtacgatacatgcaccgccttctactccaccagctacatgaacctacccgacgtgcagaaggccatgcatgccaacgccagcggcttcaaagaatacccatggcactattgtagcatgcccatatacgataactggacgacgtacgatcccatcgtttccatgctgctcatctacaagctaggagctcattggagctggcctcaagatctgggttttcaggtatatatatagacaccgtatcttatgagcaaggagccctgctgctcccatgagcaaaatcaatccagaccacaccctccacatccaacggtgctgcgtcagggggttttttataaaatgtacagagttgcaaagaacattttacaaaaccccctgacacagcaccgttggatgtggagggtgtggtctggattgattttgctcatgggagcaccaacgctccttgacacgaaactaactaaaacacatgttttttcttcttcttttcgtctgcatgcaattgcacagtggtgacacggacactgcggtgccgctgagcgcgaccaggcgctagcagctctctcgccgccctgccctgggccttcccgtaaagaccagttggtacccctggtacatcgtcgtggcgaccgaggttggcggctggagcatggagtacgacgaagggctgagcctgcttggtcaccgtccgcggcgccgggcacgaggtcccgctgcaccaccgcccggagcaggcgctcttcgtgttccagcaattcctgctgggcgaacccatgccggccgaggtgatcgatcagggttgatttggtgacaagggaatcacgggaggattggagatgattgagggggaaatgaactaatttccccctcaattccctacaatcctttcggaatcccgggtcaccaaatcagctctcagtgtttttttttcagcgtactgtgttagctccacactgatctgaaacataggtaacgaaccagctgctcatggaatttgtgaactgatgaaagctggtgttggtttttcaggcaaagaatggcagcagcctcatcctccttcctgcttcctcccagtgagaagagaccgcctgctgatacgatggatctgatcaaccagataaggttcattccacgatcgaccgctgaataaaagctactatgaattgaactagtggttggcgcacgctctgcgcgcgtaattttttattgtaggatacttttatatgaggaagggatataaccaaacttgaattataacaatatacaattagtagtcttcgtgataaagaaagtttgaaaacaacaaaatggatcattgaaaaatatgtggaaaaaaatattagttgaacgtgtctacagccaaataagcctttaccagcataatacctgtttttcaaaaaaaaattgtttttgtgccacgaggttcggcggctgttgctacgaaggttctaggagcattacagacacgatacatgcacaagacagtagtgaacattgtaaaaaagacaacagttatatgttacaatgagttgctcacaatttgagtttaatgaagcacttcaattctgattggtgacattgatgttcatctgtgatatgcttattatactagagagtggtggcccaaacactaacataggctgatgggcacattgactttcagttaaatgtggctacatgttaacaacataggaagggttttaaagagaagttccaggataagaactgtgctgaaacattgaactttagattgaacattcgtgattaaagtgctcaaagcattgacttttcaagtcctgtatcattcgcctcaatctccatccacaatagaattacacatactgatctcagatggagcgcttatggtaaaatcatatatctgaatatactgttgcaaggtcatcataaaaaaggaagtctgcattataggagacaggtcggtatgcatgtgtggcaagttctaaaacataactccagctagcatgcatgctgatttatcaatactggcatgtgcatctgctaacctctgggcacggcgtctcggcgggcgacgagggggtagcgaagtcaggcgtacacgacgctggaggagcccaagcgaagtctccagcgcatccgccgccgctgcttcagcacgacctccttgccgaaccccaccacacgctccatggtgaccttgttccgctcacagagaggggcgtaaaacactgaaggaactgatagctattggtcatagcctggtttctcctccttggggttgtgggcacgtgaagtctgtggccaagaatgaaactaaaaagaacaggaggcttcccaggtgtccaggacaagatgggatggggagcgatgcggggagccagggagggagcgagtcacaacgaaagagcgatggggagcagcgggagagagggcgggcggacgacaccaggttcgaccggagattcgtatggtccaagagcgcggagacgacgatgggaatgaagactcgccgtttttcatggaggtcgtcgccctgtggaagctatcacccaagagagttctggagacatcgtgtcgtgtgtactgtgtggagtggaggcaatgaaacgactcgaagtcgacgatgtgttcgcgtgtccattgattgcagagcgatgtttcg

SEQ ID NO: 38697 - DNA, 1072 bp, Zea Mays
gcaataagatataagagataattattcctgtactcaactatgataatgtcgtgtttacattttagctgttggtacatacaaacaaaactttgtttcaccataacaccactgttagcaaaaaaatctgagttcaaaaaggctcttccagctttcctaatgtggagaaaaccaccgaggtccatatctgaagaaacacttcgagcaccctggtccagcacggcgaaataggatggcattcctttagcacggagaagacagtccacccgccagtgcccacccgctgtctccagcgaggatgagaactctgagatggtgctcaccacataaacattcttgtatttcttcacacatggcgcctccaccacctcatacatgagaagacagtcatgcagcaaccctatccagcgaacccccaataatccaaaacgaggtgaatgacaagacgagatggcagcatcgcgaggagtggagaatcgaaacgagggtggacgggatgaagcagacgcacccaccgtcgctggcaccggatctagcgcgggccttcagcacggcgccgtagtcgccgccaccggatctagcgtgggccttcagcacagtgtcgtagtcgccgccaccgctgtcctcttcctccacggcggcaccgtcctgcccttgcgacgcttgtccacccccagcagcatcacgcgaagccgattgggcgagaacccattgcccctgttacagcaaagcaagcgaggcacacggggcgtgtcgtccacgaccgtcgctaaatcatgtgtagggccatctcgcccagatctggctgacacagaacacctctgcctccaagcgccgccggagcaaagaaggaaccgatgccctagaagcggttcgcgagcgcccaggtgagctcgccgtcatatcgtcggctttgagggacgtgctgccatagtggaggcgggaggaggggtcggtggaggcagatgaactcatcggagtaggagcctgcggcggcgcggaacatcgtcgtgcgggcgcagatcgcccagatgcgtttgcgcagtgcgagaaagacggaggtggatggcgaaaa

SEQ ID NO: 38698 - DNA, 2288 bp, Zea Mays
ctcatgcgtctccaaagtaaaaaggataagagagactctgggttgccgaggtccgctttcgtaactacaggagcttatagcaacggaaaaaagttagcacattccaaaaacttcaaagactgctgtgtacgacatcctatattaccgactgcttctgtttgaattgaacggcatcttcagaatctcggcgacgctaatttctaactcatatgggagaggtctatttctagaatttttgtttttctttaatagatttgccacctacattggcattttttcccactgcaatcgattataaactacagttttgcaacctttcagtgacatgaacatctaaccatattcaagtttgccctcatctcaatatccagatatctccacctcatcgactcaatagttaaccatattcaagtttgcccctttgaaaccatctgcttggattttatcgattccattacctaaaaatatggtacaatttcagtacgccagtacatattatgcaaatgaaacacaattaaaatcagcattgtgaactttattgtttgcccatttttttgataaattacccattttatgattctactgggcccttttcgcctttgccctacaattattcctcctcttcgctcttttgtttcattgtttgttctgctttgcacttctattcattgcattcttcgtcggtgattgtgctcgtccagttcgtcggccatgtgttctatcattttcgtcagaaatcctttcttaagccctccacttttctccttttttgttaccttcgcacttcgtttttattgttcatgttctctgtcgtcgagatctactgtctcaggtttattctggctttcatagtaaataaattgctcttcttcccctcatttcttgctggacgcatattatgcttttccactttgcgacaacactgtttcccttatttgtgttcgagtaaagttcagactttatcctcagaggtaattgttacttgccttagcttgcactctatacacataaagcgctactgtgctgttgcatcaactgtttcgttccatagtttttgttttatcccacttggtttatgtcttatgtgcgcatcaaacacttcaagctaacaattacgctttctagttttgtagacattaaaacaaatgtttcactccaatgtaggccaaacatatttaagcggtatcgcaacatgtgcatggtactttaatgcagacatttctaaggcacatatgtagtataacatgtacgggaaaatagataaacaaaacactatccattcttgtaattacatttccccttaaacctgttctccttacatgtcatgttgacaatcatctacattatctagctgtctggtagtagcatttttgtaaaactaacatacaaatctagcattaacttttgccccaaatttctaaaatctattatgaactacaaacaagttccaagtattccttttcacatgaatatgagcacactttttaagccatccaataacatttaatcaacatgtatcgtctacattatctagctgtctggtagaagcatttttgtaaaattaacataccaatctagcattaacttttttccccaaatttctgaaacatattatgaactacaaataagttccaagtattcctttgcacatgaatatgagcacccttttttaagccatccaataacatttaagcaacatgtatgcttaaattccacaatactgaccaattacacaaatgtttgctactatttcaatttttgttgtcacatcatttaaaggttacaaaatattgaactttagttgctacgacctacaatacttgaagaagagatccaggtttcccagacacctactttcgaggacaaaaccatcaatgaattggttgaaattgatccagatatattccatgaaggtagatggtggttcccatcttgcactaaatgcaacaagtcttcaattcagacctctactaaatatcgctgcatacgtgtgattggacagaaactaaatttaggcatgtcacagccttgcatattctaatgcactacatgatatagaggatgttgactagctttcagaccaccttgacaaaaaaatctggcatccccacctaagaagtatgtttaaaaaaaagaggagagcaaatgcaacccgagcaacaagttgcttccttttttacactatgtaccatagtcctttctaagttctaacattgcagaacacatacatgatcaaaactagcaggcttcaaaaacatcaaaaagattttacaggccctgaaagcgat

SEQ ID NO: 38699 - DNA, 2478 bp, Zea Mays
ctcatgcgtctccaaagtaaaaaggataagagagactctgggttgccgaggtccgctttcgtaactacaggagcttatagcaacggaaaaaagttagcacattccaaaaacttcaaagactgctgtgtacgacatcctatattaccgactgcttctgtttgaattgaacggcatcttcagaatctcggcgacgctaatttctaactcatatgggagaggtctatttctagaatttttgtttttctttaatagatttgccacctacattggcattttttcccactgcaatcgattataaactacagttttgcaacctttcagtgacatgaacatctaaccatattcaagtttgccctcatctcaatatccagatatctccacctcatcgactcaatagttaaccatattcaagtttgcccctttgaaaccatctgcttggattttatcgattccattacctaaaaatatggtacaatttcagtacgccagtacatattatgcaaatgaaacacaattaaaatcagcattgtgaactttattgtttgcccatttttttgataaattacccattttatgattctactgggcccttttcgcctttgccctacaattattcctcctcttcgctcttttgtttcattgtttgttctgctttgcacttctattcattgcattcttcgtcggtgattgtgctcgtccagttcgtcggccatgtgttctatcattttcgtcagaaatcctttcttaagccctccacttttctccttttttgttaccttcgcacttcgtttttattgttcatgttctctgtcgtcgagatctactgtctcaggtttattctggctttcatagtaaataaattgctcttcttcccctcatttcttgctggacgcatattatgcttttccactttgcgacaacactgtttcccttatttgtgttcgagtaaagttcagactttatcctcagaggtaattgttacttgccttagcttgcactctatacacataaagcgctactgtgctgttgcatcaactgtttcgttccatagtttttgttttatcccacttggtttatgtcttatgtgcgcatcaaacacttcaagctaacaattacgctttctagttttgtagacattaaaacaaatgtttcactccaatgtaggccaaacatatttaagcggtatcgcaacatgtgcatggtactttaatgcagacatttctaaggcacatatgtagtataacatgtacgggaaaatagataaacaaaacactatccattcttgtaattacatttccccttaaacctgttctccttacatgtcatgttgacaatcatctacattatctagctgtctggtagtagcatttttgtaaaactaacatacaaatctagcattaacttttgccccaaatttctaaaatctattatgaactacaaacaagttccaagtattccttttcacatgaatatgagcacactttttaagccatccaataacatttaatcaacatgtatcgtctacattatctagctgtctggtagaagcatttttgtaaaattaacataccaatctagcattaacttttttccccaaatttctgaaacatattatgaactacaaataagttccaagtattcctttgcacatgaatatgagcacccttttttaagccatccaataacatttaagcaacatgtatgcttaaattccacaatactgaccaattacacaaatgtttgctactatttcaatttttgttgtcacatcatttaaaggttacaaaatattgaactttagttgctacgacctacaatacttgaagaagagatccaggtttcccagacacctactttcgaggacaaaaccatcaatgaattggttgaaattgatccagatatattccatgaaggtagatggtggttcccatcttgcactaaatgcaacaagtcttcaattcagacctctactaaatatcgctgcatacgtgtgattggacagaaactaaatttaggcatgtcacagccttgcatattctaatgcactacatgatatagagataattgctttgcgtatctacaacgaccatcactacttttgaagcgcaaacgcttttatgtacatataaccaaaccgatgaaacttctctagcttagtatttgtttatgcgatcctcagctctgctttctgtacctatgacgatcatcgtcacttttgcaaagcaaatgcttttgtgtacatattaccaagttgatgaaaccttgccagtttagcgtctgtttattatgatctttagctcttggaacacactgctgaaatacaatgtaatatgtatagtcctctcagtctactctagacttgctgtaaccgctataattattatcttagtacaacaatttatgtaagcactgggaccagtttaaatttgctcttaaactgatgacagcatgtgctatataacaagttctgagtgtaca

SEQ ID NO: 38700 - DNA, 3042 bp, Zea Mays
ccgaggtccgctttcgtaactacaggaggtaggcaaaggagacggcgacgacgaagaacatcttatagcaacggaaaaaagttagcacattccaaaaacttcaaagactgctgtgtacgacatcctatattaccgactgcttctgtttgaattgaacggcatcttcagaatctcggcgacgctaatttctaactcatatgggagaggtctatttctagaatttttgtttttctttaatagatttgccacctacattggcattttttcccactgcaatcgattataaactacagttttgcaacctttcagtgacatgaacatctaaccatattcaagtttgccctcatctcaatatccagatatctccacctcatcgactcaatagttaaccatattcaagtttgcccctttgaaaccatctgcttggattttatcgattccattacctaaaaatatggtacaatttcagtacgccagtacatattatgcaaatgaaacacaattaaaatcagcattgtgaactttattgtttgcccatttttttgataaattacccattttatgattctactgggcccttttcgcctttgccctacaattattcctcctcttcgctcttttgtttcattgtttgttctgctttgcacttctattcattgcattcttcgtcggtgattgtgctcgtccagttcgtcggccatgtgttctatcattttcgtcagaaatcctttcttaagccctccacttttctccttttttgttaccttcgcacttcgtttttattgttcatgttctctgtcgtcgagatctactgtctcaggtttattctggctttcatagtaaataaattgctcttcttcccctcatttcttgctggacgcatattatgcttttccactttgcgacaacactgtttcccttatttgtgttcgagtaaagttcagactttatcctcagaggtaattgttacttgccttagcttgcactctatacacataaagcgctactgtgctgttgcatcaactgtttcgttccatagtttttgttttatcccacttggtttatgtcttatgtgcgcatcaaacacttcaagctaacaattacgctttctagttttgtagacattaaaacaaatgtttcactccaatgtaggccaaacatatttaagcggtatcgcaacatgtgcatggtactttaatgcagacatttctaaggcacatatgtagtataacatgtacgggaaaatagataaacaaaacactatccattcttgtaattacatttccccttaaacctgttctccttacatgtcatgttgacaatcatctacattatctagctgtctggtagtagcatttttgtaaaactaacatacaaatctagcattaacttttgccccaaatttctaaaatctattatgaactacaaacaagttccaagtattccttttcacatgaatatgagcacactttttaagccatccaataacatttaatcaacatgtatcgtctacattatctagctgtctggtagaagcatttttgtaaaattaacataccaatctagcattaacttttttccccaaatttctgaaacatattatgaactacaaataagttccaagtattcctttgcacatgaatatgagcacccttttttaagccatccaataacatttaagcaacatgtatgcttaaattccacaatactgaccaattacacaaatgtttgctactatttcaatttttgttgtcacatcatttaaaggttacaaaatattgaactttagttgctacgacctacaatacttgaagaagagatccaggtttcccagacacctactttcgaggacaaaaccatcaatgaattggttgaaattgatccagatatattccatgaaggtagatggtggttcccatcttgcactaaatgcaacaagtcttcaattcagacctctactaaatatcgctgcatacgtgtgattggacagaaactaaatttaggcatgtcacagccttgcatattctaatgcactacatgatatagaggcataaaattacacacaaaagaaaaagaatactatctatgcaagatggactcgaaaatcctttcaacatgtggatcaatctaattattttagattttttctaaatttgcctttcaatggctgaagtcccattttgatgcaaatgaaaaagcgaacatcctgtagactgctgttgctgtgcatctcaactgttttggtcttccaatctttttggaagtattattatttttactttcacttactcttataattgcatcatgttacacgatgttgacgtcaatatggatatacacccaaacaatctaaattcaaggtcttgtcaaagcaaactaaggttctttttttaatacaaagtcgtatggattctgttagatcttgtattttttcctactaatgtcaatatcaacccgcaagcgtctcttaagtcactctttttaggatcattatttcacatactttaaaccacatatgaaattttgttaggcacactatttgacaattcttatccacttacagaatgttgactagctttcagaacaccttaacaaaaaagatcttttctaaatttgcctttcaatggccaaaatcccatttttatgcaaatgagaaatgaacagcctacaaactatttttgttgtgcatctccactgttttgggcttccaatcttttcttgagtatttttttactttcaattaccccctcttatagtttcatcattaaaaagtattgttttttactttcaattactccctcttataatttcatcgtgttacacaatgttgatgtcgatatagatatacacccagaccatctaaatgcgagttcttatcaaagcaaacttaggttcctttttttgatacaaagtcgtctggtttctcttaaacctatctagtattttgtttcctactaatgtcaataccgacctgcaagcctctcctacctcactcttttcgggatcactatttcacatactttaaaccacatatgaaattat

SEQ ID NO: 38701 - DNA, 2363 bp, Zea Mays
ccgaggtccgctttcgtaactacaggaggtaggcaaaggagacggcgacgacgaagaacatcttatagcaacggaaaaaagttagcacattccaaaaacttcaaagactgctgtgtacgacatcctatattaccgactgcttctgtttgaattgaacggcatcttcagaatctcggcgacgctaatttctaactcatatgggagagtgacatgaacatctaaccatattcaagtttgccctcatctcaatatccagatatctccacctcatcgactcaatagttaaccatattcaagtttgcccctttgaaaccatctgcttggattttatcgattccattacctaaaaatatggtacaatttcagtacgccagtacatattatgcaaatgaaacacaattaaaatcagcattgtgaactttattgtttgcccatttttttgataaattacccattttatgattctactgggcccttttcgcctttgccctacaattattcctcctcttcgctcttttgtttcattgtttgttctgctttgcacttctattcattgcattcttcgtcggtgattgtgctcgtccagttcgtcggccatgtgttctatcattttcgtcagaaatcctttcttaagccctccacttttctccttttttgttaccttcgcacttcgtttttattgttcatgttctctgtcgtcgagatctactgtctcaggtttattctggctttcatagtaaataaattgctcttcttcccctcatttcttgctggacgcatattatgcttttccactttgcgacaacactgtttcccttatttgtgttcgagtaaagttcagactttatcctcagaggtaattgttacttgccttagcttgcactctatacacataaagcgctactgtgctgttgcatcaactgtttcgttccatagtttttgttttatcccacttggtttatgtcttatgtgcgcatcaaacacttcaagctaacaattacgctttctagttttgtagacattaaaacaaatgtttcactccaatgtaggccaaacatatttaagcggtatcgcaacatgtgcatggtactttaatgcagacatttctaaggcacatatgtagtataacatgtacgggaaaatagataaacaaaacactatccattcttgtaattacatttccccttaaacctgttctccttacatgtcatgttgacaatcatctacattatctagctgtctggtagtagcatttttgtaaaactaacatacaaatctagcattaacttttgccccaaatttctaaaatctattatgaactacaaacaagttccaagtattccttttcacatgaatatgagcacactttttaagccatccaataacatttaatcaacatgtatcgtctacattatctagctgtctggtagaagcatttttgtaaaattaacataccaatctagcattaacttttttccccaaatttctgaaacatattatgaactacaaataagttccaagtattcctttgcacatgaatatgagcacccttttttaagccatccaataacatttaagcaacatgtatgcttaaattccacaatactgaccaattacacaaatgtttgctactatttcaatttttgttgtcacatcatttaaaggttacaaaatattgaactttagttgctacgacctacaatacttgaagaagagatccaggtttcccagacacctactttcgaggacaaaaccatcaatgaattggttgaaattgatccagatatattccatgaaggtagatggtggttcccatcttgcactaaatgcaacaagtcttcaattcagacctctactaaatatcgctgcatacgtgtgattggacagaaactaaatttaggcatgtcacagccttgcatattctaatgcactacatgatatagagataattgctttgcgtatctacaacgaccatcactacttttgaagcgcaaacgcttttatgtacatataaccaaaccgatgaaacttctctagcttagtatttgtttatgcgatcctcagctctgctttctgtacctatgacgatcatcgtcacttttgcaaagcaaatgcttttgtgtacatattaccaagttgatgaaaccttgccagtttagcgtctgtttattatgatctttagctcttggaacacactgctgaaatacaatgtaatatgtatagtcctctcagtctactctagacttgctgtaaccgctataattattatcttagtacaacaatttatgtaagcactgggaccagtttaaatttgctcttaaactgatgacagcatgtgctatataacaagttctgagtgtaca

SEQ ID NO: 38702 - DNA, 876 bp, Zea Mays
ccgctttcgtaactacaggaggtaggcaaaggagacggcgacgacgaagaacatcttatagcaacggaaaaaagttagcacattccaaaaacttcaaagactgctgtgtacgacatcctatattaccgactgcttctgtttgaattgaacggcatcttcagaatctcggcgacgctaatttctaactcatatgggagagttgctacgacctacaatacttgaagaagagatccaggtttcccagacacctactttcgaggacaaaaccatcaatgaattggttgaaattgatccagatatattccatgaaggtagatggtggttcccatcttgcactaaatgcaacaagtcttcaattcagacctctactaaatatcgctgcatacgtgtgattggacagaaactaaatttaggcatgtcacagccttgcatattctaatgcactacatgatatagagataattgctttgcgtatctacaacgaccatcactacttttgaagcgcaaacgcttttatgtacatataaccaaaccgatgaaacttctctagcttagtatttgtttatgcgatcctcagctctgctttctgtacctatgacgatcatcgtcacttttgcaaagcaaatgcttttgtgtacatattaccaagttgatgaaaccttgccagtttagcgtctgtttattatgatctttagctcttggaacacactgctgaaatacaatgtaatatgtatagtcctctcagtctactctagacttgctgtaaccgctataattattatcttagtacaacaatttatgtaagcactgggaccagtttaaatttgctcttaaactgatgacagcatgtgctatataacaagttctgagtgtaca

SEQ ID NO: 38703 - DNA, 2726 bp, Zea Mays
ctttcgtaactacaggaggtaggcaaaggagacggcgacgacgaagaacatcttatagcaacggaaaaaagttagcacattccaaaaacttcaaagactgctgtgtacgacatcctatattaccgactgcttctgtttgaattgaacggcatcttcagaatctcggcgacgctaatttctaactcatatgggagagtgacatgaacatctaaccatattcaagtttgccctcatctcaatatccagatatctccacctcatcgactcaatagttaaccatattcaagtttgcccctttgaaaccatctgcttggattttatcgattccattacctaaaaatatggtacaatttcagtacgccagtacatattatgcaaatgaaacacaattaaaatcagcattgtgaactttattgtttgcccatttttttgataaattacccattttatgattctactgggcccttttcgcctttgccctacaattattcctcctcttcgctcttttgtttcattgtttgttctgctttgcacttctattcattgcattcttcgtcggtgattgtgctcgtccagttcgtcggccatgtgttctatcattttcgtcagaaatcctttcttaagccctccacttttctccttttttgttaccttcgcacttcgtttttattgttcatgttctctgtcgtcgagatctactgtctcaggtttattctggctttcatagtaaataaattgctcttcttcccctcatttcttgctggacgcatattatgcttttccactttgcgacaacactgtttcccttatttgtgttcgagtaaagttcagactttatcctcagagttgctacgacctacaatacttgaagaagagatccaggtttcccagacacctactttcgaggacaaaaccatcaatgaattggttgaaattgatccagatatattccatgtaatcactttaacttcctattttgttgaactcattcattacatcaactacaactccatcttatttatagtaaacttttttcgcgaaatgcagccacaaggttatagatgtactaatcgctatatcacgcctcacacaggaaggtagatggtggttcccatcttgcactaaatgcaacaagtcttcaattcagacctctactaaatatcgctgcatacgtgtgattggacagaaactaaatttaggtaacctttcacacaaacaattactttgtcgttattcgtctgagataaaacacttcctcttacttatcaaatcactgccacacaacattaacagttcataattcaaagatacaaactcggcttcattgctactgatggaacattcgaagcagaattcttttgttttgacaatatagctaaacaaatagtagaaaaaccttgtgaaacccttgttagtatccttctctagatttagttgccattgtctctctcagattcacctttgcagataccattaatatgttcgcgttctccgtcacaaatcgagtcttttttgttctctccgtgttaacaaatcatggaaggaaaaggtcagcaccatgtaccatacaaaactatcaacaacaagaattagtgacacaagatgacatattagcctcacaaccacataaaactctccaacaacatcgtttgcaaagctatccacttttggtgaccataaaaatgtggcatgtcacagccttgcatattctaatgcactacatgatatagaggcataaaattacacacaaaagaaaaagaatactatctatgcaagatggactcgaaaatcctttcaacatgtggatcaatctaattattttagattttttctaaatttgcctttcaatggctgaagtcccattttgatgcaaatgaaaaagcgaacatcctgtagactgctgttgctgtgcatctcaactgttttggtcttccaatctttttggaagtattattatttttactttcacttactcttataattgcatcatgttacacgatgttgacgtcaatatggatatacacccaaacaatctaaattcaaggtcttgtcaaagcaaactaaggttctttttttaatacaaagtcgtatggattctgttagatcttgtattttttcctactaatgtcaatatcaacccgcaagcgtctcttaagtcactctttttaggatcattatttcacatactttaaaccacatatgaaattttgttaggcacactatttgacaattcttatccacttacagaatgttgactagctttcagaacaccttaacaaaaaagatcttttctaaatttgcctttcaatggccaaaatcccatttttatgcaaatgagaaatgaacagcctacaaactatttttgttgtgcatctccactgttttgggcttccaatcttttcttgagtatttttttactttcaattaccccctcttatagtttcatcattaaaaagtattgttttttactttcaattactccctcttataatttcatcgtgttacacaatgttgatgtcgatatagatatacacccagaccatctaaatgcgagttcttatcaaagcaaacttaggttcctttttttgatacaaagtcgtctggtttctcttaaacctatctagtattttgtttcctactaatgtcaataccgacctgcaagcctctcctacctcactcttttcgggatcactatttcacatactttaaaccacatatgaaattat

SEQ ID NO: 38704 - DNA, 2841 bp, Zea Mays
ctttcgtaactacaggaggtaggcaaaggagacggcgacgacgaagaacatcttatagcaacggaaaaaagttagcacattccaaaaacttcaaagactgctgtgtacgacatcctatattaccgactgcttctgtttgaattgaacggcatcttcagaatctcggcgacgctaatttctaactcatatgggagagtgacatgaacatctaaccatattcaagtttgccctcatctcaatatccagatatctccacctcatcgactcaatagttaaccatattcaagtttgcccctttgaaaccatctgcttggattttatcgattccattacctaaaaatatggtacaatttcagtacgccagtacatattatgcaaatgaaacacaattaaaatcagcattgtgaactttattgtttgcccatttttttgataaattacccattttatgattctactgggcccttttcgcctttgccctacaattattcctcctcttcgctcttttgtttcattgtttgttctgctttgcacttctattcattgcattcttcgtcggtgattgtgctcgtccagttcgtcggccatgtgttctatcattttcgtcagaaatcctttcttaagccctccacttttctccttttttgttaccttcgcacttcgtttttattgttcatgttctctgtcgtcgagatctactgtctcaggtttattctggctttcatagtaaataaattgctcttcttcccctcatttcttgctggacgcatattatgcttttccactttgcgacaacactgtttcccttatttgtgttcgagtaaagttcagactttatcctcagaggtaattgttacttgccttagcttgcactctatacacataaagcgctactgtgctgttgcatcaactgtttcgttccatagtttttgttttatcccacttggtttatgtcttatgtgcgcatcaaacacttcaagctaacaattacgctttctagttttgtagacattaaaacaaatgtttcactccaatgtaggccaaacatatttaagcggtatcgcaacatgtgcatggtactttaatgcagacatttctaaggcacatatgtagtataacatgtacgggaaaatagataaacaaaacactatccattcttgtaattacatttccccttaaacctgttctccttacatgtcatgttgacaatcatctacattatctagctgtctggtagtagcatttttgtaaaactaacatacaaatctagcattaacttttgccccaaatttctaaaatctattatgaactacaaacaagttccaagtattccttttcacatgaatatgagcacactttttaagccatccaataacatttaatcaacatgtatcgtctacattatctagctgtctggtagaagcatttttgtaaaattaacataccaatctagcattaacttttttccccaaatttctgaaacatattatgaactacaaataagttccaagtattcctttgcacatgaatatgagcacccttttttaagccatccaataacatttaagcaacatgtatgcttaaattccacaatactgaccaattacacaaatgtttgctactatttcaatttttgttgtcacatcatttaaaggttacaaaatattgaactttagttgctacgacctacaatacttgaagaagagatccaggtttcccagacacctactttcgaggacaaaaccatcaatgaattggttgaaattgatccagatatattccatgaaggtagatggtggttcccatcttgcactaaatgcaacaagtcttcaattcagacctctactaaatatcgctgcatacgtgtgattggacagaaactaaatttaggtaacctttcacacaaacaattactttgtcgttattcgtctgagataaaacacttcctcttacttatcaaatcactgccacacaacattaacagttcataattcaaagatacaaactcggcttcattgctactgatggaacattcgaagcagaattcttttgttttgacaatatagctaaacaaatagtagaaaaaccttgtgaaacccttgttagtatccttctctagatttagttgccattgtctctctcagattcacctttgcagataccattaatatgttcgcgttctccgtcacaaatcgagtcttttttgttctctccgtgttaacaaatcatggaaggaaaaggtcagcaccatgtaccatacaaaactatcaacaacaagaattagtgacacaagatgacatattagcctcacaaccacataaaactctccaacaacatcgtttgcaaagctatccacttttggtgaccataaaaatgtggcatgtcacagccttgcatattctaatgcactacatgatatagagataattgctttgcgtatctacaacgaccatcactacttttgaagcgcaaacgcttttatgtacatataaccaaaccgatgaaacttctctagcttagtatttgtttatgcgatcctcagctctgctttctgtacctatgacgatcatcgtcacttttgcaaagcaaatgcttttgtgtacatattaccaagttgatgaaaccttgccagtttagcgtctgtttattatgatctttagctcttggaacacactgctgaaatacaatgtaatatgtatagtcctctcagtctactctagacttgctgtaaccgctataattattatcttagtacaacaatttatgtaagcactgggaccagtttaaatttgctcttaaactgatgacagcatgtgctatataacaagttctgagtgtaca

SEQ ID NO: 38705 - DNA, 2411 bp, Zea Mays
ctttcgtaactacaggaggtaggcaaaggagacggcgacgacgaagaacatcttatagcaacggaaaaaagttagcacattccaaaaacttcaaagactgctgtgtacgacatcctatattaccgactgcttctgtttgaattgaacggcatcttcagaatctcggcgacgctaatttctaactcatatgggagaggtctatttctagaatttttgtttttctttaatagatttgccacctacattggcattttttcccactgcaatcgattataaactacagttttgcaacctttcagtgacatgaacatctaaccatattcaagtttgccctcatctcaatatccagatatctccacctcatcgactcaatagttaaccatattcaagtttgcccctttgaaaccatctgcttggattttatcgattccattacctaaaaatatggtacaatttcagtacgccagtacatattatgcaaatgaaacacaattaaaatcagcattgtgaactttattgtttgcccatttttttgataaattacccattttatgattctactgggcccttttcgcctttgccctacaattattcctcctcttcgctcttttgtttcattgtttgttctgctttgcacttctattcattgcattcttcgtcggtgattgtgctcgtccagttcgtcggccatgtgttctatcattttcgtcagaaatcctttcttaagccctccacttttctccttttttgttaccttcgcacttcgtttttattgttcatgttctctgtcgtcgagatctactgtctcaggtttattctggctttcatagtaaataaattgctcttcttcccctcatttcttgctggacgcatattatgcttttccactttgcgacaacactgtttcccttatttgtgttcgagtaaagttcagactttatcctcagaggtaattgttacttgccttagcttgcactctatacacataaagcgctactgtgctgttgcatcaactgtttcgttccatagtttttgttttatcccacttggtttatgtcttatgtgcgcatcaaacacttcaagctaacaattacgctttctagttttgtagacattaaaacaaatgtttcactccaatgtaggccaaacatatttaagcggtatcgcaacatgtgcatggtactttaatgcagacatttctaaggcacatatgtagtataacatgtacgggaaaatagataaacaaaacactatccattcttgtaattacatttccccttaaacctgttctccttacatgtcatgttgacaatcatctacattatctagctgtctggtagtagcatttttgtaaaactaacatacaaatctagcattaacttttgccccaaatttctaaaatctattatgaactacaaacaagttccaagtattccttttcacatgaatatgagcacactttttaagccatccaataacatttaatcaacatgtatcgtctacattatctagctgtctggtagaagcatttttgtaaaattaacataccaatctagcattaacttttttccccaaatttctgaaacatattatgaactacaaataagttccaagtattcctttgcacatgaatatgagcacccttttttaagccatccaataacatttaagcaacatgtatgcttaaattccacaatactgaccaattacacaaatgtttgctactatttcaatttttgttgtcacatcatttaaaggttacaaaatattgaactttagttgctacgacctacaatacttgaagaagagatccaggtttcccagacacctactttcgaggacaaaaccatcaatgaattggttgaaattgatccagatatattccatgaaggtagatggtggttcccatcttgcactaaatgcaacaagtcttcaattcagacctctactaaatatcgctgcatacgtgtgattggacagaaactaaatttagataattgctttgcgtatctacaacgaccatcactacttttgaagcgcaaacgcttttatgtacatataaccaaaccgatgaaacttctctagcttagtatttgtttatgcgatcctcagctctgctttctgtacctatgacgatcatcgtcacttttgcaaagcaaatgcttttgtgtacatattaccaagttgatgaaaccttgccagtttagcgtctgtttattatgatctttagctcttggaacacactgctgaaatacaatgtaatatgtatagtcctctcagtctactctagacttgctgtaaccgctataattattatcttagtacaacaatttatgtaagcactgggaccagtttaaatttgctcttaaactgatgacagcatgtgctatataacaagttctgagtgtaca

SEQ ID NO: 38706 - DNA, 2349 bp, Zea Mays
ctttcgtaactacaggaggtaggcaaaggagacggcgacgacgaagaacatcttatagcaacggaaaaaagttagcacattccaaaaacttcaaagactgctgtgtacgacatcctatattaccgactgcttctgtttgaattgaacggcatcttcagaatctcggcgacgctaatttctaactcatatgggagagtgacatgaacatctaaccatattcaagtttgccctcatctcaatatccagatatctccacctcatcgactcaatagttaaccatattcaagtttgcccctttgaaaccatctgcttggattttatcgattccattacctaaaaatatggtacaatttcagtacgccagtacatattatgcaaatgaaacacaattaaaatcagcattgtgaactttattgtttgcccatttttttgataaattacccattttatgattctactgggcccttttcgcctttgccctacaattattcctcctcttcgctcttttgtttcattgtttgttctgctttgcacttctattcattgcattcttcgtcggtgattgtgctcgtccagttcgtcggccatgtgttctatcattttcgtcagaaatcctttcttaagccctccacttttctccttttttgttaccttcgcacttcgtttttattgttcatgttctctgtcgtcgagatctactgtctcaggtttattctggctttcatagtaaataaattgctcttcttcccctcatttcttgctggacgcatattatgcttttccactttgcgacaacactgtttcccttatttgtgttcgagtaaagttcagactttatcctcagaggtaattgttacttgccttagcttgcactctatacacataaagcgctactgtgctgttgcatcaactgtttcgttccatagtttttgttttatcccacttggtttatgtcttatgtgcgcatcaaacacttcaagctaacaattacgctttctagttttgtagacattaaaacaaatgtttcactccaatgtaggccaaacatatttaagcggtatcgcaacatgtgcatggtactttaatgcagacatttctaaggcacatatgtagtataacatgtacgggaaaatagataaacaaaacactatccattcttgtaattacatttccccttaaacctgttctccttacatgtcatgttgacaatcatctacattatctagctgtctggtagtagcatttttgtaaaactaacatacaaatctagcattaacttttgccccaaatttctaaaatctattatgaactacaaacaagttccaagtattccttttcacatgaatatgagcacactttttaagccatccaataacatttaatcaacatgtatcgtctacattatctagctgtctggtagaagcatttttgtaaaattaacataccaatctagcattaacttttttccccaaatttctgaaacatattatgaactacaaataagttccaagtattcctttgcacatgaatatgagcacccttttttaagccatccaataacatttaagcaacatgtatgcttaaattccacaatactgaccaattacacaaatgtttgctactatttcaatttttgttgtcacatcatttaaaggttacaaaatattgaactttagttgctacgacctacaatacttgaagaagagatccaggtttcccagacacctactttcgaggacaaaaccatcaatgaattggttgaaattgatccagatatattccatgtagatggtggttcccatcttgcactaaatgcaacaagtcttcaattcagacctctactaaatatcgctgcatacgtgtgattggacagaaactaaatttaggcatgtcacagccttgcatattctaatgcactacatgatatagagataattgctttgcgtatctacaacgaccatcactacttttgaagcgcaaacgcttttatgtacatataaccaaaccgatgaaacttctctagcttagtatttgtttatgcgatcctcagctctgctttctgtacctatgacgatcatcgtcacttttgcaaagcaaatgcttttgtgtacatattaccaagttgatgaaaccttgccagtttagcgtctgtttattatgatctttagctcttggaacacactgctgaaatacaatgtaatatgtatagtcctctcagtctactctagacttgctgtaaccgctataattattatcttagtacaacaatttatgtaagcactgggaccagtttaaatttgctcttaaactgatgacagcatgtgctatataacaagttctgagtgtaca

SEQ ID NO: 38707 - DNA, 1846 bp, Zea Mays
ctttcgtaactacaggaggtaggcaaaggagacggcgacgacgaagaacatcttatagcaacggaaaaaagttagcacattccaaaaacttcaaagactgctgtgtacgacatcctatattaccgactgcttctgtttgaattgaacggcatcttcagaatctcggcgacgctaatttctaactcatatgggagaggtctatttctagaatttttgtttttctttaatagatttgccacctacattggcattttttcccactgcaatcgattataaactacagttttgcaacctttcagtgacatgaacatctaaccatattcaagtttgccctcatctcaatatccagatatctccacctcatcgactcaatagttaaccatattcaagtttgcccctttgaaaccatctgcttggattttatcgattccattacctaaaaatatggtacaatttcagtacgccagtacatattatgcaaatgaaacacaattaaaatcagcattgtgaactttattgtttgcccatttttttgataaattacccattttatgattctactgggcccttttcgcctttgccctacaattattcctcctcttcgctcttttgtttcattgtttgttctgctttgcacttctattcattgcattcttcgtcggtgattgtgctcgtccagttcgtcggccatgtgttctatcattttcgtcagaaatcctttcttaagccctccacttttctccttttttgttaccttcgcacttcgtttttattgttcatgttctctgtcgtcgagatctactgtctcaggtttattctggctttcatagtaaataaattgctcttcttcccctcatttcttgctggacgcatattatgcttttccactttgcgacaacactgtttcccttatttgtgttcgagtaaagttcagactttatcctcagagttgctacgacctacaatacttgaagaagagatccaggtttcccagacacctactttcgaggacaaaaccatcaatgaattggttgaaattgatccagatatattccatgaaggtagatggtggttcccatcttgcactaaatgcaacaagtcttcaattcagacctctactaaatatcgctgcatacgtgtgattggacagaaactaaatttagataccattaatatgttcgcgttctccgtcacaaatcgagtcttttttgttctctccgtgttaacaaatcatggaaggaaaaggtcagcaccatgtaccatacaaaactatcaacaacaagaattagtgacacaagatgacatattagcctcacaaccacataaaactctccaacaacatcgtttgcaaagctatccacttttggtgaccataaaaatgtggcatgtcacagccttgcatattctaatgcactacatgatatagagataattgctttgcgtatctacaacgaccatcactacttttgaagcgcaaacgcttttatgtacatataaccaaaccgatgaaacttctctagcttagtatttgtttatgcgatcctcagctctgctttctgtacctatgacgatcatcgtcacttttgcaaagcaaatgcttttgtgtacatattaccaagttgatgaaaccttgccagtttagcgtctgtttattatgatctttagctcttggaacacactgctgaaatacaatgtaatatgtatagtcctctcagtctactctagacttgctgtaaccgctataattattatcttagtacaacaatttatgtaagcactgggaccagtttaaatttgctcttaaactgatgacagcatgtgctatataacaagttctgagtgtaca

SEQ ID NO: 38708 - DNA, 957 bp, Zea Mays
ctttcgtaactacaggaggtaggcaaaggagacggcgacgacgaagaacatcttatagcaacggaaaaaagttagcacattccaaaaacttcaaagactgctgtgtacgacatcctatattaccgactgcttctgtttgaattgaacggcatcttcagaatctcggcgacgctaatttctaactcatatgggagaggtctatttctagaatttttgtttttctttaatagatttgccacctacattggcattttttcccactgcaatcgattataaactacagttttgcaacctttcagtgacatgaacatctaaccatattcaagtttgccctcatctcaatatccagatatctccacctcatcgactcaatagttaaccatattcaagtttgcccctttgaaaccatctgcttggattttatcgattccattacctaaaaatatggtacaatttcagtacgccagtacatattatgcaaatgaaacacaattaaaatcagcattgtgaactttattgtttgcccatttttttgataaattacccattttatgattctactgggcccttttcgcctttgccctacaattattcctcctcttcgctcttttgtttcattgtttgttctgctttgcacttctattcattgcattcttcgtcggtgattgtgctcgtccagttcgtcggccatgtgttctatcattttcgtcagaaatcctttcttaagccctccacttttctccttttttgttaccttcgcacttcgtttttattgttcatgttctctgtcgtcgagatctactgtctcaggtttattctggctttcatagtaaataaattgctcttcttcccctcatttcttgctggacgcatattatgcttttccactttgcgacaacactgtttcccttatttgtgttcgagtaaagttcagactttatcctcagagaagagctg

SEQ ID NO: 38709 - DNA, 1401 bp, Zea Mays
caaaccaactcgagtttgtatgtgtatttgcctactcgagtttgtatgtgtatttgccttcgtattttcgagaatgaaataaaattaagtgggaaaatcccatttttctttatcctccaccgccgtattttctttttgctccccgaagctgcaaccatcgtttcctcctctcctgaagcacgacagccagtccagccaccatttgggtgctcatctccctctgctcggcacctagccccagctcgcccgagctccctgcgccgacctcatcttccccatggcgcgtcaccttctagtcctctccttcccacggcacagcagcgcccctgcagctccccttctccagatccatggcacccaacaccttgagcgcccctgccgctgctcctccaccgggatctcctcctccactaggcgtccaggcttgtcccaccgtggctgcccctcctccatctcctccctccccaccaggttacccagattccatggccgccgccgccccagccatctccctggtggccgacctcgcccctgccccagccacagctcccccttcggccctgctgctgcaagcactcagcctctcccatggcacacggtactcgtccagcccctttctactggtggctgagccatctctctggtgctcgatgaaatgaccatgaggagttttgtgttgtgtgcagccccatctgcaacaccgtcgacccccgacgaggtcctttctcgccttgtcgttttagtactcggcgtcgattaagtagatgctaaccgtgtgtatattcgtgtgttcttgtgaggagaaatcccatgatttgggggaagacgaagtccaagcacaacccccgccaatcgctcgatgaaaaatctaaaccaaaaccctcagcgttttcaagggttccggagggattttatgttggctttgatgattgctgtacaaggatgatatggcctcccgcccaaagctgtctggtattcagaagcaggttttggcgctgtataggggattccttcggacagcacgccttaaggcccctgaagaacgccgcaggatcgagtctgttatcttggcagagttccgtgacaacgcaaggagtgttgaccttaggaactttgtacacatagagtacttgttgaggagagggaagaagcatcttgagcagctcaagaatcctgatattactggactcgctacccttgtagtaaagaaatgagcaagagaagaaggaagactagtcagacaaaatagaagacgagaagaactgatgtagccatgttcatgcttccatgtaatagttcattattccatacatatttctgtctatccagaatctactattgaaatacatatctagcatagcttgctcagctcctatatgttgtttcaacgttgatttaaaa

SEQ ID NO: 38710 - DNA, 1061 bp, Zea Mays
atcgtttcctcctctcctgaagcacgacagccagtccagccaccatttgggtgctcatctccctctgctcggcacctagccccagctcgcccgagctccctgcgccgacctcatcttccccatggcgcgtcaccttctagtcctctccttcccacggcacagcagcgcccctgcagctccccttctccagatccatggcacccaacaccttgagcgcccctgccgctgctcctccaccgggatctcctcctccactaggcgtccaggcttgtcccaccgtggctgcccctcctccatctcctccctccccaccaggttacccagattccatggccgccgccgccccagccatctccctggtggccgacctcgcccctgccccagccacagctcccccttcggccctgctgctgcaagcactcagcctctcccatggcacacgccccatctgcaacaccgtcgacccccgacgaggtcctttctcgccttgtcgttttagtactcggcgtcgattaagtagatgctaaccgtgtgtatattcgtgtgttcttgtgaggagaaatcccatgatttgggggaagacgaagtccaagcacaacccccgccaatcgctcgatgaaaaatctaaaccaaaaccctcagcgttttcaagggttccggagggattttatgttggctttgatgattgctgtacaaggatgatatggcctcccgcccaaagctgtctggtattcagaagcaggttttggcgctgtataggggattccttcggacagcacgccttaaggcccctgaagaacgccgcaggatcgagtctgttatcttggcagagttccgtgacaacgcaaggagtgttgaccttaggaactttgtacacatagagtacttgttgaggagagggaagaagcatcttgagcagctcaagaatcctgatattactggactcgctacccttgtagtaaagaaatgagcatatggagttctttatgttccacaagcacaattgatcttatggaatggaaatagtagaacattacctggtgagagcacacaaatacctt

SEQ ID NO: 38711 - DNA, 938 bp, Zea Mays
ctctcctgaagcacgacagccagtccagccaccatttgggtgctcatctccctctgctcggcacctagccccagctcgcccgagctccctgcgccgacctcatcttccccatggcgcgtcaccttctagtcctctccttcccacggcacagcagcgcccctgcagctccccttctccagatccatggcacccaacaccttgagcgcccctgccgctgctcctccaccgggatctcctcctccactaggcgtccaggcttgtcccaccgtggctgcccctcctccatctcctccctccccaccaggttacccagattccatggccgccgccgccccagccatctccctggtggccgacctcgcccctgccccagccacagctcccccttcggccctgctgctgcaagcactcagcctctcccatggcacacggtactcgtccagcccctttctactggtggctgagccatctctctggtgctcgatgaaatgaccatgaggagttttgtgttgtgtgcagccccatctgcaacaccgtcgacccccgacgaggtcctttctcgccttgtcgttttagtactcggcgtcgattaagtagatgctaaccgtgtgtatattcgtgtgttcttgtgaggagaaatcccatgatttgggggaagacgaagtccaagcacaacccccgccaatcgctcgatgaaaaatctaaaccaaaaccctcagcgttttcaagggttccggagggattttatgttgcaagagaagaaggaagactagtcagacaaaatagaagacgagaagaactgatgtagccatgttcatgcttccatgtaatagttcattattccatacatatttctgtctatccagaatctactattgaaatacatatctagcatagcttgctcagctcctatatgttgtttcaacgttgatttaaaa

SEQ ID NO: 38712 - DNA, 1663 bp, Zea Mays
agaaaacccatctttcgaggtcaagtggtcaacccaaaccgaacctttcacagccgcgttattattctcgtctccagccccccacacgcgctcccctccaccgtccgccgcgcgtccccaccggcggccaccgccaccggcccacctccccggcgccccttacccttctttggcgcgatggtaactcgcggcggcggtagccagtcctacggcttcccgatctactgcgccgcctggctcccgctcgcccacatcatcaagcccgaccctcccgctgccgaggcggatgcggatgacccctcctcctccaccccctcgcttccgatggctgtcctcgggggcggtggcggggagggccggagcggggtgccgaacaagctcgtggtggcggccctcgccaccggggaagaggccgcgccggctctctcccccgatacggtggtcgaggtgaatagtgaggaggaggtgccgtacagaatggccgtccacccgcgtggcgatggcgtgttctgtgccttccccaacggctgcaggttgtatcgatgggaatcacaggaaggagagggaccacagaggttggctttggagccggaccaggatgctttagcagagctgaaagatgtcggtttgcagttggccgtatccttcagtggagaaggttcaatacttgctattggtggtgaagatgggtatttaagagttttcaactggcctaccatggggtctgttctcacagaaatcgatactaaaacatcgattaaggatcttactatcagttccgacgagaagtttcttgctgtgaataggagcagtggcccatgtagagtgtgggatttgcagtcatctgaagttgtagccagtctgccaagagaaacatggaacaatagaaggaagcatcatcgtagttggctcaaaagacatgcggacacttgtaacagttaaaaaggctcatcttggtattgttactacgctgaccttctctcaggattcaagaacattgctgtcaacttccttcgactcttctgcaagggtgacatctgttgggtctccaaagagtaatggaacaagcatatggcccatgctactagttgttattcttgcaattttggtgtactactgtacgcagcacaaagaagacattttggcaatgttgcagcgttgagatagatttctgttcagcccctgactggtctactctgctggacgtattattagtgttgcttcagtgattgaagaaattttggacttgggccaacttcattattctctcaaggacaaacaatacagcaaaaggcactgagccctgttatgttttgtagtaaaaagggtaatgtacttactcatgttgtcgaagtttttgtaagttgatggccgcaagtgatagacatatgtggcaatgtttcttcatgctgcacttgtgaattgcaagatgttcgccccaagagtccaatatagagagttcagaaacaaatttttttggtgtgcgaaacaatttattatgtatgcgtaataaagctgtacaaagaatatctaaaaatgcagatagcttctgggtgcttatacatgtgatgaccaattattgtttggatgacaaaagggagttgtaacactatgctctacatctgtgtgtcggaaataatcagtttgcgtcggtttcttcttg

SEQ ID NO: 38713 - DNA, 1838 bp, Zea Mays
agaaaacccatctttcgaggtcaagtggtcaacccaaaccgaacctttcacagccgcgttattattctcgtctccagccccccacacgcgctcccctccaccgtccgccgcgcgtccccaccggcggccaccgccaccggcccacctccccggcgccccttacccttctttggcgcgatggtaactcgcggcggcggtagccagtcctacggcttcccgatctactgcgccgcctggctcccgctcgcccacatcatcaagcccgaccctcccgctgccgaggcggatgcggatgacccctcctcctccaccccctcgcttccgatggctgtcctcgggggcggtggcggggagggccggagcggggtgccgaacaagctcgtggtggcggccctcgccaccggggaagaggccgcgccggctctctcccccgatacggtggtcgaggtgaatagtgaggaggaggtgccgtacagaatggccgtccacccgcgtggcgatggcgtgttctgtgccttccccaacggctgcaggaaggagagggaccacagaggttggctttggagccggaccaggatgctttagcagagctgaaagatgtcggtttgcagttggccgtatccttcagtggagaaggttcaatacttgctattggtggtgaagatgggtatttaagagttttcaactggcctaccatggggtctgttctcacagaaatcgatactaaaacatcgattaaggatcttactatcagttccgacgagaagtttcttgctgtgaataggagcagtggcccatgtagagtgtgggatttgcagtcatctgaagttgtagccagtctgccaagagaaacaggggaaatatttggattctgcagattctctaataaggctgacaacagtcatgtcctatttataactgtgatggaaggcgattatggaaaaatagtgtcttggaatactacctcatggacgagaaccggatcaaagaaaataactcgtgaggcaatttcagcttttgctgtgtcacccaacggtgctcttcttgcaattggaacaatagaaggaagcatcatcgtagttggctcaaaagacatgcggacacttgtaacagttaaaaaggctcatcttggtattgttactacgctgaccttctctcaggattcaagaacattgctgtcaacttccttcgactcttctgcaagggtgacatctgttgggtctccaaagagtaatggaacaagcatatggcccatgctactagttgttattcttgcaattttggtgtactactgtacgcagcacaaagaagacattttggcaatgttgcagcgttgagatagatttctgttcagcccctgactggtctactctgctggacgtattattagtgttgcttcagtgattgaagaaattttggacttgggccaacttcattattctctcaaggacaaacaatacagcaaaaggcactgagccctgttatgttttgtagtaaaaagggtaatgtacttactcatgttgtcgaagtttttgtaagttgatggccgcaagtgatagacatatgtggcaatgtttcttcatgctgcacttgtgaattgcaagatgttcgccccaagagtccaatatagagagttcagaaacaaatttttttggtgtgcgaaacaatttattatgtatgcgtaataaagctgtacaaagaatatctaaaaatgcagatagcttctgggtgcttatacatgtgatgaccaattattgtttggatgacaaaagggagttgtaacactatgctctacatctgtgtgtcggaaataatcagtttgcgtcggtttcttcttg

SEQ ID NO: 38714 - DNA, 1725 bp, Zea Mays
ccgaacctttcacagccgcgttattattctcgtctccagccccccacacgcgctcccctccaccgtccgccgcgcgtccccaccggcggccaccgccaccggcccacctccccggcgccccttacccttctttggcgcgatggtaactcgcggcggcggtagccagtcctacggcttcccgatctactgcgccgcctggctcccgctcgcccacatcatcaagcccgaccctcccgctgccgaggcggatgcggatgacccctcctcctccaccccctcgcttccgatggctgtcctcgggggcggtggcggggagggccggagcggggtgccgaacaagctcgtggtggcggccctcgccaccggggaagaggccgcgccggctctctcccccgatacggtggtcgaggtgaatagtgaggaggagagggaccacagaggttggctttggagccggaccaggatgctttagcagagctgaaagatgtcggtttgcagttggccgtatccttcagtggagaaggttcaatacttgctattggtggtgaagatgggtatttaagagttttcaactggcctaccatggggtctgttctcacagaaatcgatactaaaacatcgattaaggatcttactatcagttccgacgagaagtttcttgctgtgaataggagcagtggcccatgtagagtgtgggatttgcagtcatctgaagttgtagccagtctgccaagagaaacaggggaaatatttggattctgcagattctctaataaggctgacaacagtcatgtcctatttataactgtgatggaaggcgattatggaaaaatagtgtcttggaatactacctcatggacgagaaccggatcaaagaaaataactcgtgaggcaatttcagcttttgctgtgtcacccaacggtgctcttcttgcaattggaacaatagaaggaagcatcatcgtagttggctcaaaagacatgcggacacttgtaacagttaaaaaggctcatcttggtattgttactacgctgaccttctctcaggattcaagaacattgctgtcaacttccttcgactcttctgcaagggtgacatctgttgggtctccaaagagtaatggaacaagcatatggcccatgctactagttgttattcttgcaattttggtgtactactgtacgcagcacaaagaagacattttggcaatgttgcagcgttgagatagatttctgttcagcccctgactggtctactctgctggacgtattattagtgttgcttcagtgattgaagaaattttggacttgggccaacttcattattctctcaaggacaaacaatacagcaaaaggcactgagccctgttatgttttgtagtaaaaagggtaatgtacttactcatgttgtcgaagtttttgtaagttgatggccgcaagtgatagacatatgtggcaatgtttcttcatgctgcacttgtgaattgcaagatgttcgccccaagagtccaatatagagagttcagaaacaaatttttttggtgtgcgaaacaatttattatgtatgcgtaataaagctgtacaaagaatatctaaaaatgcagatagcttctgggtgcttatacatgtgatgaccaattattgtttggatgacaaaagggagttgtaacactatgctctacatctgtgtgtcggaaataatcagtttgcgtcggtttcttcttg

SEQ ID NO: 38715 - DNA, 1452 bp, Zea Mays
cttgctagtaacaagtgacatggcctgaagcgaaggttgtatcgatgggaatcacaggaaggagagggaccacagaggttggctttggagccggaccaggatgctttagcagagctgaaagatgtcggtttgcagttggccgtatccttcagtggagaaggttcaatacttgctattggtggtgaagatgggtatttaagagttttcaactggcctaccatggggtctgttctcacagaaatcgatactaaaacatcgattaaggatcttactatcagttccgacgagaagtttcttgctgtgaataggagcagtggcccatgtagagtgtgggatttgcagtcatctgaagttgtagccagtctgccaagagaaacaggggaaatatttggattctgcagattctctaataaggctgacaacagtcatgtcctatttataactgtgatggaaggtgacattaaggtttaagttgacctagttacaaattgaattaggcaacaagcttaaggtctgacaatgcctgaacaatattgatttttaggcgattatggaaaaatagtgtcttggaatactacctcatggacgagaaccggatcaaagaaaataactcgtgaggcaatttcagcttttgctgtgtcacccaacggtgctcttcttgcaattggaacaatagaaggaagcatcatcgtagttggctcaaaagacatgcggacacttgtaacagttaaaaaggctcatcttggtattgttactacgctgaccttctctcaggattcaagaacattgctgtcaacttccttcgactcttctgcaagggtgacatctgttgggtctccaaagagtaatggaacaagcatatggcccatgctactagttgttattcttgcaattttggtgtactactgtacgcagcacaaagaagacattttggcaatgttgcagcgttgagatagatttctgttcagcccctgactggtctactctgctggacgtattattagtgttgcttcagtgattgaagaaattttggacttgggccaacttcattattctctcaaggacaaacaatacagcaaaaggcactgagccctgttatgttttgtagtaaaaagggtaatgtacttactcatgttgtcgaagtttttgtaagttgatggccgcaagtgatagacatatgtggcaatgtttcttcatgctgcacttgtgaattgcaagatgttcgccccaagagtccaatatagagagttcagaaacaaatttttttggtgtgcgaaacaatttattatgtatgcgtaataaagctgtacaaagaatatctaaaaatgcagatagcttctgggtgcttatacatgtgatgaccaattattgtttggatgacaaaagggagttgtaacactatgctctacatctgtgtgtcggaaataatcagtttgcgtcggtttcttcttg

SEQ ID NO: 38716 - DNA, 1238 bp, Zea Mays
atttaaccttgctttttacgttataacaaggcaaatctggtttgcctccatgatgggtatttaagagttttcaactggcctaccatggggtctgttctcacagaaatcgatactaaaacatcgattaaggatcttactatcagttccgacgagaagtttcttgctgtgaataggagcagtggcccatgtagagtgtgggatttgcagtcatctgaagttgtagccagtctgccaagagaaacaggggaaatatttggattctgcagattctctaataaggctgacaacagtcatgtcctatttataactgtgatggaaggtgacattaaggcgattatggaaaaatagtgtcttggaatactacctcatggacgagaaccggatcaaagaaaataactcgtgaggcaatttcagcttttgctgtgtcacccaacggtgctcttcttgcaattggaacaatagaaggaagcatcatcgtagttggctcaaaagacatgcggacacttgtaacagttaaaaaggctcatcttggtattgttactacgctgaccttctctcaggattcaagaacattgctgtcaacttccttcgactcttctgcaagggtgacatctgttgggtctccaaagagtaatggaacaagcatatggcccatgctactagttgttattcttgcaattttggtgtactactgtacgcagcacaaagaagacattttggcaatgttgcagcgttgagatagatttctgttcagcccctgactggtctactctgctggacgtattattagtgttgcttcagtgattgaagaaattttggacttgggccaacttcattattctctcaaggacaaacaatacagcaaaaggcactgagccctgttatgttttgtagtaaaaagggtaatgtacttactcatgttgtcgaagtttttgtaagttgatggccgcaagtgatagacatatgtggcaatgtttcttcatgctgcacttgtgaattgcaagatgttcgccccaagagtccaatatagagagttcagaaacaaatttttttggtgtgcgaaacaatttattatgtatgcgtaataaagctgtacaaagaatatctaaaaatgcagatagcttctgggtgcttatacatgtgatgaccaattattgtttggatgacaaaagggagttgtaacactatgctctacatctgtgtgtcggaaataatcagtttgcgtcggtttcttcttg

SEQ ID NO: 38717 - DNA, 5211 bp, Zea Mays
ctcccgtcgagacttcagcgccgccacctgctgctttgttccacgccagccgcggcgcattgctgttcttccatgccagctaccgctcctctcgccagctctacaaggggagggttgaaatggacggcgcctgcttcgtgttaccgcaacgaacgtctcgtgcacaccaagtgtgtgtgtgttggggggggggtttgcaaggaacggggattacgccgtcattcggatttggaggaatggagccgccctgcatcttaacagggtccaatgtggaacaagcatagcttgcttaaaccatgcatatatacagtagcaaacaataacaaaagacaggagacacgattgagcaagaacacaaaaaacaagaaaggatcaaataaacaggagattaacaacaaaggagtttgaagaggtcgattgggctggggctctaagcatggaagatgacagcaggagggtggatacgatgcagatggggagcaacctggatgggagcttgctgcggagatcatcatcatggtgggcatcgagaggaaacaatgcattctggtggccagcgagggaggacgacgacgaggaggcgctgagatgggcggccatagagaagctacccacctacgaccgcatgaggaaaggcatcctgacagcagtgggtgacggcatacaggaggtggacatccaagggctcaacatgcaggaaaggaaatgcctcatccagcgcctcatccgcatccccgaggaggacaacgagaggttccttctgaagctgtgtgaacggatggagagagttgggattcagaacccaacaatagaagtgcggtttgagcatttgaccattgacacagagatctatgttggcaaacagggagtcccaacatttaccaacttcttctccaacaaagtcagggatgctttgattgctttgcacattatctcaagtggtaagagacctatatgcatccttcatggcatcagtggaatcgtaagaccaaacagaatgtctttgttgctaggtgctcctggatctgggaaaacgagtctacttctggctttggcagggaaactcgactcaactctgaagatgtcaggaagggtgacttataatggacatgccatggatgaatttgtcccccaaagtacatcggcatacattgggcagcacgatgttcacataggtgaaatgacggtccgtgaaacattagcgtttgctgcaagatgtcaaggagttggaacccgttatgatatgctcactgaactctcaagaagagaaaaacatgccaaaattaagccagatcctgacattgatgtttacatgaaggccatctcccaggaaggacaagagaacttcatcactgattacgtcctcaaaattttgggtctggatatctgtgcagatataatggtcggagactctatgatcagaggtatctcaggaggacaaaagaagcgtgtcacaataggtgagatgcttgttgggccagctaatacactattcatggatgaaatctccaatggtctggacagcgccactgcctatcagatcgtcaactctctaaggcagtcggtccacatccttggtgccactgcactcatctcattgcttcagcctgcacctgaaatatatgagctatttgatgacattgttctccttgctgagggccagatcgtgtaccagggtcctcgagaaaatgtcctcgagttttttgaggccatgggtttcagatgtcctgataggaaaggtgttgcagatttcctgcaagaagttacatctaggaaggatcaataccagtactggtgtacaagagatgaaccatatcggtacatttcagtaaatgacttcgtagattccttcaaagcattccatgttggccatgcattgcagtcggagctcgagctgcccttcgatcgaaccaagaaccaccctgctgccctcacaacatcaaagtttggtatcagcaagatggagcttctcaaggcatgcttttgtagggagtggctgatgatgaagaggaactcatttgtttacatcatcaaaatagtgcagctcataatcctaggaaccattacaatgacggtcttcctgcacacaaaaatgcatcgacacagtgttgaagatggagtcatctttctaggtgcgatgttccttggattagtcacacatttgttcaatggttttgctgaggttgccatgagcattgcaaagctgccaatattttataagcaaagagataatctcttctatccatcatgggcatatgcattgcctacatggttgatcaagatcccaatatcattcttggaatgtgctgtttggactggcatgacttactatgtcatcggttttgatccaagcatcgaaaggttcttccgccattacctactgcttgtactgataagccagatggcatctggtcttttccggcttcttgctgcagtaggaagagagatggttgttgcagacacgtttggctcatttgctcagattgtcctgctgattcttggtggattcttgatagcaagaaataacatcaagaaatcatggatttggggttactggtcctcccctctgatgtatgcccagaatgccatagcggtgaatgagttccttggcaatagttggcaggtcgatagggcagaaaacaatgacacgcttggtgtccaaatcctaaaggcacgcggcatttttgtaggcccaaagtggtactggattggtgttggagcattgcttggatacatcatgatcttcaatttactctttgtactgttccttgactggcttggcccacttagaaaaggccagactgttgtttctgaggaggaactgagagagaagcatgtaaaccgtactggtgagaatgttgaattggcgcttcttggaacagactgccagaattcaccatctgatggaagtggagaaatctccagagcagacaccaagaacaagaagggaatggtacttccatttacaccattgtcaatcacctttaacaatatcaaatactccgtggacatgcctcaggaaatgaaagacaaagatattactgaagaccggctactactgctgaagggtgtaagtggagccttcagacctggaacccttacagcattgatgggagtcagcggagcgggtaagacaactctgttggatgtgttggcaggaaggaaaactagtggctacatcgaaggtgacatttacatatctggatacccaaagaagcaagagacctttgctcggatcgctggttactgcgagcaaagcgatatccactctccacatgtcactgtttatgaatccctcctgttctcagcatggctccggttgccacctgaagttgacttggaagcaagaaagatgcatgtggaagatgttgctgaacttgtcgagctcattccactgagaggagcattggtggggctgccaggagtgaatggtttgtctaccgaacagaggaagaggctcactatagcagttgagctcgttgccaacccatccatcatattcatggacgaaccaacttcgggactagatgcgacggcagctgcaatcgtgatgaggacagtcagaaacacggtcgatactggacgaactgtcgtctgcacgatccatcagcccagcatcgacatctttgaagcttttgatgagctgttcctgttaaaatggggaggtgaagaaatatacgtcggccccttaggacacaagtcatgccacctaatcaaatacttcgagggtttacaaggcgtgaagaaaatcaaggacggttgcaatcctgcgacatggatgttggaagtgaccaccgtagctcaagaagccattcttgggtgcaactttgctgaagtatacaggaattcatatttataccggaagaacaaaattttggtcagtgaattaagcacacctccgcctggatccaaagacttgtacttcccaacacagtactcacaatccttcatcacacagtgcatggcctgcctatggaagcaacacaagtcatactggagaaacccatcatacactgcaaatagaattttcttcaccgcacttattgccttcgtgtttggaaccatcttcttgagcttaggcaagaaagttggcaagaggcaggacctgtttgacgctttgggatccatgtatgccgcggtccttttgattggagttcagaatggcctaaccgtacagccgatagtagatgttgagagaacggtattctaccgagaaaaggctgctggaatgtactccgctctaccctacgcttttgcacaggttgtaattgagatcccacacatcttcctccagactgttgtgtacggtctcatcatatacaccttgataggcttcgactggacagtccagaagttcttttggtacatgttcttcatgtacttcacgttcatgtacttcacgttctacgggatgatggcagttgccatgacaccgaacagcgacatcgccgccctagcttcaactgcgttctacgcaatatggaatatctttgctggcttcattatcccccgaccaaggataccgatatggtggcgatggtactcgtgggcatgcccagtggcttggacactatatggacttgtggcttcccaatttggagatattacagatgttaagctggaagacggagaaatagtgaaagatttcatcgacagattctttgggtttacccatgaccacttgggctatgcagccactgccgttgttggtttcacggttctcttcagtttcatgtttgccttctccatcaaagtattcaacttccagataagataagaacacatctcaaacggattcagctgtgattactgattacgctcacttttgtaatacaaggatacaataaggtgctgtttggtccgcatatttgtaatatgatgggtaactgataacattaaatcatttttatttaagtttaaccgtaatcggatgtcacactagaaagtgatactggtatactcaaacttattaccgttgctatttaagcatgaatcattactattgctatttacattatatttatgaatcaaatggtatctaaatgtaagataacaacatcacgtatgtagtacgtatttgattcattttattgcgtacttaaatgtcattttcctttattttccaaacattttaacctatatgtaaattgtagattgtgaatagctgagttcactgttacaaattgacaatggatttttggtaaaagtaac

SEQ ID NO: 38718 - DNA, 4613 bp, Zea Mays
cgaacgtctcgtgcacaccaagtgtgtgtgtgttggggggggggtttgcaaggaacggggattacgccgtcattcggatttggaggaatggagccgccctgcatcttaacagagttgggattcagaacccaacaatagaagtgcggtttgagcatttgaccattgacacagagatctatgttggcaaacagggagtcccaacatttaccaacttcttctccaacaaagtcagggatgctttgattgctttgcacattatctcaagtggtaagagacctatatgcatccttcatggcatcagtggaatcgtaagaccaaacagaatgtctttgttgctaggtgctcctggatctgggaaaacgagtctacttctggctttggcagggaaactcgactcaactctgaagatgtcaggaagggtgacttataatggacatgccatggatgaatttgtcccccaaagtacatcggcatacattgggcagcacgatgttcacataggtgaaatgacggtccgtgaaacattagcgtttgctgcaagatgtcaaggagttggaacccgttatgatatgctcactgaactctcaagaagagaaaaacatgccaaaattaagccagatcctgacattgatgtttacatgaaggccatctcccaggaaggacaagagaacttcatcactgattacgtcctcaaaattttgggtctggatatctgtgcagatataatggtcggagactctatgatcagaggtatctcaggaggacaaaagaagcgtgtcacaataggtgagatgcttgttgggccagctaatacactattcatggatgaaatctccaatggtctggacagcgccactgcctatcagatcgtcaactctctaaggcagtcggtccacatccttggtgccactgcactcatctcattgcttcagcctgcacctgaaatatatgagctatttgatgacattgttctccttgctgagggccagatcgtgtaccagggtcctcgagaaaatgtcctcgagttttttgaggccatgggtttcagatgtcctgataggaaaggtgttgcagatttcctgcaagaagttacatctaggaaggatcaataccagtactggtgtacaagagatgaaccatatcggtacatttcagtaaatgacttcgtagattccttcaaagcattccatgttggccatgcattgcagtcggagctcgagctgcccttcgatcgaaccaagaaccaccctgctgccctcacaacatcaaagtttggtatcagcaagatggagcttctcaaggcatgcttttgtagggagtggctgatgatgaagaggaactcatttgtttacatcatcaaaatagtgcagctcataatcctaggaaccattacaatgacggtcttcctgcacacaaaaatgcatcgacacagtgttgaagatggagtcatctttctaggtgcgatgttccttggattagtcacacatttgttcaatggttttgctgaggttgccatgagcattgcaaagctgccaatattttataagcaaagagataatctcttctatccatcatgggcatatgcattgcctacatggttgatcaagatcccaatatcattcttggaatgtgctgtttggactggcatgacttactatgtcatcggttttgatccaagcatcgaaaggttcttccgccattacctactgcttgtactgataagccagatggcatctggtcttttccggcttcttgctgcagtaggaagagagatggttgttgcagacacgtttggctcatttgctcagattgtcctgctgattcttggtggattcttgatagcaagaagtatgtaatgtattcattcagtcattgtttagtgtccagtgtttgggactcagttctctttctgcagataacatcaagaaatcatggatttggggttactggtcctcccctctgatgtatgcccagaatgccatagcggtgaatgagttccttggcaatagttggcaggtggtgatgcaaccaacggcagaaaacaatgacacgcttggtgtccaaatcctaaaggcacgcggcatttttgtaggcccaaagtggtactggattggtgttggagcattgcttggatacatcatgatcttcaatttactctttgtactgttccttgactggcttggcccacttagaaaaggccagactgttgtttctgaggaggaactgagagagaagcatgtaaaccgtactggtgagaatgttgaattggcgcttcttggaacagactgccagaattcaccatctgatggaagtggagaaatctccagagcagacaccaagaacaagaagggaatggtacttccatttacaccattgtcaatcacctttaacaatatcaaatactccgtggacatgcctcaggaaatgaaagacaaagatattactgaagaccggctactactgctgaagggtgtaagtggagccttcagacctggaacccttacagcattgatgggagtcagcggagcgggtaagacaactctgttggatgtgttggcaggaaggaaaactagtggctacatcgaaggtgacatttacatatctggatacccaaagaagcaagagacctttgctcggatcgctggttactgcgagcaaagcgatatccactctccacatgtcactgtttatgaatccctcctgttctcagcatggctccggttgccacctgaagttgacttggaagcaagaaagatgcatgtggaagatgttgctgaacttgtcgagctcattccactgagaggagcattggtggggctgccaggagtgaatggtttgtctaccgaacagaggaagaggctcactatagcagttgagctcgttgccaacccatccatcatattcatggacgaaccaacttcgggactagatgcgacggcagctgcaatcgtgatgaggacagtcagaaacacggtcgatactggacgaactgtcgtctgcacgatccatcagcccagcatcgacatctttgaagcttttgatgagctgttcctgttaaaatggggaggtgaagaaatatacgtcggccccttaggacacaagtcatgccacctaatcaaatacttcgagggtttacaaggcgtgaagaaaatcaaggacggttgcaatcctgcgacatggatgttggaagtgaccaccgtagctcaagaagccattcttgggtgcaactttgctgaagtatacaggaattcatatttataccggaagaacaaaattttggtcagtgaattaagcacacctccgcctggatccaaagacttgtacttcccaacacagtactcacaatccttcatcacacagtgcatggcctgcctatggaagcaacacaagtcatactggagaaacccatcatacactgcaaatagaattttcttcaccgcacttattgccttcgtgtttggaaccatcttcttgagcttaggcaagaaagttggcaagaggcaggacctgtttgacgctttgggatccatgtatgccgcggtccttttgattggagttcagaatggcctaaccgtacagccgatagtagatgttgagagaacggtattctaccgagaaaaggctgctggaatgtactccgctctaccctacgcttttgcacaggttgtaattgagatcccacacatcttcctccagactgttgtgtacggtctcatcatatacaccttgataggcttcgactggacagtccagaagttcttttggtacatgttcttcatgtacttcacgttcatgtacttcacgttctacgggatgatggcagttgccatgacaccgaacagcgacatcgccgccctagcttcaactgcgttctacgcaatatggaatatctttgctggcttcattatcccccgaccaaggataccgatatggtggcgatggtactcgtgggcatgcccagtggcttggacactatatggacttgtggcttcccaatttggagatattacagatgttaagctggaagacggagaaatagtgaaagatttcatcgacagattctttgggtttacccatgaccacttgggctatgcagccactgccgttgttggtttcacggttctcttcagtttcatgtttgccttctccatcaaagtattcaacttccagataagataagaacacatctcaaacggattcagctgtgattactgattacgctcacttttgtaatacaaggatacaataaggtgctgtttggtccgcatatttgtaatatgatgggtaactgataacattaaatcatttttatttaagtttaaccgtaatcggatgtcacactagaaagtgatactggtatactcaaacttattaccgttgctatttaagcatgaatcattactattgctatttacattatatttatgaatcaaatggtatctaaatgtaagataacaacatcacgtatgtagtacgtatttgattcattttattgcgtacttaaatgtcattttcctttattttccaaacattttaacctatatgtaaattgtagattgtgaatagctgagttcactgttacaaattgacaatggatttttggtaaaagtaac

SEQ ID NO: 38719 - DNA, 4510 bp, Zea Mays
cggatttggaggaatggagccgccctgcatcttaacagggtccaatgtggaacaagcatagcttgcttaaaccatgcatatatacagtagcaaacaataacaaaagacaggagacacgattgagcaagaacacaaaaaacaagaaaggatcaaataaacaggagattaacaacaaaggagtttgaagaggtcgattgggctggggctctaagcatggaagatgacagcaggagggtggatacgatgcagatggggagcaacctggatgggagcttgctgcggagatcatcatcatggtgggcatcgagaggaaacaatgcattctggtggccagcgagggaggacgacgacgaggaggcgctgagatgggcggccatagagaagctacccacctacgaccgcatgaggaaaggcatcctgacagcagtgggtgacggcatacaggaggtggacatccaagggctcaacatgcaggaaaggaaatgcctcatccagcgcctcatccgcatccccgaggaggacaacgagaggttccttctgaagctgtgtgaacggatggagagagttgggattcagaacccaacaatagaagtgcggtttgagcatttgaccattgacacagagatctatgttggcaaacagggagtcccaacatttaccaacttcttctccaacaaagtcagggatgctttgattgctttgcacattatctcaagtggtaagagacctatatgcatccttcatggcatcagtggaatcgtaagaccaaacagaatgtctttgttgctaggtgctcctggatctgggaaaacgagtctacttctggctttggcagggaaactcgactcaactctgaagatgtcaggaagggtgacttataatggacatgccatggatgaatttgtcccccaaagtacatcggcatacattgggcagcacgatgttcacataggtgaaatgacggtccgtgaaacattagcgtttgctgcaagatgtcaaggagttggaacccgttatgatatgctcactgaactctcaagaagagaaaaacatgccaaaattaagccagatcctgacattgatgtttacatgaaggccatctcccaggaaggacaagagaacttcatcactgattacgtcctcaaaattttgggtctggatatctgtgcagatataatggtcggagactctatgatcagaggtatctcaggaggacaaaagaagcgtgtcacaataggtgagatgcttgttgggccagctaatacactattcatggatgaaatctccaatggtctggacagcgccactgcctatcagatcgtcaactctctaaggcagtcggtccacatccttggtgccactgcactcatctcattgcttcagcctgcacctgaaatatatgagctatttgatgacattgttctccttgctgagggccagatcgtgtaccagggtcctcgagaaaatgtcctcgagttttttgaggccatgggtttcagatgtcctgataggaaaggtgttgcagatttcctgcaagaagttacatctaggaaggatcaataccagtactggtgtacaagagatgaaccatatcggtacatttcagtaaatgacttcgtagattccttcaaagcattccatgttggccatgcattgcagtcggagctcgagctgcccttcgatcgaaccaagaaccaccctgctgccctcacaacatcaaagtttggtatcagcaagatggagcttctcaaggcatgcttttgtagggagtggctgatgatgaagaggaactcatttgtttacatcatcaaaatagtgcagataacatcaagaaatcatggatttggggttactggtcctcccctctgatgtatgcccagaatgccatagcggtgaatgagttccttggcaatagttggcaggtcgatagggcagaaaacaatgacacgcttggtgtccaaatcctaaaggcacgcggcatttttgtaggcccaaagtggtactggattggtgttggagcattgcttggatacatcatgatcttcaatttactctttgtactgttccttgactggcttggcccacttagaaaaggccagactgttgtttctgaggaggaactgagagagaagcatgtaaaccgtactggtgagaatgttgaattggcgcttcttggaacagactgccagaattcaccatctgatggaagtggagaaatctccagagcagacaccaagaacaagaagggaatggtacttccatttacaccattgtcaatcacctttaacaatatcaaatactccgtggacatgcctcaggaaatgaaagacaaagatattactgaagaccggctactactgctgaagggtgtaagtggagccttcagacctggaacccttacagcattgatgggagtcagcggagcgggtaagacaactctgttggatgtgttggcaggaaggaaaactagtggctacatcgaaggtgacatttacatatctggatacccaaagaagcaagagacctttgctcggatcgctggttactgcgagcaaagcgatatccactctccacatgtcactgtttatgaatccctcctgttctcagcatggctccggttgccacctgaagttgacttggaagcaagaaagatgcatgtggaagatgttgctgaacttgtcgagctcattccactgagaggagcattggtggggctgccaggagtgaatggtttgtctaccgaacagaggaagaggctcactatagcagttgagctcgttgccaacccatccatcatattcatggacgaaccaacttcgggactagatgcgacggcagctgcaatcgtgatgaggacagtcagaaacacggtcgatactggacgaactgtcgtctgcacgatccatcagcccagcatcgacatctttgaagcttttgatgagctgttcctgttaaaatggggaggtgaagaaatatacgtcggccccttaggacacaagtcatgccacctaatcaaatacttcgagggtttacaaggcgtgaagaaaatcaaggacggttgcaatcctgcgacatggatgttggaagtgaccaccgtagctcaagaagccattcttgggtgcaactttgctgaagtatacaggaattcatatttataccggaagaacaaaattttggtcagtgaattaagcacacctccgcctggatccaaagacttgtacttcccaacacagtactcacaatccttcatcacacagtgcatggcctgcctatggaagcaacacaagtcatactggagaaacccatcatacactgcaaatagaattttcttcaccgcacttattgccttcgtgtttggaaccatcttcttgagcttaggcaagaaagttggcaagaggcaggacctgtttgacgctttgggatccatgtatgccgcggtccttttgattggagttcagaatggcctaaccgtacagccgatagtagatgttgagagaacggtattctaccgagaaaaggctgctggaatgtactccgctctaccctacgcttttgcacaggttgtaattgagatcccacacatcttcctccagactgttgtgtacggtctcatcatatacaccttgataggcttcgactggacagtccagaagttcttttggtacatgttcttcatgtacttcacgttcatgtacttcacgttctacgggatgatggcagttgccatgacaccgaacagcgacatcgccgccctagcttcaactgcgttctacgcaatatggaatatctttgctggcttcattatcccccgaccaaggataccgatatggtggcgatggtactcgtgggcatgcccagtggcttggacactatatggacttgtggcttcccaatttggagatattacagatgttaagctggaagacggagaaatagtgaaagatttcatcgacagattctttgggtttacccatgaccacttgggctatgcagccactgccgttgttggtttcacggttctcttcagtttcatgtttgccttctccatcaaagtattcaacttccagataagataagaacacatctcaaacggattcagctgtgattactgattacgctcacttttgtaatacaaggatacaataaggtgctgtttggtccgcatatttgtaatatgatgggtaactgataacattaaatcatttttatttaagtttaaccgtaatcggatgtcacactagaaagtgatactggtatactcaaacttattaccgttgctatttaagcatgaatcattactattgctatttacattatatttatgaatcaaatggtatctaaatgtaagataacaacatcacgtatgtagtacgtatttgattcattttattgcgtacttaaatgtcattttcctttattttccaaacattttaacctatatgtaaattgtagattgtgaatagctgagttcactgttacaaattgacaatggatttttggtaaaagtaac

SEQ ID NO: 38720 - DNA, 6280 bp, Zea Mays
ccggtccagcggagcgcactacgacacagatcggcagccgtccatccctttccagctctccagagcctccgccggcgcatccggcgactgatttgcagggcgtatgtgttggaaatgctcagctgctagtttttcctggtagatcatcaagtcttgagagcagttaaaacaaaccaatttttcctgcaagagctctacgtgctatggagacagcaaatacattttcctttggttcacttcaattttgacgtacataatcttttattttcattgccaacattgttttcttgattttctgcctttatatcttcttgattaaaactttttgatcgataattctagttctagacaaaatatgaagctagttattttcctatgaactgaatgtttattctgatacccaaagacctcccttcaaacatagtctgtcttaaactattccactttattcatgcatgttgcttgtgctcagacagtactattgccatgaagcaaagtctgtcttaaattattccactttattcatgcatgttgcttgtgctcagacagtactattggtatagtgactagccgtctagcactatattaatttattcttttctgaagacaatctaagcacacgggtgccctacccggtgctacattcggtacatggcatccggtgtacaccgtagtatccactatccagtgctatctgctgtgatgtttttccttacaatatcaaggatatcatttctattattttgttttcattcagctctctaatgagacaaaaatagttcaggggcagatatgtcattttacatgccaagacagagaatccatttaaaaaatcaggattgccaaacattcagcttttctagacaacaaattctctggaaagcgtcttctcaggaaatcaggcttttcagataagcgtttctcagaaaagtggatccaaacagggcctaaattagtgtatctacatgcagctcaatcaaaaactggatcttggatttaaaatccattattcacttctcaaaattagcaaatttaactaagttttactatagatggttcagtgacagtaagctaattgatgcaaataagtgagtctagatgtatgtgcggacccatgttcaaaccgcgcacctgcaactaaacatcacattcccacaatgtgctgttgaatggaatcccagaagaagccacatttcatagatgatgttgttatcttcctcaagccggctactagtgatatgctttcatcatggatgtgcttcacttgtttgggggaggcttctggtcttaaaaacaatgtgcaaaaaactagtgattttcctataaggtgtgaagattaatacttgatggtcattcaaggccttctgccatgcaacatcttgagcttgataggattgccaattagctacagaggtggaaggctaacttaataacaagggctagcaggagggtttgagtttagtttgtgctcataggaatgttgatctactttgctatgactactgacattcctccttgggttttcaaagcaattgataaaatcagacaaagatttctatggaggagaaggaaggatgccaaaggcgggcactgcctcgtggcgtggggaaaggtttgtcacccccttgagcttggcggccttggtatttcaagtcttctagagctatcttgggcactccgcatgagatggctttggctccaaaaaactgagtcaaataaaccatgggctgatttacctatccaagtcctagccaaagcctaggtgcttttttctattgctctgatttctaaggttggggacggcacatccaccctattctggactaatcgttggttgatggggcaaaatatcatggaagtggcaccaaggttgtttgctgcttgttcctaagagaattacaagaaggagaattgttcttgaagccctcactaatcatcactggattttggatgttcaagttgctttaacaattcaagtaattgtggattatatctagattcgggactgtctcagtcaggtggagttacagcagggggtggctgattctcacatccagttctcgcgtaatggaagatattcagccaaaatggcatatgcgggtttttttgttggctcggttccttttgaaccttatgagaagatttgatgttcatggccccttcctaaatataaatgttttctgtggttggtgacgcacaacagatactggatggcaggcaggctggcttgtagaggcctcccggtgcctgctgtgtgactaggaagatgaaacagtcagccatgtgcttctttcttgctgaagagagaactaaggggttgacaagaaaaggtttcaactccctcgtcatcctgggagcttgaactctgtggaagatacgaaatggatgtctttgaaggcctctccccatcatatgatttcagcttctgctcactttggtgaagaaatagatttatggatgatggctcacgccaaaggattggtgttcctttcagccgtggctgaggattagtggtagttggtctgctataatctatgcctatgaataatcctttcttgtataagaggttttggccaccatgagctagccatttgagttttgtaaggcctttatacgtttcttcttagtataatgatacgtagttctcctgcgtctttgagaaaaaaagttctaacgaaattcactagaatttatttgatgtggcacattttgatatcaggtacttcttgaagattatatatagctcatttaaatgtgtgatccatgtcaaaaggtggacctgattaactgattttgaaaacattatattcacaccttaaattattaaatttgtttcaaggccaagtagcaatgtatatacacccaaatgcgtctctaccaaatttgaaatgtcttatcataaaattcaagctctaggtccatatagatctcattctctaaaaattgatccatatagatctatccctacatgtaaacaaaacctagtcatgcatacctatgatttattccaacaaggcgcccacaaaaataaatgatcaaatattttatcagaatttacatatcatttcttttttctagtcattgtaatctgtactattcaatagacacatgtttgtgaaaattatagagatgcaaggcaggttatccgtaaacccgtaaatagactaaatttttacgagttacccacaaatttgcaaaagattagcctatttgtgggtttatggacaacccgacttgcatccctcaaatattacataaaaaaactgagggtggttgaaaacatacagggagtgcttgaagatggctttgttgccgtcaagaagttatactcgtatattgcaattgaagacgaaccatttcatcgtgaggttgattgtctaatgaatattaggcaccacaacatagtcttgtttgttggttactgtgctgaaacacaggaagtggttgtgcgtcaagaagggaaacatatttttgcggaaaaacgagaaagattactttgcttcgagtatttgcataatggaagccttcacaagcatctgacagccgaaccatgtgggcttccatggcacatttgttaccaaataataaaagggatttgcctgggcttgcactacctacatgacaagaacataattcatctagatctgaaaccggacaatatattgcttgatgatgacatggtgcccaaaatcacggacttcggtttgtcaagactcttgggtaatggaaaaagccacaccattacacaaacaagaataggaacatggggttacatggcacccgagtacttggatgatggagtgatcacaatgaagacagacatctatagcttgggtgtgataatcagacacatggtgaagggacgtaactcggcagacaccactgatgaagaagtactggcaaactggttgattaggctggaaaaggatccatcacagatgatgaggcagcagacgacccgattattatttgaaacagagtacaaagagcaaataaaagcgtgcatggatatatcatggaggtgcacgctgcgtaaaccaatggacaggccaacgacgcagcacatcctacttacactggaggaaacagaagcaaagatcaaatcggtcgttgggcctactccaccaaatgccgggcagcttcagattgccaaatttgggccgtggggtggagatggagggaagacgcgagacataagaatgacgccttgccatttgcatagcgtaacaattagcagtggaactattatcgattctatcgggttttcattcactgatcactatggtcagcaccacacaacagggccttggggcggtaaggagggtacgaataagattgaactaggcccttcggagtttcttacaggagtatctggaacaagcggcccattcaaaaatctaacaaatgttgtaacgtcacttacgtttgtcaccaatactcgtagttacggaccctttggaaaagggcgaggaacaccgttccacatccaaacgcagaacaacggcaggatcgttggcttctttggccgttctggccagtatctctatgcgattggggtctacacgaaccaagatgctagggtcgcaaggatcgggcgacctttgggtggagatgaaggggttcttcatggcatcacagacctcagtgggcagcagcgcagcagaggtggaggtccatcgggagaatgtggagacagcgacgacgagcccaacggtgatttcgccaaattcggcccgtggggcggcgacggaggacagccgcaggacatcggaacactaccctgccgtctagacaggatcaagatcagcagtgggcttatcatcgactcgatcgagttctcgtacgctggccctgacagccagtaccgcaccgcaggcccttggggtggtcatggaggagacaacagctcttttcagctagctggttcagagttccttacaggtgtgtctgggtcaatcggcacattcaacggccatgcaaacgtcataacgtctctgacgttcgtcaccaacgctcgtagctacgggccgtttggaagagggcgaggcacatccttccacatcccagtgcagggcaatggctgcatcgtcggtttctttgggcgctccggacggtacctcaacgcgatcggtgtctacacggcgccgaaacccgaaccaaaagcagttgggaaacaagatggtggtgatgaggccgtcgtcgccaggattgggccttggggcggggttggaaatgctctccatgacatcgcagagaggccgcatcgcctgcacagagtgacgatcttcagcgggacgatcgtaaactcgctggagtatctgtacagcgatggcgacgggcagcagcacaccaccggtccgtggggcggctgcggaggaactggtcgaaagattcatcttgcccctgaagagttcatagtggaagttactgggacattccatccatgcgcgtgggacagaacaatacccagtgtcgtgtcctctctgacgctcgtgaccagcacgggcaaaacacacgggcctttcggaacgcagctgggagccgcgttccaggttccggtgcagagcgacagcaggatcgttggcttcttcgcccacggagacaattacatcgaagcaattggcgcctacgtgaagaaattgacagaatccagcaaccgttaactcttggaacaacttgcagctgttcacactgtttcttgggccattgctccttaaatttagtccagatggccaaggagcaaccaaacagaaatcgctatggcagggaagatggactaaactggactgtggcacctccagcatagcctgctcttagattagtgaccagacatcatcgagatatttcgatattataataaatgaggaacccatctcagatgtttatgttagctcctcagtttttgcttctgaatgattaatttagatcttccttatttttgcaataaatgaggattcttttctgtctcttctgaatggatacgaatcatgcatcacgtatcagtgcacctattgcagtgaggagatgaggacaaggtgctgacgaacttattgtcctgagctcccacttgagtttctgattgctgctttacaactttggtctatacgtgttgttccatcactagcctagtgaagcctgaaaacgtgtctgcatgctttagaaaaagactgcttccatccttacaatttccaggatatatccttacaaattcccaaactgggtgacgtcgaaaaggtgatctatagcatgacgttttgcagtgcctgtcagaggcaaaaaa

SEQ ID NO: 38721 - DNA, 3085 bp, Zea Mays
cagcggagcgcactacgacacagatcggcagccgtccatccctttccagctctccagagcctccgccggcgcatccggcgactgatttgcagggagtgcttgaagatggctttgttgccgtcaagaagttatactcgtatattgcaattgaagacgaaccatttcatcgtgaggttgattgtctaatgaatattaggcaccacaacatagtcttgtttgttggttactgtgctgaaacacaggaagtggttgtgcgtcaagaagggaaacatatttttgcggaaaaacgagaaagattactttgcttcgagtatttgcataatggaagccttcacaagcatctgacagccgaaccatgtgggcttccatggcacatttgttaccaaataataaaagggatttgcctgggcttgcactacctacatgacaagaacataattcatctagatctgaaaccggacaatatattgcttgatgatgacatggtgcccaaaatcacggacttcggtttgtcaagactcttgggtaatggaaaaagccacaccattacacaaacaagaataggaacatggggttacatggcacccgagtacttggatgatggagtgatcacaatgaagacagacatctatagcttgggtgtgataatcagacacatggtgaagggacgtaactcggcagacaccactgatgaagaagtactggcaaactggttgattaggctggaaaaggatccatcacagatgatgaggcagcagacgacccgattattatttgaaacagagtacaaagagcaaataaaagcgtgcatggatatatcatggaggtgcacgctgcgtaaaccaatggacaggccaacgacgcagcacatcctacttacactggaggaaacagaagcaaagatcaaatcggtcgttgggcctactccaccaaatgccgggcagcttcagattgccaaatttgggccgtggggtggagatggagggaagacgcgagacataagaatgacgccttgccatttgcatagcgtaacaattagcagtggaactattatcgattctatcgggttttcattcactgatcactatggtcagcaccacacaacagggccttggggcggtaaggagggtacgaataagattgaactaggcccttcggagtttcttacaggagtatctggaacaagcggcccattcaaaaatctaacaaatgttgtaacgtcacttacgtttgtcaccaatactcgtagttacggaccctttggaaaagggcgaggaacaccgttccacatccaaacgcagaacaacggcaggatcgttggcttctttggccgttctggccagtatctctatgcgattggggtctacacgaaccaagatgctagggtcgcaaggatcgggcgacctttgggtggagatgaaggggttcttcatggcatcacagacctcagtgggcagcagcgcagcagaggtggaggtccatcgggagaatgtggagacagcgacgacgagcccaacggtgatttcgccaaattcggcccgtggggcggcgacggaggacagccgcaggacatcggaacactaccctgccgtctagacaggatcaagatcagcagtgggcttatcatcgactcgatcgagttctcgtacgctggccctgacagccagtaccgcaccgcaggcccttggggtggtcatggaggagacaacagctcttttcagctagctggttcagagttccttacaggtgtgtctgggtcaatcggcacattcaacggccatgcaaacgtcataacgtctctgacgttcgtcaccaacgctcgtagctacgggccgtttggaagagggcgaggcacatccttccacatcccagtgcagggcaatggctgcatcgtcggtttctttgggcgctccggacggtacctcaacgcgatcggtgtctacacggcgccgaaacccgaaccaaaagcagttgggaaacaagatggtggtgatgaggccgtcgtcgccaggattgggccttggggcggggttggaaatgctctccatgacatcgcagagaggccgcatcgcctgcacagagtgacgatcttcagcgggacgatcgtaaactcgctggagtatctgtacagcgatggcgacgggcagcagcacaccaccggtccgtggggcggctgcggaggaactggtcgaaagattcatcttgcccctgaagagttcatagtggaagttactgggacattccatccatgcgcgtgggacagaacaatacccagtgtcgtgtcctctctgacgctcgtgaccagcacgggcaaaacacacgggcctttcggaacgcagctgggagccgcgttccaggttccggtgcagagcgacagcaggatcgttggcttcttcgcccacggagacaattacatcgaagcaattggcgcctacgtgaagaaattgacagaatccagcaaccgttaactcttggaacaacttgcagctgttcacactgtttcttgggccattgctccttaaatttagtccagatggccaaggagcaaccaaacagaaatcgctatggcagggaagatggactaaactggactgtggcacctccagcatagcctgctcttagattagtgaccagacatcatcgagatatttcgatattataataaatgaggaacccatctcagatgtttatgttagctcctcagtttttgcttctgaatgattaatttagatcttccttatttttgcaataaatgaggattcttttctgtctcttctgaatggatacgaatcatgcatcacgtatcagtgcacctattgcagtgaggagatgaggacaaggtgctgacgaacttattgtcctgagctcccacttgagtttctgattgctgctttacaactttggtctatacgtgttgttccatcactagcctagtgaagcctgaaaacgtgtctgcatgctttagaaaaagactgcttccatccttacaatttccaggatatatccttacaaattcccaaactgggtgacgtcgaaaaggtgatctatagcatgacgttttgcagtgcctgtcagaggcaaaaaa

SEQ ID NO: 38722 - DNA, 3987 bp, Zea Mays
gcggagcgcactacgacacagatcggcagccgtccatccctttccagctctccagagcctccgccggcgcatccggcgactgatttgcagggcgtatgtgttggaaatgctcagctgctagtttttcctggtagatcatcaagtcttgagagcagttaaaacaaaccaatttttcctgcaagagctctacgtgctatggagacagcaaatacattttcctttggttcacttcaattttgacgtacataatcttttattttcattgccaacattgttttcttgattttctgcctttatatcttcttgattaaaactttttgatcgataattctagttctagacaaaatatgaagctagttattttcctatgaactgaatgtttattctgatacccaaagacctcccttcaaacatagtctgtcttaaactattccactttattcatgcatgttgcttgtgctcagacagtactattgccatgaagcaaagtctgtcttaaattattccactttattcatgcatgttgcttgtgctcagacagtactattggtatagtgactagccgtctagcactatattaatttattcttttctgaagacaatctaagcacacgggtgccctacccggtgctacattcggtacatggcatccggtgtacaccgtagtatccactatccagtgctatctgctgtgatgtttttccttacaatatcaaggatatcatttctattattttgttttcattcagctctctaatgagacaaaaatagttcaggggcagatatgtcattttacatgccaagacagagaatccatttaaaaaatcaggattgccaaacattcagcttttctagacaacaaattctctggaaagcgtcttctcaggaaatcaggcttttcagataagcgtttctcagaaaagtggatccaaacagggcctaaattagtgtatctacatgcagctcaatcaaaaactggatcttggatttaaaatccattattcacttctcaaaattagcaaatttaactaagttttactatagatggttcagtgacagtaagctaattgatgcaaataagtgagtctagatgtatgtgcggacccatgttcaaaccgcgcacctgcaactaaacatcacattcccacaatgtgctgttgaatggaatcccagaagaagccacatttcataggtgtgacctttggcagggtgatcccttatcacctatgttatttattctgattatagacgctttggtttatttggttaaaaaggctgaagaggatgggctgcttcagcccctgtcttcaaaggttcttcaacaccagatttctctatatgcagatgatgttgttatcttcctcaagccggctactagtgatatgctttcatcatggatgtgcttcacttgtttgggggaggcttctggtcttaaaaacaatgtgcaaaaaactagtgattttcctataaggtgtgaagattaatacttgatggtcattcaaggccttctgccatgcaacatcttgagcttgataggattgccaattagctacagaggtggaaggctaacttaataacaagggctagcaggagggtttgagtttagtttgtgctcataggaatgttgatctactttgctatgactactgacattcctccttgggttttcaaagcaattgataaaatcagacaaagatttctatggaggagaaggaaggatgccaaaggcgggcactgcctcgtggcgtggggaaaggtttgtcacccccttgagcttggcggccttggtatttcaagtcttctagagctatcttgggcactccgcatgagatggctttggctccaaaaaactgagtcaaataaaccatgggctgatttacctatccaagtcctagccaaagcctaggtgcttttttctattgctctgatttctaaggttggggacggcacatccaccctattctggactaatcgttggttgatggggcaaaatatcatggaagtggcaccaaggttgtttgctgcttgttcctaagagaattacaagaaggagaattgttcttgaagccctcactaatcatcactggattttggatgttcaagttgctttaacaattcaagtaattgtggattatatctagattcgggactgtctcagtcaggtggagttacagcagggggtggctgattctcacatccagttctcgcgtaatggaagatattcagccaaaatggcatatgcgggtttttttgttggctcggttccttttgaaccttatgagaagatttgatgttcatggccccttcctaaatataaatgttttctgtggttggtgacgcacaacagatactggatggcaggcaggctggcttgtagaggcctcccggtgcctgctgtgtgactaggaagatgaaacagtcagccatgtgcttctttcttgtatgtttgcgtgagaattttggttcaaaatcctaaggccttatggcctgcagacccttgcaccataatctgaaggtaggagtttctttctctggtggacgcaggctgaagagagaactaaggggttgacaagaaaaggtttcaactccctcgtcatcctgggagcttgaactctgtggaagatacgaaatggatgtctttgaaggcctctccccatcatatgatttcagcttctgctcactttggtgaagaaatagatttatggatgatggctcacgccaaaggattggtgttcctttcagccgtggctgaggattagtggtagttggtctgctataatctatgcctatgaataatcctttcttgtataagaggttttggccaccatgagctagccatttgagttttgtaaggcctttatacgtttcttcttagtataatgatacgtagttctcctgcgtctttgagaaaaaaagttctaacgaaattcactagaatttatttgatgtggcacattttgatatcaggtacttcttgaagattatatatagctcatttaaatgtgtgatccatgtcaaaaggtggacctgattaactgattttgaaaacattatattcacaccttaaattattaaatttgtttcaaggccaagtagcaatgtatatacacccaaatgcgtctctaccaaatttgaaatgtcttatcataaaattcaagctctaggtccatatagatctcattctctaaaaattgatccatatagatctatccctacatgtaaacaaaacctagtcatgcatacctatgatttattccaacaaggcgcccacaaaaataaatgatcaaatattttatcagaatttacatatcatttcttttttctagtcattgtaatctgtactattcaatagacacatgtttgtgaaaattatagagatgcaaggcaggttatccgtaaacccgtaaatagactaaatttttacgagttacccacaaatttgcaaaagattagcctatttgtgggtttatggacaacccgacttgcatccctcaaatattacataaaaaaactgagggtggttgaaaacatacagggagtgcttgaagatggctttgttgccgtcaagaagttatactcgtatattgcaattgaagacgaaccatttcatcgtgaggttgattgtctaatgaatattaggcaccacaacatagtcttgtttgttggttactgtgctgaaacacaggaagtggttgtgcgtcaagaagggaaacatatttttgcggaaaaacgagaaagattactttgcttcgagtatttgcataatggaagccttcacaagcatctgacagggatttgcctgggcttgcactacctacatgacaagaacataattcatctagatctgaaaccggacaatatattgcttgatgatgacatggtgcccaaaatcacggacttcggtttgtcaagactcttgggtaatggaaaaagccacaccattacacaaacaagaataggaacatgatgttttcttttttctggtgt

SEQ ID NO: 38723 - DNA, 3238 bp, Zea Mays
gcggagcgcactacgacacagatcggcagccgtccatccctttccagctctccagagcctccgccggcgcatccggcgactgatttgcagggcgtatgtgttggaaatgctcagctgctagtttttcctggtagatcatcaagtcttgagagcagttaaaacaaaccaatttttcctgcaagagctctacgtgctatggagacagcaaatacattttcctttggttcacttcaattttgacggagtgcttgaagatggctttgttgccgtcaagaagttatactcgtatattgcaattgaagacgaaccatttcatcgtgaggttgattgtctaatgaatattaggcaccacaacatagtcttgtttgttggttactgtgctgaaacacaggaagtggttgtgcgtcaagaagggaaacatatttttgcggaaaaacgagaaagattactttgcttcgagtatttgcataatggaagccttcacaagcatctgacagccgaaccatgtgggcttccatggcacatttgttaccaaataataaaagggatttgcctgggcttgcactacctacatgacaagaacataattcatctagatctgaaaccggacaatatattgcttgatgatgacatggtgcccaaaatcacggacttcggtttgtcaagactcttgggtaatggaaaaagccacaccattacacaaacaagaataggaacatggggttacatggcacccgagtacttggatgatggagtgatcacaatgaagacagacatctatagcttgggtgtgataatcagacacatggtgaagggacgtaactcggcagacaccactgatgaagaaccaggtactggcaaactggttgattaggctggaaaaggatccatcacagatgatgaggcagcagacgacccgattattatttgaaacagagtacaaagagcaaataaaagcgtgcatggatatatcatggaggtgcacgctgcgtaaaccaatggacaggccaacgacgcagcacatcctacttacactggaggaaacagaagcaaagatcaaatcggtcgttgggcctactccaccaaatgccgggcagcttcagattgccaaatttgggccgtggggtggagatggagggaagacgcgagacataagaatgacgccttgccatttgcatagcgtaacaattagcagtggaactattatcgattctatcgggttttcattcactgatcactatggtcagcaccacacaacagggccttggggcggtaaggagggtacgaataagattgaactaggcccttcggagtttcttacaggagtatctggaacaagcggcccattcaaaaatctaacaaatgttgtaacgtcacttacgtttgtcaccaatactcgtagttacggaccctttggaaaagggcgaggaacaccgttccacatccaaacgcagaacaacggcaggatcgttggcttctttggccgttctggccagtatctctatgcgattggggtctacacgaaccaagatgctagggtcgcaaggatcgggcgacctttgggtggagatgaaggggttcttcatggcatcacagacctcagtgggcagcagcgcagcagaggtggaggtccatcgggagaatgtggagacagcgacgacgagcccaacggtgatttcgccaaattcggcccgtggggcggcgacggaggacagccgcaggacatcggaacactaccctgccgtctagacaggatcaagatcagcagtgggcttatcatcgactcgatcgagttctcgtacgctggccctgacagccagtaccgcaccgcaggcccttggggtggtcatggaggagacaacagctcttttcagctagctggttcagagttccttacaggtgtgtctgggtcaatcggcacattcaacggccatgcaaacgtcataacgtctctgacgttcgtcaccaacgctcgtagctacgggccgtttggaagagggcgaggcacatccttccacatcccagtgcagggcaatggctgcatcgtcggtttctttgggcgctccggacggtacctcaacgcgatcggtgtctacacggcgccgaaacccgaaccaaaagcagttgggaaacaagatggtggtgatgaggccgtcgtcgccaggattgggccttggggcggggttggaaatgctctccatgacatcgcagagaggccgcatcgcctgcacagagtgacgatcttcagcgggacgatcgtaaactcgctggagtatctgtacagcgatggcgacgggcagcagcacaccaccggtccgtggggcggctgcggaggaactggtcgaaagattcatcttgcccctgaagagttcatagtggaagttactgggacattccatccatgcgcgtgggacagaacaatacccagtgtcgtgtcctctctgacgctcgtgaccagcacgggcaaaacacacgggcctttcggaacgcagctgggagccgcgttccaggttccggtgcagagcgacagcaggatcgttggcttcttcgcccacggagacaattacatcgaagcaattggcgcctacgtgaagaaattgacagaatccagcaaccgttaactcttggaacaacttgcagctgttcacactgtttcttgggccattgctccttaaatttagtccagatggccaaggagcaaccaaacagaaatcgctatggcagggaagatggactaaactggactgtggcacctccagcatagcctgctcttagattagtgaccagacatcatcgagatatttcgatattataataaatgaggaacccatctcagatgtttatgttagctcctcagtttttgcttctgaatgattaatttagatcttccttatttttgcaataaatgaggattcttttctgtctcttctgaatggatacgaatcatgcatcacgtatcagtgcacctattgcagtgaggagatgaggacaaggtgctgacgaacttattgtcctgagctcccacttgagtttctgattgctgctttacaactttggtctatacgtgttgttccatcactagcctagtgaagcctgaaaacgtgtctgcatgctttagaaaaagactgcttccatccttacaatttccaggatatatccttacaaattcccaaactgggtgacgtcgaaaaggtgatctatagcatgacgttttgcagtgcctgtcagaggcaaaaaa

SEQ ID NO: 38724 - DNA, 3087 bp, Zea Mays
gcggagcgcactacgacacagatcggcagccgtccatccctttccagctctccagagcctccgccggcgcatccggcgactgatttgcagggagtgcttgaagatggctttgttgccgtcaagaagttatactcgtatattgcaattgaagacgaaccatttcatcgtgaggttgattgtctaatgaatattaggcaccacaacatagtcttgtttgttggttactgtgctgaaacacaggaagtggttgtgcgtcaagaagggaaacatatttttgcggaaaaacgagaaagattactttgcttcgagtatttgcataatggaagccttcacaagcatctgacagccgaaccatgtgggcttccatggcacatttgttaccaaataataaaagggatttgcctgggcttgcactacctacatgacaagaacataattcatctagatctgaaaccggacaatatattgcttgatgatgacatggtgcccaaaatcacggacttcggtttgtcaagactcttgggtaatggaaaaagccacaccattacacaaacaagaataggaacatggggttacatggcacccgagtacttggatgatggagtgatcacaatgaagacagacatctatagcttgggtgtgataatcagacacatggtgaagggacgtaactcggcagacaccactgatgaagaaccaggtactggcaaactggttgattaggctggaaaaggatccatcacagatgatgaggcagcagacgacccgattattatttgaaacagagtacaaagagcaaataaaagcgtgcatggatatatcatggaggtgcacgctgcgtaaaccaatggacaggccaacgacgcagcacatcctacttacactggaggaaacagaagcaaagatcaaatcggtcgttgggcctactccaccaaatgccgggcagcttcagattgccaaatttgggccgtggggtggagatggagggaagacgcgagacataagaatgacgccttgccatttgcatagcgtaacaattagcagtggaactattatcgattctatcgggttttcattcactgatcactatggtcagcaccacacaacagggccttggggcggtaaggagggtacgaataagattgaactaggcccttcggagtttcttacaggagtatctggaacaagcggcccattcaaaaatctaacaaatgttgtaacgtcacttacgtttgtcaccaatactcgtagttacggaccctttggaaaagggcgaggaacaccgttccacatccaaacgcagaacaacggcaggatcgttggcttctttggccgttctggccagtatctctatgcgattggggtctacacgaaccaagatgctagggtcgcaaggatcgggcgacctttgggtggagatgaaggggttcttcatggcatcacagacctcagtgggcagcagcgcagcagaggtggaggtccatcgggagaatgtggagacagcgacgacgagcccaacggtgatttcgccaaattcggcccgtggggcggcgacggaggacagccgcaggacatcggaacactaccctgccgtctagacaggatcaagatcagcagtgggcttatcatcgactcgatcgagttctcgtacgctggccctgacagccagtaccgcaccgcaggcccttggggtggtcatggaggagacaacagctcttttcagctagctggttcagagttccttacaggtgtgtctgggtcaatcggcacattcaacggccatgcaaacgtcataacgtctctgacgttcgtcaccaacgctcgtagctacgggccgtttggaagagggcgaggcacatccttccacatcccagtgcagggcaatggctgcatcgtcggtttctttgggcgctccggacggtacctcaacgcgatcggtgtctacacggcgccgaaacccgaaccaaaagcagttgggaaacaagatggtggtgatgaggccgtcgtcgccaggattgggccttggggcggggttggaaatgctctccatgacatcgcagagaggccgcatcgcctgcacagagtgacgatcttcagcgggacgatcgtaaactcgctggagtatctgtacagcgatggcgacgggcagcagcacaccaccggtccgtggggcggctgcggaggaactggtcgaaagattcatcttgcccctgaagagttcatagtggaagttactgggacattccatccatgcgcgtgggacagaacaatacccagtgtcgtgtcctctctgacgctcgtgaccagcacgggcaaaacacacgggcctttcggaacgcagctgggagccgcgttccaggttccggtgcagagcgacagcaggatcgttggcttcttcgcccacggagacaattacatcgaagcaattggcgcctacgtgaagaaattgacagaatccagcaaccgttaactcttggaacaacttgcagctgttcacactgtttcttgggccattgctccttaaatttagtccagatggccaaggagcaaccaaacagaaatcgctatggcagggaagatggactaaactggactgtggcacctccagcatagcctgctcttagattagtgaccagacatcatcgagatatttcgatattataataaatgaggaacccatctcagatgtttatgttagctcctcagtttttgcttctgaatgattaatttagatcttccttatttttgcaataaatgaggattcttttctgtctcttctgaatggatacgaatcatgcatcacgtatcagtgcacctattgcagtgaggagatgaggacaaggtgctgacgaacttattgtcctgagctcccacttgagtttctgattgctgctttacaactttggtctatacgtgttgttccatcactagcctagtgaagcctgaaaacgtgtctgcatgctttagaaaaagactgcttccatccttacaatttccaggatatatccttacaaattcccaaactgggtgacgtcgaaaaggtgatctatagcatgacgttttgcagtgcctgtcagaggcaaaaaa

SEQ ID NO: 38725 - DNA, 7225 bp, Zea Mays
gcgcactacgacacagatcggcagccgtccatccctttccagctctccagagcctccgccggcgcatccggcgactgatttgcagggcgtatgtgttggaaatgctcagctgctagtttttcctggtagatcatcaagtcttgagagcagttaaaacaaaccaatttttcctgcaagagctctacgtgctatggagacagcaaatacattttcctttggttcacttcaattttgacgtacataatcttttattttcattgccaacattgttttcttgattttctgcctttatatcttcttgattaaaactttttgatcgataattctagttctagacaaaatatgaagctagttattttcctatgaactgaatgtttattctgatacccaaagacctcccttcaaacatagtctgtcttaaactattccactttattcatgcatgttgcttgtgctcagacagtactattgccatgaagcaaagtctgtcttaaattattccactttattcatgcatgttgcttgtgctcagacagtactattggtatagtgactagccgtctagcactatattaatttattcttttctgaagacaatctaagcacacgggtgccctacccggtgctacattcggtacatggcatccggtgtacaccgtagtatccactatccagtgctatctgctgtgatgtttttccttacaatatcaaggatatcatttctattattttgttttcattcagctctctaatgagacaaaaatagttcaggggcagatatgtcattttacatgccaagacagagaatccatttaaaaaatcaggattgccaaacattcagcttttctagacaacaaattctctggaaagcgtcttctcaggaaatcaggcttttcagataagcgtttctcagaaaagtggatccaaacagggcctaaattagtgtatctacatgcagctcaatcaaaaactggatcttggatttaaaatccattattcacttctcaaaattagcaaatttaactaagttttactatagatggttcagtgacagtaagctaattgatgcaaataagtgagtctagatgtatgtgcggacccatgttcaaaccgcgcacctgcaactaaacatcacattcccacaatgtgctgttgaatggaatcccagaagaagccacatttcataggtgtgacctttggcagggtgatcccttatcacctatgttatttattctgattatagacgctttggtttatttggttaaaaaggctgaagaggatgggctgcttcagcccctgtcttcaaaggttcttcaacaccagatttctctatatgcagatgatgttgttatcttcctcaagccggctactagtgatatgctttcatcatggatgtgcttcacttgtttgggggaggcttctggtcttaaaaacaatgtgcaaaaaactagtgattttcctataaggtgtgaagattaatacttgatggtcattcaaggccttctgccatgcaacatcttgagcttgataggattgccaattagctacagaggtggaaggctaacttaataacaagggctagcaggagggtttgagtttagtttgtgctcataggaatgttgatctactttgctatgactactgacattcctccttgggttttcaaagcaattgataaaatcagacaaagatttctatggaggagaaggaaggatgccaaaggcgggcactgcctcgtggcgtggggaaaggtttgtcacccccttgagcttggcggccttggtatttcaagtcttctagagctatcttgggcactccgcatgagatggctttggctccaaaaaactgagtcaaataaaccatgggctgatttacctatccaagtcctagccaaagcctaggtgcttttttctattgctctgatttctaaggttggggacggcacatccaccctattctggactaatcgttggttgatggggcaaaatatcatggaagtggcaccaaggttgtttgctgcttgttcctaagagaattacaagaaggagaattgttcttgaagccctcactaatcatcactggattttggatgttcaagttgctttaacaattcaagtaattgtggattatatctagattcgggactgtctcagtcaggtggagttacagcagggggtggctgattctcacatccagttctcgcgtaatggaagatattcagccaaaatggcatatgcgggtttttttgttggctcggttccttttgaaccttatgagaagatttgatgttcatggccccttcctaaatataaatgttttctgtggttggtgacgcacaacagatactggatggcaggcaggctggcttgtagaggcctcccggtgcctgctgtgtgactaggaagatgaaacagtcagccatgtgcttctttcttgtatgtttgcgtgagaattttggttcaaaatcctaaggccttatggcctgcagacccttgcaccataatctgaaggtaggagtttctttctctggtggacgcaggctgaagagagaactaaggggttgacaagaaaaggtttcaactccctcgtcatcctgggagcttgaactctgtggaagatacgaaatggatgtctttgaaggcctctccccatcatatgatttcagcttctgctcactttggtgaagaaatagatttatggatgatggctcacgccaaaggattggtgttcctttcagccgtggctgaggattagtggtagttggtctgctataatctatgcctatgaataatcctttcttgtataagaggttttggccaccatgagctagccatttgagttttgtaaggcctttatacgtttcttcttagtataatgatacgtagttctcctgcgtctttgagaaaaaaagttctaacgaaattcactagaatttatttgatgtggcacattttgatatcaggtacttcttgaagattatatatagctcatttaaatgtgtgatccatgtcaaaaggtggacctgattaactgattttgaaaacattatattcacaccttaaattattaaatttgtttcaaggccaagtagcaatgtatatacacccaaatgcgtctctaccaaatttgaaatgtcttatcataaaattcaagctctaggtccatatagatctcattctctaaaaattgatccatatagatctatccctacatgtaaacaaaacctagtcatgcatacctatgatttattccaacaaggcgcccacaaaaataaatgatcaaatattttatcagaatttacatatcatttcttttttctagtcattgtaatctgtactattcaatagacacatgtttgtgaaaattatagagatgcaaggcaggttatccgtaaacccgtaaatagactaaatttttacgagttacccacaaatttgcaaaagattagcctatttgtgggtttatggacaacccgacttgcatccctcaaatattacataaaaaaactgagggtggttgaaaacatacagggagtgcttgaagatggctttgttgccgtcaagaagttatactcgtatattgcaattgaagacgaaccatttcatcgtgaggttgattgtctaatgaatattaggcaccacaacatagtcttgtttgttggttactgtgctgaaacacaggaagtggttgtgcgtcaagaagggaaacatatttttgcggaaaaacgagaaagattactttgcttcgagtatttgcataatggaagccttcacaagcatctgacagccgaaccatgtgggcttccatggcacatttgttaccaaataataaaagggatttgcctgggcttgcactacctacatgacaagaacataattcatctagatctgaaaccggacaatatattgcttgatgatgacatggtgcccaaaatcacggacttcggtttgtcaagactcttgggtaatggaaaaagccacaccattacacaaacaagaataggaacatggggttacatggcacccgagtacttggatgatggagtgatcacaatgaagacagacatctatagcttgggtgtgataatcagacacatggtgaagggacgtaactcggcagacaccactgatgaagaaccaggtactggcaaactggttgattaggctggaaaaggatccatcacagatgatgaggcagcagacgacccgattattatttgaaacagagtacaaagagcaaataaaagcgtgcatggatatatcatggaggtgcacgctgcgtaaaccaatggacaggccaacgacgcagcacatcctacttacactggaggaaacagaagcaaagatcaaatcggtcgttgggcctactccaccaaatgccgggcagcttcagattgccaaatttgggccgtggggtggagatggagggaagacgcgagacataagaatgacgccttgccatttgcatagcgtaacaattagcagtggaactattatcgattctatcgggttttcattcactgatcactatggtcagcaccacacaacagggccttggggcggtaaggagggtacgaataaggtgagcatcaaagaataacactttctgtactttaaatataaataatgttatttagacgtgtgcaacacaaacttaaatttgcatttgtgaatgttatcattgtttaagcttgggggactacatccaaatacattccagcatagcatgcacatccaaatacgggtagccagcatgatggtatgtgactagctccaaattactaagaaagaataacataccatgatagtactactacaatggtatatcattccctattttataaagcatgtcatctttggagaacttgctatggaataatggtggtaacaattggactcatatatatatatatatatacaattatatataaaagaataagtaaacaaggggttcttgaagacattcctaagttacaatttgaagtactaaaatttggtactcgagatgccgattttcacatgcttcttatgctttagtaacggtaattaaatcttgatttctctccaaggcggtagggctcaaagtcactaccgtctgactgctcatgactgtctttacaggaggatatttgtatgtgaaatagaaatactgtttctctttctctttctctttctcttgcagattgaactaggcccttcggagtttcttacaggagtatctggaacaagcggcccattcaaaaatctaacaaatgttgtaacgtcacttacgtttgtcaccaatactcgtagttacggaccctttggaaaagggcgaggaacaccgttccacatccaaacgcagaacaacggcaggatcgttggcttctttggccgttctggccagtatctctatgcgattggggtctacacgaaccaagatgtgctgcaaatctagctagtccatactagttttatcgatcttatttaatatttatgttttcattcaaacatttgcttattagtccggttcacttccaggctagggtcgcaaggatcgggcgacctttgggtggagatgaaggggttcttcatggcatcacagacctcagtgggcagcagcgcagcagaggtggaggtccatcgggagaatgtggagacagcgacgacgagcccaacggtgatttcgccaaattcggcccgtggggcggcgacggaggacagccgcaggacatcggaacactaccctgccgtctagacaggatcaagatcagcagtgggcttatcatcgactcgatcgagttctcgtacgctggccctgacagccagtaccgcaccgcaggcccttggggtggtcatggaggagacaacagctcttttcagctagctggttcagagttccttacaggtgtgtctgggtcaatcggcacattcaacggccatgcaaacgtcataacgtctctgacgttcgtcaccaacgctcgtagctacgggccgtttggaagagggcgaggcacatccttccacatcccagtgcagggcaatggctgcatcgtcggtttctttgggcgctccggacggtacctcaacgcgatcggtgtctacacggcgccgaaacccgaaccaaaagcagttgggaaacaagatggtggtgatgaggccgtcgtcgccaggattgggccttggggcggggttggaaatgctctccatgacatcgcagagaggccgcatcgcctgcacagagtgacgatcttcagcgggacgatcgtaaactcgctggagtatctgtacagcgatggcgacgggcagcagcacaccaccggtccgtggggcggctgcggaggaactggtcgaaagattcatcttgcccctgaagagttcatagtggaagttactgggacattccatccatgcgcgtgggacagaacaatacccagtgtcgtgtcctctctgacgctcgtgaccagcacgggcaaaacacacgggcctttcggaacgcagctgggagccgcgttccaggttccggtgcagagcgacagcaggatcgttggcttcttcgcccacggagacaattacatcgaagcaattggcgcctacgtgaagaaattgacagaatccagcaaccgttaactcttggaacaacttgcagctgttcacactgtttcttgggccattgctccttaaatttagtccagatggccaaggagcaaccaaacagaaatcgctatggcagggaagatggactaaactggactgtggcacctccagcatagcctgctcttagattagtgaccagacatcatcgagatatttcgatattataataaatgaggaacccatctcagatgtttatgttagctcctcagtttttgcttctgaatgattaatttagatcttccttatttttgcaataaatgaggattcttttctgtctcttctgaatggatacgaatcatgcatcacgtatcagtgcacctattgcagtgaggagatgaggacaaggtgctgacgaacttattgtcctgagctcccacttgagtttctgattgctgctttacaactttggtctatacgtgttgttccatcactagcctagtgaagcctgaaaacgtgtctgcatgctttagaaaaagactgcttccatccttacaatttccaggatatatccttacaaattcccaaactgggtgacgtcgaaaaggtgatctatagcatgacgttttgcagtgcctgtcagaggcaaaaaa

SEQ ID NO: 38726 - DNA, 3824 bp, Zea Mays
ctacgacacagatcggcagccgtccatccctttccagctctccagagcctccgccggcgcatccggcgactgatttgcagggcgtatgtgttggaaatgctcagctgctagtttttcctggtagatcatcaagtcttgagagcagttaaaacaaaccaatttttcctgcaagagctctacgtgctatggagacagcaaatacattttcctttggttcacttcaattttgacggagtgcttgaagatggctttgttgccgtcaagaagttatactcgtatattgcaattgaagacgaaccatttcatcgtgaggttgattgtctaatgaatattaggcaccacaacatagtcttgtttgttggttactgtgctgaaacacaggaagtggttgtgcgtcaagaagggaaacatatttttgcggaaaaacgagaaagattactttgcttcgagtatttgcataatggaagccttcacaagcatctgacagccgaaccatgtgggcttccatggcacatttgttaccaaataataaaagggatttgcctgggcttgcactacctacatgacaagaacataattcatctagatctgaaaccggacaatatattgcttgatgatgacatggtgcccaaaatcacggacttcggtttgtcaagactcttgggtaatggaaaaagccacaccattacacaaacaagaataggaacatggggttacatggcacccgagtacttggatgatggagtgatcacaatgaagacagacatctatagcttgggtgtgataatcagacacatggtgaagggacgtaactcggcagacaccactgatgaagaagtactggcaaactggttgattaggctggaaaaggatccatcacagatgatgaggcagcagacgacccgattattatttgaaacagagtacaaagagcaaataaaagcgtgcatggatatatcatggaggtgcacgctgcgtaaaccaatggacaggccaacgacgcagcacatcctacttacactggaggaaacagaagcaaagatcaaatcggtcgttgggcctactccaccaaatgccgggcagcttcagattgccaaatttgggccgtggggtggagatggagggaagacgcgagacataagaatgacgccttgccatttgcatagcgtaacaattagcagtggaactattatcgattctatcgggttttcattcactgatcactatggtcagcaccacacaacagggccttggggcggtaaggagggtacgaataaggtgagcatcaaagaataacactttctgtactttaaatataaataatgttatttagacgtgtgcaacacaaacttaaatttgcatttgtgaatgttatcattgtttaagcttgggggactacatccaaatacattccagcatagcatgcacatccaaatacgggtagccagcatgatggtatgtgactagctccaaattactaagaaagaataacataccatgatagtactactacaatggtatatcattccctattttataaagcatgtcatctttggagaacttgctatggaataatggtggtaacaattggactcatatatatatatatatatacaattatatataaaagaataagtaaacaaggggttcttgaagacattcctaagttacaatttgaagtactaaaatttggtactcgagatgccgattttcacatgcttcttatgctttagtaacggtaattaaatcttgatttctctccaaggcggtagggctcaaagtcactaccgtctgactgctcatgactgtctttacaggaggatatttgtatgtgaaatagaaatactgtttctctttctctttctctttctcttgcagattgaactaggcccttcggagtttcttacaggagtatctggaacaagcggcccattcaaaaatctaacaaatgttgtaacgtcacttacgtttgtcaccaatactcgtagttacggaccctttggaaaagggcgaggaacaccgttccacatccaaacgcagaacaacggcaggatcgttggcttctttggccgttctggccagtatctctatgcgattggggtctacacgaaccaagatgctagggtcgcaaggatcgggcgacctttgggtggagatgaaggggttcttcatggcatcacagacctcagtgggcagcagcgcagcagaggtggaggtccatcgggagaatgtggagacagcgacgacgagcccaacggtgatttcgccaaattcggcccgtggggcggcgacggaggacagccgcaggacatcggaacactaccctgccgtctagacaggatcaagatcagcagtgggcttatcatcgactcgatcgagttctcgtacgctggccctgacagccagtaccgcaccgcaggcccttggggtggtcatggaggagacaacagctcttttcagctagctggttcagagttccttacaggtgtgtctgggtcaatcggcacattcaacggccatgcaaacgtcataacgtctctgacgttcgtcaccaacgctcgtagctacgggccgtttggaagagggcgaggcacatccttccacatcccagtgcagggcaatggctgcatcgtcggtttctttgggcgctccggacggtacctcaacgcgatcggtgtctacacggcgccgaaacccgaaccaaaagcagttgggaaacaagatggtggtgatgaggccgtcgtcgccaggattgggccttggggcggggttggaaatgctctccatgacatcgcagagaggccgcatcgcctgcacagagtgacgatcttcagcgggacgatcgtaaactcgctggagtatctgtacagcgatggcgacgggcagcagcacaccaccggtccgtggggcggctgcggaggaactggtcgaaagattcatcttgcccctgaagagttcatagtggaagttactgggacattccatccatgcgcgtgggacagaacaatacccagtgtcgtgtcctctctgacgctcgtgaccagcacgggcaaaacacacgggcctttcggaacgcagctgggagccgcgttccaggttccggtgcagagcgacagcaggatcgttggcttcttcgcccacggagacaattacatcgaagcaattggcgcctacgtgaagaaattgacagaatccagcaaccgttaactcttggaacaacttgcagctgttcacactgtttcttgggccattgctccttaaatttagtccagatggccaaggagcaaccaaacagaaatcgctatggcagggaagatggactaaactggactgtggcacctccagcatagcctgctcttagattagtgaccagacatcatcgagatatttcgatattataataaatgaggaacccatctcagatgtttatgttagctcctcagtttttgcttctgaatgattaatttagatcttccttatttttgcaataaatgaggattcttttctgtctcttctgaatggatacgaatcatgcatcacgtatcagtgcacctattgcagtgaggagatgaggacaaggtgctgacgaacttattgtcctgagctcccacttgagtttctgattgctgctttacaactttggtctatacgtgttgttccatcactagcctagtgaagcctgaaaacgtgtctgcatgctttagaaaaagactgcttccatccttacaatttccaggatatatccttacaaattcccaaactgggtgacgtcgaaaaggtgatctatagcatgacgttttgcagtgcctgtcagaggcaaaaaa

SEQ ID NO: 38727 - DNA, 6113 bp, Zea Mays
ctacgacacagatcggcagccgtccatccctttccagctctccagagcctccgccggcgcatccggcgactgatttgcagggcgtatgtgttggaaatgctcagctgctagtttttcctggtagatcatcaagtcttgagagcagttaaaacaaaccaatttttcctgcaagagctctacgtgctatggagacagcaaatacattttcctttggttcacttcaattttgacatgatgttgttatcttcctcaagccggctactagtgatatgctttcatcatggatgtgcttcacttgtttgggggaggcttctggtcttaaaaacaatgtgcaaaaaactagtgattttcctataaggtgtgaagattaatacttgatggtcattcaaggccttctgccatgcaacatcttgagcttgataggattgccaattagctacagaggtggaaggctaacttaataacaagggctagcaggagggtttgagtttagtttgtgctcataggaatgttgatctactttgctatgactactgacattcctccttgggttttcaaagcaattgataaaatcagacaaagatttctatggaggagaaggaaggatgccaaaggcgggcactgcctcgtggcgtggggaaaggtttgtcacccccttgagcttggcggccttggtatttcaagtcttctagagctatcttgggcactccgcatgagatggctttggctccaaaaaactgagtcaaataaaccatgggctgatttacctatccaagtcctagccaaagcctaggtgcttttttctattgctctgatttctaaggttggggacggcacatccaccctattctggactaatcgttggttgatggggcaaaatatcatggaagtggcaccaaggttgtttgctgcttgttcctaagagaattacaagaaggagaattgttcttgaagccctcactaatcatcactggattttggatgttcaagttgctttaacaattcaagtaattgtggattatatctagattcgggactgtctcagtcaggtggagttacagcagggggtggctgattctcacatccagttctcgcgtaatggaagatattcagccaaaatggcatatgcgggtttttttgttggctcggttccttttgaaccttatgagaagatttgatgttcatggccccttcctaaatataaatgttttctgtggttggtgacgcacaacagatactggatggcaggcaggctggcttgtagaggcctcccggtgcctgctgtgtgactaggaagatgaaacagtcagccatgtgcttctttcttgtatgtttgcgtgagaattttggttcaaaatcctaaggccttatggcctgcagacccttgcaccataatctgaaggtaggagtttctttctctggtggacgcaggctgaagagagaactaaggggttgacaagaaaaggtttcaactccctcgtcatcctgggagcttgaactctgtggaagatacgaaatggatgtctttgaaggcctctccccatcatatgatttcagcttctgctcactttggtgaagaaatagatttatggatgatggctcacgccaaaggattggtgttcctttcagccgtggctgaggattagtggtagttggtctgctataatctatgcctatgaataatcctttcttgtataagaggttttggccaccatgagctagccatttgagttttgtaaggcctttatacgtttcttcttagtataatgatacgtagttctcctgcgtctttgagaaaaaaagttctaacgaaattcactagaatttatttgatgtggcacattttgatatcaggtacttcttgaagattatatatagctcatttaaatgtgtgatccatgtcaaaaggtggacctgattaactgattttgaaaacattatattcacaccttaaattattaaatttgtttcaaggccaagtagcaatgtatatacacccaaatgcgtctctaccaaatttgaaatgtcttatcataaaattcaagctctaggtccatatagatctcattctctaaaaattgatccatatagatctatccctacatgtaaacaaaacctagtcatgcatacctatgatttattccaacaaggcgcccacaaaaataaatgatcaaatattttatcagaatttacatatcatttcttttttctagtcattgtaatctgtactattcaatagacacatgtttgtgaaaattatagagatgcaaggcaggttatccgtaaacccgtaaatagactaaatttttacgagttacccacaaatttgcaaaagattagcctatttgtgggtttatggacaacccgacttgcatccctcaaatattacataaaaaaactgagggtggttgaaaacatacagggagtgcttgaagatggctttgttgccgtcaagaagttatactcgtatattgcaattgaagacgaaccatttcatcgtgaggttgattgtctaatgaatattaggcaccacaacatagtcttgtttgttggttactgtgctgaaacacaggaagtggttgtgcgtcaagaagggaaacatatttttgcggaaaaacgagaaagattactttgcttcgagtatttgcataatggaagccttcacaagcatctgacagccgaaccatgtgggcttccatggcacatttgttaccaaataataaaagggatttgcctgggcttgcactacctacatgacaagaacataattcatctagatctgaaaccggacaatatattgcttgatgatgacatggtgcccaaaatcacggacttcggtttgtcaagactcttgggtaatggaaaaagccacaccattacacaaacaagaataggaacatggggttacatggcacccgagtacttggatgatggagtgatcacaatgaagacagacatctatagcttgggtgtgataatcagacacatggtgaagggacgtaactcggcagacaccactgatgaagaagtactggcaaactggttgattaggctggaaaaggatccatcacagatgatgaggcagcagacgacccgattattatttgaaacagagtacaaagagcaaataaaagcgtgcatggatatatcatggaggtgcacgctgcgtaaaccaatggacaggccaacgacgcagcacatcctacttacactggaggaaacagaagcaaagatcaaatcggtcgttgggcctactccaccaaatgccgggcagcttcagattgccaaatttgggccgtggggtggagatggagggaagacgcgagacataagaatgacgccttgccatttgcatagcgtaacaattagcagtggaactattatcgattctatcgggttttcattcactgatcactatggtcagcaccacacaacagggccttggggcggtaaggagggtacgaataaggtgagcatcaaagaataacactttctgtactttaaatataaataatgttatttagacgtgtgcaacacaaacttaaatttgcatttgtgaatgttatcattgtttaagcttgggggactacatccaaatacattccagcatagcatgcacatccaaatacgggtagccagcatgatggtatgtgactagctccaaattactaagaaagaataacataccatgatagtactactacaatggtatatcattccctattttataaagcatgtcatctttggagaacttgctatggaataatggtggtaacaattggactcatatatatatatatatatacaattatatataaaagaataagtaaacaaggggttcttgaagacattcctaagttacaatttgaagtactaaaatttggtactcgagatgccgattttcacatgcttcttatgctttagtaacggtaattaaatcttgatttctctccaaggcggtagggctcaaagtcactaccgtctgactgctcatgactgtctttacaggaggatatttgtatgtgaaatagaaatactgtttctctttctctttctctttctcttgcagattgaactaggcccttcggagtttcttacaggagtatctggaacaagcggcccattcaaaaatctaacaaatgttgtaacgtcacttacgtttgtcaccaatactcgtagttacggaccctttggaaaagggcgaggaacaccgttccacatccaaacgcagaacaacggcaggatcgttggcttctttggccgttctggccagtatctctatgcgattggggtctacacgaaccaagatgtgctgcaaatctagctagtccatactagttttatcgatcttatttaatatttatgttttcattcaaacatttgcttattagtccggttcacttccaggctagggtcgcaaggatcgggcgacctttgggtggagatgaaggggttcttcatggcatcacagacctcagtgggcagcagcgcagcagaggtggaggtccatcgggagaatgtggagacagcgacgacgagcccaacggtgatttcgccaaattcggcccgtggggcggcgacggaggacagccgcaggacatcggaacactaccctgccgtctagacaggatcaagatcagcagtgggcttatcatcgactcgatcgagttctcgtacgctggccctgacagccagtaccgcaccgcaggcccttggggtggtcatggaggagacaacagctcttttcagctagctggttcagagttccttacaggtgtgtctgggtcaatcggcacattcaacggccatgcaaacgtcataacgtctctgacgttcgtcaccaacgctcgtagctacgggccgtttggaagagggcgaggcacatccttccacatcccagtgcagggcaatggctgcatcgtcggtttctttgggcgctccggacggtacctcaacgcgatcggtgtctacacggcgccgaaacccgaaccaaaagcagttgggaaacaagatggtggtgatgaggccgtcgtcgccaggattgggccttggggcggggttggaaatgctctccatgacatcgcagagaggccgcatcgcctgcacagagtgacgatcttcagcgggacgatcgtaaactcgctggagtatctgtacagcgatggcgacgggcagcagcacaccaccggtccgtggggcggctgcggaggaactggtcgaaagattcatcttgcccctgaagagttcatagtggaagttactgggacattccatccatgcgcgtgggacagaacaatacccagtgtcgtgtcctctctgacgctcgtgaccagcacgggcaaaacacacgggcctttcggaacgcagctgggagccgcgttccaggttccggtgcagagcgacagcaggatcgttggcttcttcgcccacggagacaattacatcgaagcaattggcgcctacgtgaagaaattgacagaatccagcaaccgttaactcttggaacaacttgcagctgttcacactgtttcttgggccattgctccttaaatttagtccagatggccaaggagcaaccaaacagaaatcgctatggcagggaagatggactaaactggactgtggcacctccagcatagcctgctcttagattagtgaccagacatcatcgagatatttcgatattataataaatgaggaacccatctcagatgtttatgttagctcctcagtttttgcttctgaatgattaatttagatcttccttatttttgcaataaatgaggattcttttctgtctcttctgaatggatacgaatcatgcatcacgtatcagtgcacctattgcagtgaggagatgaggacaaggtgctgacgaacttattgtcctgagctcccacttgagtttctgattgctgctttacaactttggtctatacgtgttgttccatcactagcctagtgaagcctgaaaacgtgtctgcatgctttagaaaaagactgcttccatccttacaatttccaggatatatccttacaaattcccaaactgggtgacgtcgaaaaggtgatctatagcatgacgttttgcagtgcctgtcagaggcaaaaaa

SEQ ID NO: 38728 - DNA, 3058 bp, Zea Mays
ctacgacacagatcggcagccgtccatccctttccagctctccagagcctccgccggcgcatccggcgactgatttgcagggagtgcttgaagatggctttgttgccgtcaagaagttatactcgtatattgcaattgaagacgaaccatttcatcgtgaggttgattgtctaatgaatattaggcaccacaacatagtcttgtttgttggttactgtgctgaaacacaggaagtggttgtgcgtcaagaagggaaacatatttttgcggaaaaacgagaaagattactttgcttcgagtatttgcataatggaagccttcacaagcatctgacagccgaaccatgtgggcttccatggcacatttgttaccaaataataaaagggatttgcctgggcttgcactacctacatgacaagaacataattcatctagatctgaaaccggacaatatattgcttgatgatgacatggtgcccaaaatcacggacttcggtttgtcaagactcttgggtaatggaaaaagccacaccattacacaaacaagaataggaacatggggttacatggcacccgagtacttggatgatggagtgatcacaatgaagacagacatctatagcttgggtgtgataatcagacacatggtgaagggacgtaactcggcagacaccactgatgaagaagtactggcaaactggttgattaggctggaaaaggatccatcacagatgatgaggcagcagacgacccgattattatttgaaacagagtacaaagagcaaataaaagcgtgcatggatatatcatggaggtgcacgctgcgtaaaccaatggacaggccaacgacgcagcacatcctacttacactggaggaaacagaagcaaagatcaaatcggtcgttgggcctactccaccaaatgccgggcagcttcagattgccaaatttgggccgtggggtggagatggagggaagacgcgagacataagaatgacgccttgccatttgcatagcgtaacaattagcagtggaactattatcgattctatcgggttttcattcactgatcactatggtcagcaccacacaacagggccttggggcggtaaggagggtacgaataagattgaactaggcccttcggagtttcttacaggagtatctggaacaagcggcccattcaaaaatctaacaaatgttgtaacgtcacttacgtttgtcaccaatactcgtagttacggaccctttggaaaagggcgaggaacaccgttccacatccaaacgcagaacaacggcaggatcgttggcttctttggccgttctggccagtatctctatgcgattggggtctacacgaaccaagatgctagggtcgcaaggatcgggcgacctttgggtggagatgaaggggttcttcatggcatcacagacctcagtgggcagcagcgcagcagaggtggaggtccatcgggagaatgtggagacagcgacgacgagcccaacggtgatttcgccaaattcggcccgtggggcggcgacggaggacagccgcaggacatcggaacactaccctgccgtctagacaggatcaagatcagcagtgggcttatcatcgactcgatcgagttctcgtacgctggccctgacagccagtaccgcaccgcaggcccttggggtggtcatggaggagacaacagctcttttcagctagctggttcagagttccttacaggtgtgtctgggtcaatcggcacattcaacggccatgcaaacgtcataacgtctctgacgttcgtcaccaacgctcgtagctacgggccgtttggaagagggcgaggcacatccttccacatcccagtgcagggcaatggctgcatcgtcggtttctttgggcgctccggacggtacctcaacgcgatcggtgtctacacggcgccgaaacccgaaccaaaagcaggtggtgatgaggccgtcgtcgccaggattgggccttggggcggggttggaaatgctctccatgacatcgcagagaggccgcatcgcctgcacagagtgacgatcttcagcgggacgatcgtaaactcgctggagtatctgtacagcgatggcgacgggcagcagcacaccaccggtccgtggggcggctgcggaggaactggtcgaaagattcatcttgcccctgaagagttcatagtggaagttactgggacattccatccatgcgcgtgggacagaacaatacccagtgtcgtgtcctctctgacgctcgtgaccagcacgggcaaaacacacgggcctttcggaacgcagctgggagccgcgttccaggttccggtgcagagcgacagcaggatcgttggcttcttcgcccacggagacaattacatcgaagcaattggcgcctacgtgaagaaattgacagaatccagcaaccgttaactcttggaacaacttgcagctgttcacactgtttcttgggccattgctccttaaatttagtccagatggccaaggagcaaccaaacagaaatcgctatggcagggaagatggactaaactggactgtggcacctccagcatagcctgctcttagattagtgaccagacatcatcgagatatttcgatattataataaatgaggaacccatctcagatgtttatgttagctcctcagtttttgcttctgaatgattaatttagatcttccttatttttgcaataaatgaggattcttttctgtctcttctgaatggatacgaatcatgcatcacgtatcagtgcacctattgcagtgaggagatgaggacaaggtgctgacgaacttattgtcctgagctcccacttgagtttctgattgctgctttacaactttggtctatacgtgttgttccatcactagcctagtgaagcctgaaaacgtgtctgcatgctttagaaaaagactgcttccatccttacaatttccaggatatatccttacaaattcccaaactgggtgacgtcgaaaaggtgatctatagcatgacgttttgcagtgcctgtcagaggcaaaaaa

SEQ ID NO: 38729 - DNA, 6683 bp, Zea Mays
ctacgacacagatcggcagccgtccatccctttccagctctccagagcctccgccggcgcatccggcgactgatttgcagggcgtatgtgttggaaatgctcagctgctagtttttcctggtagatcatcaagtcttgagagcagttaaaacaaaccaatttttcctgcaagagctctacgtgctatggagacagcaaatacattttcctttggttcacttcaattttgacgtacataatcttttattttcattgccaacattgttttcttgattttctgcctttatatcttcttgattaaaactttttgatcgataattctagttctagacaaaatatgaagctagttattttcctatgaactgaatgtttattctgatacccaaagacctcccttcaaacatagtctgtcttaaactattccactttattcatgcatgttgcttgtgctcagacagtactattgccatgaagcaaagtctgtcttaaattattccactttattcatgcatgttgcttgtgctcagacagtactattggtatagtgactagccgtctagcactatattaatttattcttttctgaagacaatctaagcacacgggtgccctacccggtgctacattcggtacatggcatccggtgtacaccgtagtatccactatccagtgctatctgctgtgatgtttttccttacaatatcaaggatatcatttctattattttgttttcattcagctctctaatgagacaaaaatagttcaggggcagatatgtcattttacatgccaagacagagaatccatttaaaaaatcaggattgccaaacattcagcttttctagacaacaaattctctggaaagcgtcttctcaggaaatcaggcttttcagataagcgtttctcagaaaagtggatccaaacagggcctaaattagtgtatctacatgcagctcaatcaaaaactggatcttggatttaaaatccattattcacttctcaaaattagcaaatttaactaagttttactatagatggttcagtgacagtaagctaattgatgcaaataagtgagtctagatgtatgtgcggacccatgttcaaaccgcgcacctgcaactaaacatcacattcccacaatgtgctgttgaatggaatcccagaagaagccacatttcataggtgtgacctttggcagggtgatcccttatcacctatgttatttattctgattatagacgctttggtttatttggttaaaaaggctgaagaggatgggctgcttcagcccctgtcttcaaaggttcttcaacaccagatttctctatatgcagatgatgttgttatcttcctcaagccggctactagtgatatgctttcatcatggatgtgcttcacttgtttgggggaggcttctggtcttaaaaacaatgtgcaaaaaactagtgattttcctataaggtgtgaagattaatacttgatggtcattcaaggccttctgccatgcaacatcttgagcttgataggattgccaattagctacagaggtggaaggctaacttaataacaagggctagcaggagggtttgagtttagtttgtgctcataggaatgttgatctactttgctatgactactgacattcctccttgggttttcaaagcaattgataaaatcagacaaagatttctatggaggagaaggaaggatgccaaaggcgggcactgcctcgtggcgtggggaaaggtttgtcacccccttgagcttggcggccttggtatttcaagtcttctagagctatcttgggcactccgcatgagatggctttggctccaaaaaactgagtcaaataaaccatgggctgatttacctatccaagtcctagccaaagcctaggtgcttttttctattgctctgatttctaaggttggggacggcacatccaccctattctggactaatcgttggttgatggggcaaaatatcatggaagtggcaccaaggttgtttgctgcttgttcctaagagaattacaagaaggagaattgttcttgaagccctcactaatcatcactggattttggatgttcaagttgctttaacaattcaagtaattgtggattatatctagattcgggactgtctcagtcaggtggagttacagcagggggtggctgattctcacatccagttctcgcgtaatggaagatattcagccaaaatggcatatgcgggtttttttgttggctcggttccttttgaaccttatgagaagatttgatgttcatggccccttcctaaatataaatgttttctgtggttggtgacgcacaacagatactggatggcaggcaggctggcttgtagaggcctcccggtgcctgctgtgtgactaggaagatgaaacagtcagccatgtgcttctttcttgtatgtttgcgtgagaattttggttcaaaatcctaaggccttatggcctgcagacccttgcaccataatctgaaggtaggagtttctttctctggtggacgcaggctgaagagagaactaaggggttgacaagaaaaggtttcaactccctcgtcatcctgggagcttgaactctgtggaagatacgaaatggatgtctttgaaggcctctccccatcatatgatttcagcttctgctcactttggtgaagaaatagatttatggatgatggctcacgccaaaggattggtgttcctttcagccgtggctgaggattagtggtagttggtctgctataatctatgcctatgaataatcctttcttgtataagaggttttggccaccatgagctagccatttgagttttgtaaggcctttatacgtttcttcttagtataatgatacgtagttctcctgcgtctttgagaaaaaaagttctaacgaaattcactagaatttatttgatgtggcacattttgatatcaggtacttcttgaagattatatatagctcatttaaatgtgtgatccatgtcaaaaggtggacctgattaactgattttgaaaacattatattcacaccttaaattattaaatttgtttcaaggccaagtagcaatgtatatacacccaaatgcgtctctaccaaatttgaaatgtcttatcataaaattcaagctctaggtccatatagatctcattctctaaaaattgatccatatagatctatccctacatgtaaacaaaacctagtcatgcatacctatgatttattccaacaaggcgcccacaaaaataaatgatcaaatattttatcagaatttacatatcatttcttttttctagtcattgtaatctgtactattcaatagacacatgtttgtgaaaattatagagatgcaaggcaggttatccgtaaacccgtaaatagactaaatttttacgagttacccacaaatttgcaaaagattagcctatttgtgggtttatggacaacccgacttgcatccctcaaatattacataaaaaaactgagggtggttgaaaacatacagggagtgcttgaagatggctttgttgccgtcaagaagttatactcgtatattgcaattgaagacgaaccatttcatcgtgaggttgattgtctaatgaatattaggcaccacaacatagtcttgtttgttggttactgtgctgaaacacaggaagtggttgtgcgtcaagaagggaaacatatttttgcggaaaaacgagaaagattactttgcttcgagtatttgcataatggaagccttcacaagcatctgacagccgaaccatgtgggcttccatggcacatttgttaccaaataataaaagggatttgcctgggcttgcactacctacatgacaagaacataattcatctagatctgaaaccggacaatatattgcttgatgatgacatggtgcccaaaatcacggacttcggtttgtcaagactcttgggtaatggaaaaagccacaccattacacaaacaagaataggaacatggggttacatggcacccgagtacttggatgatggagtgatcacaatgaagacagacatctatagcttgggtgtgataatcagacacatggtgaagggacgtaactcggcagacaccactgatgaagaaccaggtactggcaaactggttgattaggctggaaaaggatccatcacagatgatgaggcagcagacgacccgattattatttgaaacagagtacaaagagcaaataaaagcgtgcatggatatatcatggaggtgcacgctgcgtaaaccaatggacaggccaacgacgcagcacatcctacttacactggaggaaacagaagcaaagatcaaatcggtcgttgggcctactccaccaaatgccgggcagattgccaaatttgggccgtggggtggagatggagggaagacgcgagacataagaatgacgccttgccatttgcatagcgtaacaattagcagtggaactattatcgattctatcgggttttcattcactgatcactatggtcagcaccacacaacagggccttggggcggtaaggagggtacgaataagcttgggggactacatccaaatacattccagcatagcatgcacatccaaatacgggtagccagcatgatgattgaactaggcccttcggagtttcttacaggagtatctggaacaagcggcccattcaaaaatctaacaaatgttgtaacgtcacttacgtttgtcaccaatactcgtagttacggaccctttggaaaagggcgaggaacaccgttccacatccaaacgcagaacaacggcaggatcgttggcttctttggccgttctggccagtatctctatgcgattggggtctacacgaaccaagatgtgctgcaaatctagctagtccatactagttttatcgatcttatttaatatttatgttttcattcaaacatttgcttattagtccggttcacttccaggctagggtcgcaaggatcgggcgacctttgggtggagatgaaggggttcttcatggcatcacagacctcagtgggcagcagcgcagcagaggtggaggtccatcgggagaatgtggagacagcgacgacgagcccaacggtgatttcgccaaattcggcccgtggggcggcgacggaggacagccgcaggacatcggaacactaccctgccgtctagacaggatcaagatcagcagtgggcttatcatcgactcgatcgagttctcgtacgctggccctgacagccagtaccgcaccgcaggcccttggggtggtcatggaggagacaacagctcttttcagctagctggttcagagttccttacaggtgtgtctgggtcaatcggcacattcaacggccatgcaaacgtcataacgtctctgacgttcgtcaccaacgctcgtagctacgggccgtttggaagagggcgaggcacatccttccacatcccagtgcagggcaatggctgcatcgtcggtttctttgggcgctccggacggtacctcaacgcgatcggtgtctacacggcgccgaaacccgaaccaaaagcagttgggaaacaagatggtggtgatgaggccgtcgtcgccaggattgggccttggggcggggttggaaatgctctccatgacatcgcagagaggccgcatcgcctgcacagagtgacgatcttcagcgggacgatcgtaaactcgctggagtatctgtacagcgatggcgacgggcagcagcacaccaccggtccgtggggcggctgcggaggaactggtcgaaagattcatcttgcccctgaagagttcatagtggaagttactgggacattccatccatgcgcgtgggacagaacaatacccagtgtcgtgtcctctctgacgctcgtgaccagcacgggcaaaacacacgggcctttcggaacgcagctgggagccgcgttccaggttccggtgcagagcgacagcaggatcgttggcttcttcgcccacggagacaattacatcgaagcaattggcgcctacgtgaagaaattgacagaatccagcaaccgttaactcttggaacaacttgcagctgttcacactgtttcttgggccattgctccttaaatttagtccagatggccaaggagcaaccaaacagaaatcgctatggcagggaagatggactaaactggactgtggcacctccagcatagcctgctcttagattagtgaccagacatcatcgagatatttcgatattataataaatgaggaacccatctcagatgtttatgttagctcctcagtttttgcttctgaatgattaatttagatcttccttatttttgcaataaatgaggattcttttctgtctcttctgaatggatacgaatcatgcatcacgtatcagtgcacctattgcagtgaggagatgaggacaaggtgctgacgaacttattgtcctgagctcccacttgagtttctgattgctgctttacaactttggtctatacgtgttgttccatcactagcctagtgaagcctgaaaacgtgtctgcatgctttagaaaaagactgcttccatccttacaatttccaggatatatccttacaaattcccaaactgggtgacgtcgaaaaggtgatctatagcatgacgttttgcagtgcctgtcagaggcaaaaaa

SEQ ID NO: 38730 - DNA, 3222 bp, Zea Mays
acgacacagatcggcagccgtccatccctttccagctctccagagcctccgccggcgcatccggcgactgatttgcagggcgtatgtgttggaaatgctcagctgctagtttttcctggtagatcatcaagtcttgagagcagttaaaacaaaccaatttttcctgcaagagctctacgtgctatggagacagcaaatacattttcctttggttcacttcaattttgacggagtgcttgaagatggctttgttgccgtcaagaagttatactcgtatattgcaattgaagacgaaccatttcatcgtgaggttgattgtctaatgaatattaggcaccacaacatagtcttgtttgttggttactgtgctgaaacacaggaagtggttgtgcgtcaagaagggaaacatatttttgcggaaaaacgagaaagattactttgcttcgagtatttgcataatggaagccttcacaagcatctgacagccgaaccatgtgggcttccatggcacatttgttaccaaataataaaagggatttgcctgggcttgcactacctacatgacaagaacataattcatctagatctgaaaccggacaatatattgcttgatgatgacatggtgcccaaaatcacggacttcggtttgtcaagactcttgggtaatggaaaaagccacaccattacacaaacaagaataggaacatggggttacatggcacccgagtacttggatgatggagtgatcacaatgaagacagacatctatagcttgggtgtgataatcagacacatggtgaagggacgtaactcggcagacaccactgatgaagaagtactggcaaactggttgattaggctggaaaaggatccatcacagatgatgaggcagcagacgacccgattattatttgaaacagagtacaaagagcaaataaaagcgtgcatggatatatcatggaggtgcacgctgcgtaaaccaatggacaggccaacgacgcagcacatcctacttacactggaggaaacagaagcaaagatcaaatcggtcgttgggcctactccaccaaatgccgggcagcttcagattgccaaatttgggccgtggggtggagatggagggaagacgcgagacataagaatgacgccttgccatttgcatagcgtaacaattagcagtggaactattatcgattctatcgggttttcattcactgatcactatggtcagcaccacacaacagggccttggggcggtaaggagggtacgaataagattgaactaggcccttcggagtttcttacaggagtatctggaacaagcggcccattcaaaaatctaacaaatgttgtaacgtcacttacgtttgtcaccaatactcgtagttacggaccctttggaaaagggcgaggaacaccgttccacatccaaacgcagaacaacggcaggatcgttggcttctttggccgttctggccagtatctctatgcgattggggtctacacgaaccaagatgctagggtcgcaaggatcgggcgacctttgggtggagatgaaggggttcttcatggcatcacagacctcagtgggcagcagcgcagcagaggtggaggtccatcgggagaatgtggagacagcgacgacgagcccaacggtgatttcgccaaattcggcccgtggggcggcgacggaggacagccgcaggacatcggaacactaccctgccgtctagacaggatcaagatcagcagtgggcttatcatcgactcgatcgagttctcgtacgctggccctgacagccagtaccgcaccgcaggcccttggggtggtcatggaggagacaacagctcttttcagctagctggttcagagttccttacaggtgtgtctgggtcaatcggcacattcaacggccatgcaaacgtcataacgtctctgacgttcgtcaccaacgctcgtagctacgggccgtttggaagagggcgaggcacatccttccacatcccagtgcagggcaatggctgcatcgtcggtttctttgggcgctccggacggtacctcaacgcgatcggtgtctacacggcgccgaaacccgaaccaaaagcagttgggaaacaagatggtggtgatgaggccgtcgtcgccaggattgggccttggggcggggttggaaatgctctccatgacatcgcagagaggccgcatcgcctgcacagagtgacgatcttcagcgggacgatcgtaaactcgctggagtatctgtacagcgatggcgacgggcagcagcacaccaccggtccgtggggcggctgcggaggaactggtcgaaagattcatcttgcccctgaagagttcatagtggaagttactgggacattccatccatgcgcgtgggacagaacaatacccagtgtcgtgtcctctctgacgctcgtgaccagcacgggcaaaacacacgggcctttcggaacgcagctgggagccgcgttccaggttccggtgcagagcgacagcaggatcgttggcttcttcgcccacggagacaattacatcgaagcaattggcgcctacgtgaagaaattgacagaatccagcaaccgttaactcttggaacaacttgcagctgttcacactgtttcttgggccattgctccttaaatttagtccagatggccaaggagcaaccaaacagaaatcgctatggcagggaagatggactaaactggactgtggcacctccagcatagcctgctcttagattagtgaccagacatcatcgagatatttcgatattataataaatgaggaacccatctcagatgtttatgttagctcctcagtttttgcttctgaatgattaatttagatcttccttatttttgcaataaatgaggattcttttctgtctcttctgaatggatacgaatcatgcatcacgtatcagtgcacctattgcagtgaggagatgaggacaaggtgctgacgaacttattgtcctgagctcccacttgagtttctgattgctgctttacaactttggtctatacgtgttgttccatcactagcctagtgaagcctgaaaacgtgtctgcatgctttagaaaaagactgcttccatccttacaatttccaggatatatccttacaaattcccaaactgggtgacgtcgaaaaggtgatctatagcatgacgttttgcagtgcctgtcagaggcaaaaaa

SEQ ID NO: 38731 - DNA, 4620 bp, Zea Mays
cacagatcggcagccgtccatccctttccagctctccagagcctccgccggcgcatccggcgactgatttgcagggcgtatgtgttggaaatgctcagctgctagtttttcctggtagatcatcaagtcttgagagcagttaaaacaaaccaatttttcctgcaagagctctacgtgctatggagacagcaaatacattttcctttggttcacttcaattttgacatgatgttgttatcttcctcaagccggctactagtgatatgctttcatcatggatgtgcttcacttgtttgggggaggcttctggtcttaaaaacaatgtgcaaaaaactagtgattttcctataaggtgtgaagattaatacttgatggtcattcaaggccttctgccatgcaacatcttgagcttgataggattgccaattagctacagaggtggaaggctaacttaataacaagggctagcaggagggtttgagtttagtttgtgctcataggaatgttgatctactttgctatgactactgacattcctccttgggttttcaaagcaattgataaaatcagacaaagatttctatggaggagaaggaaggatgccaaaggcgggcactgcctcgtggcgtggggaaaggtttgtcacccccttgagcttggcggccttggtatttcaagtcttctagagctatcttgggcactccgcatgagatggctttggctccaaaaaactgagtcaaataaaccatgggctgatttacctatccaagtcctagccaaagcctaggtgcttttttctattgctctgatttctaaggttggggacggcacatccaccctattctggactaatcgttggttgatggggcaaaatatcatggaagtggcaccaaggttgtttgctgcttgttcctaagagaattacaagaaggagaattgttcttgaagccctcactaatcatcactggattttggatgttcaagttgctttaacaattcaagtaattgtggattatatctagattcgggactgtctcagtcaggtggagttacagcagggggtggctgattctcacatccagttctcgcgtaatggaagatattcagccaaaatggcatatgcgggtttttttgttggctcggttccttttgaaccttatgagaagatttgatgttcatggccccttcctaaatataaatgttttctgtggttggtgacgcacaacagatactggatggcaggcaggctggcttgtagaggcctcccggtgcctgctgtgtgactaggaagatgaaacagtcagccatgtgcttctttcttgtatgtttgcgtgagaattttggttcaaaatcctaaggccttatggcctgcagacccttgcaccataatctgaaggtaggagtttctttctctggtggacgcaggctgaagagagaactaaggggttgacaagaaaaggtttcaactccctcgtcatcctgggagcttgaactctgtggaagatacgaaatggatgtctttgaaggcctctccccatcatatgatttcagcttctgctcactttggtgaagaaatagatttatggatgatggctcacgccaaaggattggtgttcctttcagccgtggctgaggattagtgggagtgcttgaagatggctttgttgccgtcaagaagttatactcgtatattgcaattgaagacgaaccatttcatcgtgaggttgattgtctaatgaatattaggcaccacaacatagtcttgtttgttggttactgtgctgaaacacaggaagtggttgtgcgtcaagaagggaaacatatttttgcggaaaaacgagaaagattactttgcttcgagtatttgcataatggaagccttcacaagcatctgacagccgaaccatgtgggcttccatggcacatttgttaccaaataataaaagggatttgcctgggcttgcactacctacatgacaagaacataattcatctagatctgaaaccggacaatatattgcttgatgatgacatggtgcccaaaatcacggacttcggtttgtcaagactcttgggtaatggaaaaagccacaccattacacaaacaagaataggaacatggggttacatggcacccgagtacttggatgatggagtgatcacaatgaagacagacatctatagcttgggtgtgataatcagacacatggtgaagggacgtaactcggcagacaccactgatgaagaagtactggcaaactggttgattaggctggaaaaggatccatcacagatgatgaggcagcagacgacccgattattatttgaaacagagtacaaagagcaaataaaagcgtgcatggatatatcatggaggtgcacgctgcgtaaaccaatggacaggccaacgacgcagcacatcctacttacactggaggaaacagaagcaaagatcaaatcggtcgttgggcctactccaccaaatgccgggcagcttcagattgccaaatttgggccgtggggtggagatggagggaagacgcgagacataagaatgacgccttgccatttgcatagcgtaacaattagcagtggaactattatcgattctatcgggttttcattcactgatcactatggtcagcaccacacaacagggccttggggcggtaaggagggtacgaataagattgaactaggcccttcggagtttcttacaggagtatctggaacaagcggcccattcaaaaatctaacaaatgttgtaacgtcacttacgtttgtcaccaatactcgtagttacggaccctttggaaaagggcgaggaacaccgttccacatccaaacgcagaacaacggcaggatcgttggcttctttggccgttctggccagtatctctatgcgattggggtctacacgaaccaagatgctagggtcgcaaggatcgggcgacctttgggtggagatgaaggggttcttcatggcatcacagacctcagtgggcagcagcgcagcagaggtggaggtccatcgggagaatgtggagacagcgacgacgagcccaacggtgatttcgccaaattcggcccgtggggcggcgacggaggacagccgcaggacatcggaacactaccctgccgtctagacaggatcaagatcagcagtgggcttatcatcgactcgatcgagttctcgtacgctggccctgacagccagtaccgcaccgcaggcccttggggtggtcatggaggagacaacagctcttttcagctagctggttcagagttccttacaggtgtgtctgggtcaatcggcacattcaacggccatgcaaacgtcataacgtctctgacgttcgtcaccaacgctcgtagctacgggccgtttggaagagggcgaggcacatccttccacatcccagtgcagggcaatggctgcatcgtcggtttctttgggcgctccggacggtacctcaacgcgatcggtgtctacacggcgccgaaacccgaaccaaaagcaggtggtgatgaggccgtcgtcgccaggattgggccttggggcggggttggaaatgctctccatgacatcgcagagaggccgcatcgcctgcacagagtgacgatcttcagcgggacgatcgtaaactcgctggagtatctgtacagcgatggcgacgggcagcagcacaccaccggtccgtggggcggctgcggaggaactggtcgaaagattcatcttgcccctgaagagttcatagtggaagttactgggacattccatccatgcgcgtgggacagaacaatacccagtgtcgtgtcctctctgacgctcgtgaccagcacgggcaaaacacacgggcctttcggaacgcagctgggagccgcgttccaggttccggtgcagagcgacagcaggatcgttggcttcttcgcccacggagacaattacatcgaagcaattggcgcctacgtgaagaaattgacagaatccagcaaccgttaactcttggaacaacttgcagctgttcacactgtttcttgggccattgctccttaaatttagtccagatggccaaggagcaaccaaacagaaatcgctatggcagggaagatggactaaactggactgtggcacctccagcatagcctgctcttagattagtgaccagacatcatcgagatatttcgatattataataaatgaggaacccatctcagatgtttatgttagctcctcagtttttgcttctgaatgattaatttagatcttccttatttttgcaataaatgaggattcttttctgtctcttctgaatggatacgaatcatgcatcacgtatcagtgcacctattgcagtgaggagatgaggacaaggtgctgacgaacttattgtcctgagctcccacttgagtttctgattgctgctttacaactttggtctatacgtgttgttccatcactagcctagtgaagcctgaaaacgtgtctgcatgctttagaaaaagactgcttccatccttacaatttccaggatatatccttacaaattcccaaactgggtgacgtcgaaaaggtgatctatagcatgacgttttgcagtgcctgtcagaggcaaaaaa

SEQ ID NO: 38732 - DNA, 3061 bp, Zea Mays
cacagatcggcagccgtccatccctttccagctctccagagcctccgccggcgcatccggcgactgatttgcagggagtgcttgaagatggctttgttgccgtcaagaagttatactcgtatattgcaattgaagacgaaccatttcatcgtgaggttgattgtctaatgaatattaggcaccacaacatagtcttgtttgttggttactgtgctgaaacacaggaagtggttgtgcgtcaagaagggaaacatatttttgcggaaaaacgagaaagattactttgcttcgagtatttgcataatggaagccttcacaagcatctgacagccgaaccatgtgggcttccatggcacatttgttaccaaataataaaagggatttgcctgggcttgcactacctacatgacaagaacataattcatctagatctgaaaccggacaatatattgcttgatgatgacatggtgcccaaaatcacggacttcggtttgtcaagactcttgggtaatggaaaaagccacaccattacacaaacaagaataggaacatggggttacatggcacccgagtacttggatgatggagtgatcacaatgaagacagacatctatagcttgggtgtgataatcagacacatggtgaagggacgtaactcggcagacaccactgatgaagaagtactggcaaactggttgattaggctggaaaaggatccatcacagatgatgaggcagcagacgacccgattattatttgaaacagagtacaaagagcaaataaaagcgtgcatggatatatcatggaggtgcacgctgcgtaaaccaatggacaggccaacgacgcagcacatcctacttacactggaggaaacagaagcaaagatcaaatcggtcgttgggcctactccaccaaatgccgggcagattgccaaatttgggccgtggggtggagatggagggaagacgcgagacataagaatgacgccttgccatttgcatagcgtaacaattagcagtggaactattatcgattctatcgggttttcattcactgatcactatggtcagcaccacacaacagggccttggggcggtaaggagggtacgaataagattgaactaggcccttcggagtttcttacaggagtatctggaacaagcggcccattcaaaaatctaacaaatgttgtaacgtcacttacgtttgtcaccaatactcgtagttacggaccctttggaaaagggcgaggaacaccgttccacatccaaacgcagaacaacggcaggatcgttggcttctttggccgttctggccagtatctctatgcgattggggtctacacgaaccaagatgctagggtcgcaaggatcgggcgacctttgggtggagatgaaggggttcttcatggcatcacagacctcagtgggcagcagcgcagcagaggtggaggtccatcgggagaatgtggagacagcgacgacgagcccaacggtgatttcgccaaattcggcccgtggggcggcgacggaggacagccgcaggacatcggaacactaccctgccgtctagacaggatcaagatcagcagtgggcttatcatcgactcgatcgagttctcgtacgctggccctgacagccagtaccgcaccgcaggcccttggggtggtcatggaggagacaacagctcttttcagctagctggttcagagttccttacaggtgtgtctgggtcaatcggcacattcaacggccatgcaaacgtcataacgtctctgacgttcgtcaccaacgctcgtagctacgggccgtttggaagagggcgaggcacatccttccacatcccagtgcagggcaatggctgcatcgtcggtttctttgggcgctccggacggtacctcaacgcgatcggtgtctacacggcgccgaaacccgaaccaaaagcagttgggaaacaagatggtggtgatgaggccgtcgtcgccaggattgggccttggggcggggttggaaatgctctccatgacatcgcagagaggccgcatcgcctgcacagagtgacgatcttcagcgggacgatcgtaaactcgctggagtatctgtacagcgatggcgacgggcagcagcacaccaccggtccgtggggcggctgcggaggaactggtcgaaagattcatcttgcccctgaagagttcatagtggaagttactgggacattccatccatgcgcgtgggacagaacaatacccagtgtcgtgtcctctctgacgctcgtgaccagcacgggcaaaacacacgggcctttcggaacgcagctgggagccgcgttccaggttccggtgcagagcgacagcaggatcgttggcttcttcgcccacggagacaattacatcgaagcaattggcgcctacgtgaagaaattgacagaatccagcaaccgttaactcttggaacaacttgcagctgttcacactgtttcttgggccattgctccttaaatttagtccagatggccaaggagcaaccaaacagaaatcgctatggcagggaagatggactaaactggactgtggcacctccagcatagcctgctcttagattagtgaccagacatcatcgagatatttcgatattataataaatgaggaacccatctcagatgtttatgttagctcctcagtttttgcttctgaatgattaatttagatcttccttatttttgcaataaatgaggattcttttctgtctcttctgaatggatacgaatcatgcatcacgtatcagtgcacctattgcagtgaggagatgaggacaaggtgctgacgaacttattgtcctgagctcccacttgagtttctgattgctgctttacaactttggtctatacgtgttgttccatcactagcctagtgaagcctgaaaacgtgtctgcatgctttagaaaaagactgcttccatccttacaatttccaggatatatccttacaaattcccaaactgggtgacgtcgaaaaggtgatctatagcatgacgttttgcagtgcctgtcagaggcaaaaaa

SEQ ID NO: 38733 - DNA, 3765 bp, Zea Mays
cacagatcggcagccgtccatccctttccagctctccagagcctccgccggcgcatccggcgactgatttgcagggagtgcttgaagatggctttgttgccgtcaagaagttatactcgtatattgcaattgaagacgaaccatttcatcgtgaggttgattgtctaatgaatattaggcaccacaacatagtcttgtttgttggttactgtgctgaaacacaggaagtggttgtgcgtcaagaagggaaacatatttttgcggaaaaacgagaaagattactttgcttcgagtatttgcataatggaagccttcacaagcatctgacagccgaaccatgtgggcttccatggcacatttgttaccaaataataaaagggatttgcctgggcttgcactacctacatgacaagaacataattcatctagatctgaaaccggacaatatattgcttgatgatgacatggtgcccaaaatcacggacttcggtttgtcaagactcttgggtaatggaaaaagccacaccattacacaaacaagaataggaacatggggttacatggcacccgagtacttggatgatggagtgatcacaatgaagacagacatctatagcttgggtgtgataatcagacacatggtgaagggacgtaactcggcagacaccactgatgaagaagtactggcaaactggttgattaggctggaaaaggatccatcacagatgatgaggcagcagacgacccgattattatttgaaacagagtacaaagagcaaataaaagcgtgcatggatatatcatggaggtgcacgctgcgtaaaccaatggacaggccaacgacgcagcacatcctacttacactggaggaaacagaagcaaagatcaaatcggtcgttgggcctactccaccaaatgccgggcagcttcagattgccaaatttgggccgtggggtggagatggagggaagacgcgagacataagaatgacgccttgccatttgcatagcgtaacaattagcagtggaactattatcgattctatcgggttttcattcactgatcactatggtcagcaccacacaacagggccttggggcggtaaggagggtacgaataaggtgagcatcaaagaataacactttctgtactttaaatataaataatgttatttagacgtgtgcaacacaaacttaaatttgcatttgtgaatgttatcattgtttaagcttgggggactacatccaaatacattccagcatagcatgcacatccaaatacgggtagccagcatgatggtatgtgactagctccaaattactaagaaagaataacataccatgatagtactactacaatggtatatcattccctattttataaagcatgtcatctttggagaacttgctatggaataatggtggtaacaattggactcatatatatatatatatatacaattatatataaaagaataagtaaacaaggggttcttgaagacattcctaagttacaatttgaagtactaaaatttggtactcgagatgccgattttcacatgcttcttatgctttagtaacggtaattaaatcttgatttctctccaaggcggtagggctcaaagtcactaccgtctgactgctcatgactgtctttacaggaggatatttgtatgtgaaatagaaatactgtttctctttctctttctctttctcttgcagattgaactaggcccttcggagtttcttacaggagtatctggaacaagcggcccattcaaaaatctaacaaatgttgtaacgtcacttacgtttgtcaccaatactcgtagttacggaccctttggaaaagggcgaggaacaccgttccacatccaaacgcagaacaacggcaggatcgttggcttctttggccgttctggccagtatctctatgcgattggggtctacacgaaccaagatgtgctgcaaatctagctagtccatactagttttatcgatcttatttaatatttatgttttcattcaaacatttgcttattagtccggttcacttccaggctagggtcgcaaggatcgggcgacctttgggtggagatgaaggggttcttcatggcatcacagacctcagtgggcagcagcgcagcagaggtggaggtccatcgggagaatgtggagacagcgacgacgagcccaacggtgatttcgccaaattcggcccgtggggcggcgacggaggacagccgcaggacatcggaacactaccctgccgtctagacaggatcaagatcagcagtgggcttatcatcgactcgatcgagttctcgtacgctggccctgacagccagtaccgcaccgcaggcccttggggtggtcatggaggagacaacagctcttttcagctagctggttcagagttccttacaggtgtgtctgggtcaatcggcacattcaacggccatgcaaacgtcataacgtctctgacgttcgtcaccaacgctcgtagctacgggccgtttggaagagggcgaggcacatccttccacatcccagtgcagggcaatggctgcatcgtcggtttctttgggcgctccggacggtacctcaacgcgatcggtgtctacacggcgccgaaacccgaaccaaaagcagttgggaaacaagatggtggtgatgaggccgtcgtcgccaggattgggccttggggcggggttggaaatgctctccatgacatcgcagagaggccgcatcgcctgcacagagtgacgatcttcagcgggacgatcgtaaactcgctggagtatctgtacagcgatggcgacgggcagcagcacaccaccggtccgtggggcggctgcggaggaactggtcgaaagattcatcttgcccctgaagagttcatagtggaagttactgggacattccatccatgcgcgtgggacagaacaatacccagtgtcgtgtcctctctgacgctcgtgaccagcacgggcaaaacacacgggcctttcggaacgcagctgggagccgcgttccaggttccggtgcagagcgacagcaggatcgttggcttcttcgcccacggagacaattacatcgaagcaattggcgcctacgtgaagaaattgacagaatccagcaaccgttaactcttggaacaacttgcagctgttcacactgtttcttgggccattgctccttaaatttagtccagatggccaaggagcaaccaaacagaaatcgctatggcagggaagatggactaaactggactgtggcacctccagcatagcctgctcttagattagtgaccagacatcatcgagatatttcgatattataataaatgaggaacccatctcagatgtttatgttagctcctcagtttttgcttctgaatgattaatttagatcttccttatttttgcaataaatgaggattcttttctgtctcttctgaatggatacgaatcatgcatcacgtatcagtgcacctattgcagtgaggagatgaggacaaggtgctgacgaacttattgtcctgagctcccacttgagtttctgattgctgctttacaactttggtctatacgtgttgttccatcactagcctagtgaagcctgaaaacgtgtctgcatgctttagaaaaagactgcttccatccttacaatttccaggatatatccttacaaattcccaaactgggtgacgtcgaaaaggtgatctatagcatgacgttttgcagtgcctgtcagaggcaaaaaa

SEQ ID NO: 38734 - DNA, 6137 bp, Zea Mays
cacagatcggcagccgtccatccctttccagctctccagagcctccgccggcgcatccggcgactgatttgcagggcgtatgtgttggaaatgctcagctgctagtttttcctggtagatcatcaagtcttgagagcagttaaaacaaaccaatttttcctgcaagagctctacgtgctatggagacagcaaatacattttcctttggttcacttcaattttgacgtacataatcttttattttcattgccaacattgttttcttgattttctgcctttatatcttcttgattaaaactttttgatcgataattctagttctagacaaaatatgaagctagttattttcctatgaactgaatgtttattctgatacccaaagacctcccttcaaacatagtctgtcttaaactattccactttattcatgcatgttgcttgtgctcagacagtactattgccatgaagcaaagtctgtcttaaattattccactttattcatgcatgttgcttgtgctcagacagtactattggtatagtgactagccgtctagcactatattaatttattcttttctgaagacaatctaagcacacgggtgccctacccggtgctacattcggtacatggcatccggtgtacaccgtagtatccactatccagtgctatctgctgtgatgtttttccttacaatatcaaggatatcatttctattattttgttttcattcagctctctaatgagacaaaaatagttcaggggcagatatgtcattttacatgccaagacagagaatccatttaaaaaatcaggattgccaaacattcagcttttctagacaacaaattctctggaaagcgtcttctcaggaaatcaggcttttcagataagcgtttctcagaaaagtggatccaaacagggcctaaattagtgtatctacatgcagctcaatcaaaaactggatcttggatttaaaatccattattcacttctcaaaattagcaaatttaactaagttttactatagatggttcagtgacagtaagctaattgatgcaaataagtgagtctagatgtatgtgcggacccatgttcaaaccgcgcacctgcaactaaacatcacattcccacaatgtgctgttgaatggaatcccagaagaagccacatttcatagatgatgttgttatcttcctcaagccggctactagtgatatgctttcatcatggatgtgcttcacttgtttgggggaggcttctggtcttaaaaacaatgtgcaaaaaactagtgattttcctataaggtgtgaagattaatacttgatggtcattcaaggccttctgccatgcaacatcttgagcttgataggattgccaattagctacagaggtggaaggctaacttaataacaagggctagcaggagggtttgagtttagtttgtgctcataggaatgttgatctactttgctatgactactgacattcctccttgggttttcaaagcaattgataaaatcagacaaagatttctatggaggagaaggaaggatgccaaaggcgggcactgcctcgtggcgtggggaaaggtttgtcacccccttgagcttggcggccttggtatttcaagtcttctagagctatcttgggcactccgcatgagatggctttggctccaaaaaactgagtcaaataaaccatgggctgatttacctatccaagtcctagccaaagcctaggtgcttttttctattgctctgatttctaaggttggggacggcacatccaccctattctggactaatcgttggttgatggggcaaaatatcatggaagtggcaccaaggttgtttgctgcttgttcctaagagaattacaagaaggagaattgttcttgaagccctcactaatcatcactggattttggatgttcaagttgctttaacaattcaagtaattgtggattatatctagattcgggactgtctcagtcaggtggagttacagcagggggtggctgattctcacatccagttctcgcgtaatggaagatattcagccaaaatggcatatgcgggtttttttgttggctcggttccttttgaaccttatgagaagatttgatgttcatggccccttcctaaatataaatgttttctgtggttggtgacgcacaacagatactggatggcaggcaggctggcttgtagaggcctcccggtgcctgctgtgtgactaggaagatgaaacagtcagccatgtgcttctttcttgtatgtttgcgtgagaattttggttcaaaatcctaaggccttatggcctgcagacccttgcaccataatctgaaggtaggagtttctttctctggtggacgcaggctgaagagagaactaaggggttgacaagaaaaggtttcaactccctcgtcatcctgggagcttgaactctgtggaagatacgaaatggatgtctttgaaggcctctccccatcatatgatttcagcttctgctcactttggtgaagaaatagatttatggatgatggctcacgccaaaggattggtgttcctttcagccgtggctgaggattagtggtagttggtctgctataatctatgcctatgaataatcctttcttgtataagaggttttggccaccatgagctagccatttgagttttgtaaggcctttatacgtttcttcttagtataatgatacgtagttctcctgcgtctttgagaaaaaaagttctaacgaaattcactagaatttatttgatgtggcacattttgatatcaggtacttcttgaagattatatatagctcatttaaatgtgtgatccatgtcaaaaggtggacctgattaactgattttgaaaacattatattcacaccttaaattattaaatttgtttcaaggccaagtagcaatgtatatacacccaaatgcgtctctaccaaatttgaaatgtcttatcataaaattcaagctctaggtccatatagatctcattctctaaaaattgatccatatagatctatccctacatgtaaacaaaacctagtcatgcatacctatgatttattccaacaaggcgcccacaaaaataaatgatcaaatattttatcagaatttacatatcatttcttttttctagtcattgtaatctgtactattcaatagacacatgtttgtgaaaattatagagatgcaaggcaggttatccgtaaacccgtaaatagactaaatttttacgagttacccacaaatttgcaaaagattagcctatttgtgggtttatggacaacccgacttgcatccctcaaatattacataaaaaaactgagggtggttgaaaacatacagggagtgcttgaagatggctttgttgccgtcaagaagttatactcgtatattgcaattgaagacgaaccatttcatcgtgaggttgattgtctaatgaatattaggcaccacaacatagtcttgtttgttggttactgtgctgaaacacaggaagtggttgtgcgtcaagaagggaaacatatttttgcggaaaaacgagaaagattactttgcttcgagtatttgcataatggaagccttcacaagcatctgacaggggttacatggcacccgagtacttggatgatggagtgatcacaatgaagacagacatctatagcttgggtgtgataatcagacacatggtgaagggacgtaactcggcagacaccactgatgaagaagtactggcaaactggttgattaggctggaaaaggatccatcacagatgatgaggcagcagacgacccgattattatttgaaacagagtacaaagagcaaataaaagcgtgcatggatatatcatggaggtgcacgctgcgtaaaccaatggacaggccaacgacgcagcacatcctacttacactggaggaaacagaagcaaagatcaaatcggtcgttgggcctactccaccaaatgccgggcagcttcagattgccaaatttgggccgtggggtggagatggagggaagacgcgagacataagaatgacgccttgccatttgcatagcgtaacaattagcagtggaactattatcgattctatcgggttttcattcactgatcactatggtcagcaccacacaacagggccttggggcggtaaggagggtacgaataagattgaactaggcccttcggagtttcttacaggagtatctggaacaagcggcccattcaaaaatctaacaaatgttgtaacgtcacttacgtttgtcaccaatactcgtagttacggaccctttggaaaagggcgaggaacaccgttccacatccaaacgcagaacaacggcaggatcgttggcttctttggccgttctggccagtatctctatgcgattggggtctacacgaaccaagatgctagggtcgcaaggatcgggcgacctttgggtggagatgaaggggttcttcatggcatcacagacctcagtgggcagcagcgcagcagaggtggaggtccatcgggagaatgtggagacagcgacgacgagcccaacggtgatttcgccaaattcggcccgtggggcggcgacggaggacagccgcaggacatcggaacactaccctgccgtctagacaggatcaagatcagcagtgggcttatcatcgactcgatcgagttctcgtacgctggccctgacagccagtaccgcaccgcaggcccttggggtggtcatggaggagacaacagctcttttcagctagctggttcagagttccttacaggtgtgtctgggtcaatcggcacattcaacggccatgcaaacgtcataacgtctctgacgttcgtcaccaacgctcgtagctacgggccgtttggaagagggcgaggcacatccttccacatcccagtgcagggcaatggctgcatcgtcggtttctttgggcgctccggacggtacctcaacgcgatcggtgtctacacggcgccgaaacccgaaccaaaagcagttgggaaacaagatggtggtgatgaggccgtcgtcgccaggattgggccttggggcggggttggaaatgctctccatgacatcgcagagaggccgcatcgcctgcacagagtgacgatcttcagcgggacgatcgtaaactcgctggagtatctgtacagcgatggcgacgggcagcagcacaccaccggtccgtggggcggctgcggaggaactggtcgaaagattcatcttgcccctgaagagttcatagtggaagttactgggacattccatccatgcgcgtgggacagaacaatacccagtgtcgtgtcctctctgacgctcgtgaccagcacgggcaaaacacacgggcctttcggaacgcagctgggagccgcgttccaggttccggtgcagagcgacagcaggatcgttggcttcttcgcccacggagacaattacatcgaagcaattggcgcctacgtgaagaaattgacagaatccagcaaccgttaactcttggaacaacttgcagctgttcacactgtttcttgggccattgctccttaaatttagtccagatggccaaggagcaaccaaacagaaatcgctatggcagggaagatggactaaactggactgtggcacctccagcatagcctgctcttagattagtgaccagacatcatcgagatatttcgatattataataaatgaggaacccatctcagatgtttatgttagctcctcagtttttgcttctgaatgattaatttagatcttccttatttttgcaataaatgaggattcttttctgtctcttctgaatggatacgaatcatgcatcacgtatcagtgcacctattgcagtgaggagatgaggacaaggtgctgacgaacttattgtcctgagctcccacttgagtttctgattgctgctttacaactttggtctatacgtgttgttccatcactagcctagtgaagcctgaaaacgtgtctgcatgctttagaaaaagactgcttccatccttacaatttccaggatatatccttacaaattcccaaactgggtgacgtcgaaaaggtgatctatagcatgacgttttgcagtgcctgtcagaggcaaaaaa

SEQ ID NO: 38735 - DNA, 3121 bp, Zea Mays
cacagatcggcagccgtccatccctttccagctctccagagcctccgccggcgcatccggcgactgatttgcagggagtgcttgaagatggctttgttgccgtcaagaagttatactcgtatattgcaattgaagacgaaccatttcatcgtgaggttgattgtctaatgaatattaggcaccacaacatagtcttgtttgttggttactgtgctgaaacacaggaagtggttgtgcgtcaagaagggaaacatatttttgcggaaaaacgagaaagattactttgcttcgagtatttgcataatggaagccttcacaagcatctgacagccgaaccatgtgggcttccatggcacatttgttaccaaataataaaagggatttgcctgggcttgcactacctacatgacaagaacataattcatctagatctgaaaccggacaatatattgcttgatgatgacatggtgcccaaaatcacggacttcggtttgtcaagactcttgggtaatggaaaaagccacaccattacacaaacaagaataggaacatggggttacatggcacccgagtacttggatgatggagtgatcacaatgaagacagacatctatagcttgggtgtgataatcagacacatggtgaagggacgtaactcggcagacaccactgatgaagaagtactggcaaactggttgattaggctggaaaaggatccatcacagatgatgaggcagcagacgacccgattattatttgaaacagagtacaaagagcaaataaaagcgtgcatggatatatcatggaggtgcacgctgcgtaaaccaatggacaggccaacgacgcagcacatcctacttacactggaggaaacagaagcaaagatcaaatcggtcgttgggcctactccaccaaatgccgggcagcttcagattgccaaatttgggccgtggggtggagatggagggaagacgcgagacataagaatgacgccttgccatttgcatagcgtaacaattagcagtggaactattatcgattctatcgggttttcattcactgatcactatggtcagcaccacacaacagggccttggggcggtaaggagggtacgaataagcttgggggactacatccaaatacattccagcatagcatgcacatccaaatacgggtagccagcatgatgattgaactaggcccttcggagtttcttacaggagtatctggaacaagcggcccattcaaaaatctaacaaatgttgtaacgtcacttacgtttgtcaccaatactcgtagttacggaccctttggaaaagggcgaggaacaccgttccacatccaaacgcagaacaacggcaggatcgttggcttctttggccgttctggccagtatctctatgcgattggggtctacacgaaccaagatgctagggtcgcaaggatcgggcgacctttgggtggagatgaaggggttcttcatggcatcacagacctcagtgggcagcagcgcagcagaggtggaggtccatcgggagaatgtggagacagcgacgacgagcccaacggtgatttcgccaaattcggcccgtggggcggcgacggaggacagccgcaggacatcggaacactaccctgccgtctagacaggatcaagatcagcagtgggcttatcatcgactcgatcgagttctcgtacgctggccctgacagccagtaccgcaccgcaggcccttggggtggtcatggaggagacaacagctcttttcagctagctggttcagagttccttacaggtgtgtctgggtcaatcggcacattcaacggccatgcaaacgtcataacgtctctgacgttcgtcaccaacgctcgtagctacgggccgtttggaagagggcgaggcacatccttccacatcccagtgcagggcaatggctgcatcgtcggtttctttgggcgctccggacggtacctcaacgcgatcggtgtctacacggcgccgaaacccgaaccaaaagcaggtggtgatgaggccgtcgtcgccaggattgggccttggggcggggttggaaatgctctccatgacatcgcagagaggccgcatcgcctgcacagagtgacgatcttcagcgggacgatcgtaaactcgctggagtatctgtacagcgatggcgacgggcagcagcacaccaccggtccgtggggcggctgcggaggaactggtcgaaagattcatcttgcccctgaagagttcatagtggaagttactgggacattccatccatgcgcgtgggacagaacaatacccagtgtcgtgtcctctctgacgctcgtgaccagcacgggcaaaacacacgggcctttcggaacgcagctgggagccgcgttccaggttccggtgcagagcgacagcaggatcgttggcttcttcgcccacggagacaattacatcgaagcaattggcgcctacgtgaagaaattgacagaatccagcaaccgttaactcttggaacaacttgcagctgttcacactgtttcttgggccattgctccttaaatttagtccagatggccaaggagcaaccaaacagaaatcgctatggcagggaagatggactaaactggactgtggcacctccagcatagcctgctcttagattagtgaccagacatcatcgagatatttcgatattataataaatgaggaacccatctcagatgtttatgttagctcctcagtttttgcttctgaatgattaatttagatcttccttatttttgcaataaatgaggattcttttctgtctcttctgaatggatacgaatcatgcatcacgtatcagtgcacctattgcagtgaggagatgaggacaaggtgctgacgaacttattgtcctgagctcccacttgagtttctgattgctgctttacaactttggtctatacgtgttgttccatcactagcctagtgaagcctgaaaacgtgtctgcatgctttagaaaaagactgcttccatccttacaatttccaggatatatccttacaaattcccaaactgggtgacgtcgaaaaggtgatctatagcatgacgttttgcagtgcctgtcagaggcaaaaaa

SEQ ID NO: 38736 - DNA, 5815 bp, Zea Mays
cagccgtccatccctttccagctctccagagcctccgccggcgcatccggcgactgatttgcagggcgtatgtgttggaaatgctcagctgctagtttttcctggtagatcatcaagtcttgagagcagttaaaacaaaccaatttttcctgcaagagctctacgtgctatggagacagcaaatacattttcctttggttcacttcaattttgacgtacataatcttttattttcattgccaacattgttttcttgattttctgcctttatatcttcttgattaaaactttttgatcgataattctagttctagacaaaatatgaagctagttattttcctatgaactgaatgtttattctgatacccaaagacctcccttcaaacatagtctgtcttaaactattccactttattcatgcatgttgcttgtgctcagacagtactattgccatgaagcaaagtctgtcttaaattattccactttattcatgcatgttgcttgtgctcagacagtactattggtatagtgactagccgtctagcactatattaatttattcttttctgaagacaatctaagcacacgggtgccctacccggtgctacattcggtacatggcatccggtgtacaccgtagtatccactatccagtgctatctgctgtgatgtttttccttacaatatcaaggatatcatttctattattttgttttcattcagctctctaatgagacaaaaatagttcaggggcagatatgtcattttacatgccaagacagagaatccatttaaaaaatcaggattgccaaacattcagcttttctagacaacaaattctctggaaagcgtcttctcaggaaatcaggcttttcagataagcgtttctcagaaaagtggatccaaacagggcctaaattagtgtatctacatgcagctcaatcaaaaactggatcttggatttaaaatccattattcacttctcaaaattagcaaatttaactaagttttactatagatggttcagtgacagtaagctaattgatgcaaataagtgagtctagatgtatgtgcggacccatgttcaaaccgcgcacctgcaactaaacatcacattcccacaatgtgctgttgaatggaatcccagaagaagccacatttcataggtgtgacctttggcagggtgatcccttatcacctatgttatttattctgattatagacgctttggtttatttggttaaaaaggctgaagaggatgggctgcttcagcccctgtcttcaaaggttcttcaacaccagatttctctatatgcagatgatgttgttatcttcctcaagccggctactagtgatatgctttcatcatggatgtgcttcacttgtttgggggaggcttctggtcttaaaaacaatgtgcaaaaaactagtgattttcctataaggtgtgaagattaatacttgatggtcattcaaggccttctgccatgcaacatcttgagcttgataggattgccaattagctacagaggtggaaggctaacttaataacaagggctagcaggagggtttgagtttagtttgtgctcataggaatgttgatctactttgctatgactactgacattcctccttgggttttcaaagcaattgataaaatcagacaaagatttctatggaggagaaggaaggatgccaaaggcgggcactgcctcgtggcgtggggaaaggtttgtcacccccttgagcttggcggccttggtatttcaagtcttctagagctatcttgggcactccgcatgagatggctttggctccaaaaaactgagtcaaataaaccatgggctgatttacctatccaagtcctagccaaagcctaggtgcttttttctattgctctgatttctaaggttggggacggcacatccaccctattctggactaatcgttggttgatggggcaaaatatcatggaagtggcaccaaggttgtttgctgcttgttcctaagagaattacaagaaggagaattgttcttgaagccctcactaatcatcactggattttggatgttcaagttgctttaacaattcaagtaattgtggattatatctagattcgggactgtctcagtcaggtggagttacagcagggggtggctgattctcacatccagttctcgcgtaatggaagatattcagccaaaatggcatatgcgggtttttttgttggctcggttccttttgaaccttatgagaagatttgatgttcatggccccttcctaaatataaatgttttctgtggttggtgacgcacaacagatactggatggcaggcaggctggcttgtagaggcctcccggtgcctgctgtgtgactaggaagatgaaacagtcagccatgtgcttctttcttgtatgtttgcgtgagaattttggttcaaaatcctaaggccttatggcctgcagacccttgcaccataatctgaaggtaggagtttctttctctggtggacgcaggctgaagagagaactaaggggttgacaagaaaaggtttcaactccctcgtcatcctgggagcttgaactctgtggaagatacgaaatggatgtctttgaaggcctctccccatcatatgatttcagcttctgctcactttggtgaagaaatagatttatggatgatggctcacgccaaaggattggtgttcctttcagccgtggctgaggattagtggtagttggtctgctataatctatgcctatgaataatcctttcttgtataagaggttttggccaccatgagctagccatttgagttttggagtgcttgaagatggctttgttgccgtcaagaagttatactcgtatattgcaattgaagacgaaccatttcatcgtgaggttgattgtctaatgaatattaggcaccacaacatagtcttgtttgttggttactgtgctgaaacacaggaagtggttgtgcgtcaagaagggaaacatatttttgcggaaaaacgagaaagattactttgcttcgagtatttgcataatggaagccttcacaagcatctgacagccgaaccatgtgggcttccatggcacatttgttaccaaataataaaagggatttgcctgggcttgcactacctacatgacaagaacataattcatctagatctgaaaccggacaatatattgcttgatgatgacatggtgcccaaaatcacggacttcggtttgtcaagactcttgggtaatggaaaaagccacaccattacacaaacaagaataggaacatggggttacatggcacccgagtacttggatgatggagtgatcacaatgaagacagacatctatagcttgggtgtgataatcagacacatggtgaagggacgtaactcggcagacaccactgatgaagaagtactggcaaactggttgattaggctggaaaaggatccatcacagatgatgaggcagcagacgacccgattattatttgaaacagagtacaaagagcaaataaaagcgtgcatggatatatcatggaggtgcacgctgcgtaaaccaatggacaggccaacgacgcagcacatcctacttacactggaggaaacagaagcaaagatcaaatcggtcgttgggcctactccaccaaatgccgggcagcttcagattgccaaatttgggccgtggggtggagatggagggaagacgcgagacataagaatgacgccttgccatttgcatagcgtaacaattagcagtggaactattatcgattctatcgggttttcattcactgatcactatggtcagcaccacacaacagggccttggggcggtaaggagggtacgaataagattgaactaggcccttcggagtttcttacaggagtatctggaacaagcggcccattcaaaaatctaacaaatgttgtaacgtcacttacgtttgtcaccaatactcgtagttacggaccctttggaaaagggcgaggaacaccgttccacatccaaacgcagaacaacggcaggatcgttggcttctttggccgttctggccagtatctctatgcgattggggtctacacgaaccaagatgctagggtcgcaaggatcgggcgacctttgggtggagatgaaggggttcttcatggcatcacagacctcagtgggcagcagcgcagcagaggtggaggtccatcgggagaatgtggagacagcgacgacgagcccaacggtgatttcgccaaattcggcccgtggggcggcgacggaggacagccgcaggacatcggaacactaccctgccgtctagacaggatcaagatcagcagtgggcttatcatcgactcgatcgagttctcgtacgctggccctgacagccagtaccgcaccgcaggcccttggggtggtcatggaggagacaacagctcttttcagctagctggttcagagttccttacaggtgtgtctgggtcaatcggcacattcaacggccatgcaaacgtcataacgtctctgacgttcgtcaccaacgctcgtagctacgggccgtttggaagagggcgaggcacatccttccacatcccagtgcagggcaatggctgcatcgtcggtttctttgggcgctccggacggtacctcaacgcgatcggtgtctacacggcgccgaaacccgaaccaaaagcagttgggaaacaagatggtggtgatgaggccgtcgtcgccaggattgggccttggggcggggttggaaatgctctccatgacatcgcagagaggccgcatcgcctgcacagagtgacgatcttcagcgggacgatcgtaaactcgctggagtatctgtacagcgatggcgacgggcagcagcacaccaccggtccgtggggcggctgcggaggaactggtcgaaagattcatcttgcccctgaagagttcatagtggaagttactgggacattccatccatgcgcgtgggacagaacaatacccagtgtcgtgtcctctctgacgctcgtgaccagcacgggcaaaacacacgggcctttcggaacgcagctgggagccgcgttccaggttccggtgcagagcgacagcaggatcgttggcttcttcgcccacggagacaattacatcgaagcaattggcgcctacgtgaagaaattgacagaatccagcaaccgttaactcttggaacaacttgcagctgttcacactgtttcttgggccattgctccttaaatttagtccagatggccaaggagcaaccaaacagaaatcgctatggcagggaagatggactaaactggactgtggcacctccagcatagcctgctcttagattagtgaccagacatcatcgagatatttcgatattataataaatgaggaacccatctcagatgtttatgttagctcctcagtttttgcttctgaatgattaatttagatcttccttatttttgcaataaatgaggattcttttctgtctcttctgaatggatacgaatcatgcatcacgtatcagtgcacctattgcagtgaggagatgaggacaaggtgctgacgaacttattgtcctgagctcccacttgagtttctgattgctgctttacaactttggtctatacgtgttgttccatcactagcctagtgaagcctgaaaacgtgtctgcatgctttagaaaaagactgcttccatccttacaatttccaggatatatccttacaaattcccaaactgggtgacgtcgaaaaggtgatctatagcatgacgttttgcagtgcctgtcagaggcaaaaaa

SEQ ID NO: 38737 - DNA, 6065 bp, Zea Mays
cagccgtccatccctttccagctctccagagcctccgccggcgcatccggcgactgatttgcagggcgtatgtgttggaaatgctcagctgctagtttttcctggtagatcatcaagtcttgagagcagttaaaacaaaccaatttttcctgcaagagctctacgtgctatggagacagcaaatacattttcctttggttcacttcaattttgacatgatgttgttatcttcctcaagccggctactagtgatatgctttcatcatggatgtgcttcacttgtttgggggaggcttctggtcttaaaaacaatgtgcaaaaaactagtgattttcctataaggtgtgaagattaatacttgatggtcattcaaggccttctgccatgcaacatcttgagcttgataggattgccaattagctacagaggtggaaggctaacttaataacaagggctagcaggagggtttgagtttagtttgtgctcataggaatgttgatctactttgctatgactactgacattcctccttgggttttcaaagcaattgataaaatcagacaaagatttctatggaggagaaggaaggatgccaaaggcgggcactgcctcgtggcgtggggaaaggtttgtcacccccttgagcttggcggccttggtatttcaagtcttctagagctatcttgggcactccgcatgagatggctttggctccaaaaaactgagtcaaataaaccatgggctgatttacctatccaagtcctagccaaagcctaggtgcttttttctattgctctgatttctaaggttggggacggcacatccaccctattctggactaatcgttggttgatggggcaaaatatcatggaagtggcaccaaggttgtttgctgcttgttcctaagagaattacaagaaggagaattgttcttgaagccctcactaatcatcactggattttggatgttcaagttgctttaacaattcaagtaattgtggattatatctagattcgggactgtctcagtcaggtggagttacagcagggggtggctgattctcacatccagttctcgcgtaatggaagatattcagccaaaatggcatatgcgggtttttttgttggctcggttccttttgaaccttatgagaagatttgatgttcatggccccttcctaaatataaatgttttctgtggttggtgacgcacaacagatactggatggcaggcaggctggcttgtagaggcctcccggtgcctgctgtgtgactaggaagatgaaacagtcagccatgtgcttctttcttgtatgtttgcgtgagaattttggttcaaaatcctaaggccttatggcctgcagacccttgcaccataatctgaaggtaggagtttctttctctggtggacgcaggctgaagagagaactaaggggttgacaagaaaaggtttcaactccctcgtcatcctgggagcttgaactctgtggaagatacgaaatggatgtctttgaaggcctctccccatcatatgatttcagcttctgctcactttggtgaagaaatagatttatggatgatggctcacgccaaaggattggtgttcctttcagccgtggctgaggattagtggtagttggtctgctataatctatgcctatgaataatcctttcttgtataagaggttttggccaccatgagctagccatttgagttttgtaaggcctttatacgtttcttcttagtataatgatacgtagttctcctgcgtctttgagaaaaaaagttctaacgaaattcactagaatttatttgatgtggcacattttgatatcaggtacttcttgaagattatatatagctcatttaaatgtgtgatccatgtcaaaaggtggacctgattaactgattttgaaaacattatattcacaccttaaattattaaatttgtttcaaggccaagtagcaatgtatatacacccaaatgcgtctctaccaaatttgaaatgtcttatcataaaattcaagctctaggtccatatagatctcattctctaaaaattgatccatatagatctatccctacatgtaaacaaaacctagtcatgcatacctatgatttattccaacaaggcgcccacaaaaataaatgatcaaatattttatcagaatttacatatcatttcttttttctagtcattgtaatctgtactattcaatagacacatgtttgtgaaaattatagagatgcaaggcaggttatccgtaaacccgtaaatagactaaatttttacgagttacccacaaatttgcaaaagattagcctatttgtgggtttatggacaacccgacttgcatccctcaaatattacataaaaaaactgagggtggttgaaaacatacagggagtgcttgaagatggctttgttgccgtcaagaagttatactcgtatattgcaattgaagacgaaccatttcatcgtgaggttgattgtctaatgaatattaggcaccacaacatagtcttgtttgttggttactgtgctgaaacacaggaagtggttgtgcgtcaagaagggaaacatatttttgcggaaaaacgagaaagattactttgcttcgagtatttgcataatggaagccttcacaagcatctgacaggggttacatggcacccgagtacttggatgatggagtgatcacaatgaagacagacatctatagcttgggtgtgataatcagacacatggtgaagggacgtaactcggcagacaccactgatgaagaagtactggcaaactggttgattaggctggaaaaggatccatcacagatgatgaggcagcagacgacccgattattatttgaaacagagtacaaagagcaaataaaagcgtgcatggatatatcatggaggtgcacgctgcgtaaaccaatggacaggccaacgacgcagcacatcctacttacactggaggaaacagaagcaaagatcaaatcggtcgttgggcctactccaccaaatgccgggcagcttcagattgccaaatttgggccgtggggtggagatggagggaagacgcgagacataagaatgacgccttgccatttgcatagcgtaacaattagcagtggaactattatcgattctatcgggttttcattcactgatcactatggtcagcaccacacaacagggccttggggcggtaaggagggtacgaataaggtgagcatcaaagaataacactttctgtactttaaatataaataatgttatttagacgtgtgcaacacaaacttaaatttgcatttgtgaatgttatcattgtttaagcttgggggactacatccaaatacattccagcatagcatgcacatccaaatacgggtagccagcatgatggtatgtgactagctccaaattactaagaaagaataacataccatgatagtactactacaatggtatatcattccctattttataaagcatgtcatctttggagaacttgctatggaataatggtggtaacaattggactcatatatatatatatatatacaattatatataaaagaataagtaaacaaggggttcttgaagacattcctaagttacaatttgaagtactaaaatttggtactcgagatgccgattttcacatgcttcttatgctttagtaacggtaattaaatcttgatttctctccaaggcggtagggctcaaagtcactaccgtctgactgctcatgactgtctttacaggaggatatttgtatgtgaaatagaaatactgtttctctttctctttctctttctcttgcagattgaactaggcccttcggagtttcttacaggagtatctggaacaagcggcccattcaaaaatctaacaaatgttgtaacgtcacttacgtttgtcaccaatactcgtagttacggaccctttggaaaagggcgaggaacaccgttccacatccaaacgcagaacaacggcaggatcgttggcttctttggccgttctggccagtatctctatgcgattggggtctacacgaaccaagatgtgctgcaaatctagctagtccatactagttttatcgatcttatttaatatttatgttttcattcaaacatttgcttattagtccggttcacttccaggctagggtcgcaaggatcgggcgacctttgggtggagatgaaggggttcttcatggcatcacagtaaaaccacattgcatgttaagaatggcagtttttaatggaactataaatttcatgagttcactgttgagtcttcatccaggacctcagtgggcagcagcgcagcagaggtggaggtccatcgggagaatgtggagacagcgacgacgagcccaacggtgatttcgccaaattcggcccgtggggcggcgacggaggacagccgcaggacatcggaacactaccctgccgtctagacaggatcaagatcagcagtgggcttatcatcgactcgatcgagttctcgtacgctggccctgacagccagtaccgcaccgcaggcccttggggtggtcatggaggagacaacagctcttttcagctagctggttcagagttccttacaggtgtgtctgggtcaatcggcacattcaacggccatgcaaacgtcataacgtctctgacgttcgtcaccaacgctcgtagctacgggccgtttggaagagggcgaggcacatccttccacatcccagtgcagggcaatggctgcatcgtcggtttctttgggcgctccggacggtacctcaacgcgatcggtgtctacacggcgccgaaacccgaaccaaaagcagttgggaaacaagatgtgtgctgtgctaatttattttagttataatttgtgtttgtgtttttttttgttggtttgttctgtccttgttttgtttgactcaaactggtttttgttactcgcacagggtggtgatgaggccgtcgtcgccaggattgggccttggggcggggttggaaatgctctccatgacatcgcagagaggccgcatcgcctgcacagagtgacgatcttcagcgggacgatcgtaaactcgctggagtatctgtacagcgatggcgacgggcagcagcacaccaccggtccgtggggcggctgcggaggaactggtcgaaagattcatcttgcccctgaagagttcatagtggaagttactgggacattccatccatgcgcgtgggacagaacaatacccagtgtcgtgtcctctctgacgctcgtgaccagcacgggcaaaacacacgggcctttcggaacgcagctgggagccgcgttccaggttccggtgcagagcgacagcaggatcgttggcttcttcgcccacggagacaattacatcgaagcaattggcgcctacgtgaagaaattgacagaatccagcaaccgttaactcttggaacaacttgcagctgttcacactgtttcttgggccattgctccttaaatttagtccagatggccaaggagcaaccaaacagaaatcgctatggcagggaagatggactaaactggactgtggcacctccagcatagcctgctcttagattagtgaccagacatcatcgagatatttcgatattataataaatgaggaacccatctcagatgtttatgttagctcctcagtttttgcttctgaatgattaatttagatcttccttatttttgcaataaatgaggattcttttctgtctcttctgaatggatacgaatcatgcatcacgtatcagtgcacctattgcagtgaggagatgaggacaaggtgctgacgaacttattgtcctgagctcccacttgagtttctgattgctgctttacaactttggtctatacgtgttgttccatcactagcctagtgaagcctgaaaacgtgtctgcatgctttagaaaaagactgcttccatccttacaatttccaggatatatccttacaaattcccaaactgggtgacgtcgaaaaggtgatctatagcatgacgttttgcagtgcctgtcagaggcaaaaaa

SEQ ID NO: 38738 - DNA, 6487 bp, Zea Mays
cagccgtccatccctttccagctctccagagcctccgccggcgcatccggcgactgatttgcagggcgtatgtgttggaaatgctcagctgctagtttttcctggtagatcatcaagtcttgagagcagttaaaacaaaccaatttttcctgcaagagctctacgtgctatggagacagcaaatacattttcctttggttcacttcaattttgacgtacataatcttttattttcattgccaacattgttttcttgattttctgcctttatatcttcttgattaaaactttttgatcgataattctagttctagacaaaatatgaagctagttattttcctatgaactgaatgtttattctgatacccaaagacctcccttcaaacatagtctgtcttaaactattccactttattcatgcatgttgcttgtgctcagacagtactattgccatgaagcaaagtctgtcttaaattattccactttattcatgcatgttgcttgtgctcagacagtactattggtatagtgactagccgtctagcactatattaatttattcttttctgaagacaatctaagcacacgggtgccctacccggtgctacattcggtacatggcatccggtgtacaccgtagtatccactatccagtgctatctgctgtgatgtttttccttacaatatcaaggatatcatttctattattttgttttcattcagctctctaatgagacaaaaatagttcaggggcagatatgtcattttacatgccaagacagagaatccatttaaaaaatcaggattgccaaacattcagcttttctagacaacaaattctctggaaagcgtcttctcaggaaatcaggcttttcagataagcgtttctcagaaaagtggatccaaacagggcctaaattagtgtatctacatgcagctcaatcaaaaactggatcttggatttaaaatccattattcacttctcaaaattagcaaatttaactaagttttactatagatggttcagtgacagtaagctaattgatgcaaataagtgagtctagatgtatgtgcggacccatgttcaaaccgcgcacctgcaactaaacatcacattcccacaatgtgctgttgaatggaatcccagaagaagccacatttcataggtgtgacctttggcagggtgatcccttatcacctatgttatttattctgattatagacgctttggtttatttggttaaaaaggctgaagaggatgggctgcttcagcccctgtcttcaaaggttcttcaacaccagatttctctatatgcagatgatgttgttatcttcctcaagccggctactagtgatatgctttcatcatggatgtgcttcacttgtttgggggaggcttctggtcttaaaaacaatgtgcaaaaaactagtgattttcctataaggtgtgaagattaatacttgatggtcattcaaggccttctgccatgcaacatcttgagcttgataggattgccaattagctacagaggtggaaggctaacttaataacaagggctagcaggagggtttgagtttagtttgtgctcataggaatgttgatctactttgctatgactactgacattcctccttgggttttcaaagcaattgataaaatcagacaaagatttctatggaggagaaggaaggatgccaaaggcgggcactgcctcgtggcgtggggaaaggtttgtcacccccttgagcttggcggccttggtatttcaagtcttctagagctatcttgggcactccgcatgagatggctttggctccaaaaaactgagtcaaataaaccatgggctgatttacctatccaagtcctagccaaagcctaggtgcttttttctattgctctgatttctaaggttggggacggcacatccaccctattctggactaatcgttggttgatggggcaaaatatcatggaagtggcaccaaggttgtttgctgcttgttcctaagagaattacaagaaggagaattgttcttgaagccctcactaatcatcactggattttggatgttcaagttgctttaacaattcaagtaattgtggattatatctagattcgggactgtctcagtcaggtggagttacagcagggggtggctgattctcacatccagttctcgcgtaatggaagatattcagccaaaatggcatatgcgggtttttttgttggctcggttccttttgaaccttatgagaagatttgatgttcatggccccttcctaaatataaatgttttctgtggttggtgacgcacaacagatactggatggcaggcaggctggcttgtagaggcctcccggtgcctgctgtgtgactaggaagatgaaacagtcagccatgtgcttctttcttgtatgtttgcgtgagaattttggttcaaaatcctaaggccttatggcctgcagacccttgcaccataatctgaaggtaggagtttctttctctggtggacgcaggctgaagagagaactaaggggttgacaagaaaaggtttcaactccctcgtcatcctgggagcttgaactctgtggaagatacgaaatggatgtctttgaaggcctctccccatcatatgatttcagcttctgctcactttggtgaagaaatagatttatggatgatggctcacgccaaaggattggtgttcctttcagccgtggctgaggattagtggtagttggtctgctataatctatgcctatgaataatcctttcttgtataagaggttttggccaccatgagctagccatttgagttttgtaaggcctttatacgtttcttcttagtataatgatacgtagttctcctgcgtctttgagaaaaaaagttctaacgaaattcactagaatttatttgatgtggcacattttgatatcaggtacttcttgaagattatatatagctcatttaaatgtgtgatccatgtcaaaaggtggacctgattaactgattttgaaaacattatattcacaccttaaattattaaatttgtttcaaggccaagtagcaatgtatatacacccaaatgcgtctctaccaaatttgaaatgtcttatcataaaattcaagctctaggtccatatagatctcattctctaaaaattgatccatatagatctatccctacatgtaaacaaaacctagtcatgcatacctatgatttattccaacaaggcgcccacaaaaataaatgatcaaatattttatcagaatttacatatcatttcttttttctagtcattgtaatctgtactattcaatagacacatgtttgtgaaaattatagagatgcaaggcaggttatccgtaaacccgtaaatagactaaatttttacgagttacccacaaatttgcaaaagattagcctatttgtgggtttatggacaacccgacttgcatccctcaaatattacataaaaaaactgagggtggttgaaaacatacagggagtgcttgaagatggctttgttgccgtcaagaagttatactcgtatattgcaattgaagacgaaccatttcatcgtgaggttgattgtctaatgaatattaggcaccacaacatagtcttgtttgttggttactgtgctgaaacacaggaagtggttgtgcgtcaagaagggaaacatatttttgcggaaaaacgagaaagattactttgcttcgagtatttgcataatggaagccttcacaagcatctgacagccgaaccatgtgggcttccatggcacatttgttaccaaataataaaagggatttgcctgggcttgcactacctacatgacaagaacataattcatctagatctgaaaccggacaatatattgcttgatgatgacatggtgcccaaaatcacggacttcggtttgtcaagactcttgggtaatggaaaaagccacaccattacacaaacaagaataggaacatggggttacatggcacccgagtacttggatgatggagtgatcacaatgaagacagacatctatagcttgggtgtgataatcagacacatggtgaagggacgtaactcggcagacaccactgatgaagaagtactggcaaactggttgattaggctggaaaaggatccatcacagatgatgaggcagcagacgacccgattattatttgaaacagagtacaaagagcaaataaaagcgtgcatggatatatcatggaggtgcacgctgcgtaaaccaatggacaggccaacgacgcagcacatcctacttacactggaggaaacagaagcaaagatcaaatcggtcgttgggcctactccaccaaatgccgggcagcttcagattgccaaatttgggccgtggggtggagatggagggaagacgcgagacataagaatgacgccttgccatttgcatagcgtaacaattagcagtggaactattatcgattctatcgggttttcattcactgatcactatggtcagcaccacacaacagggccttggggcggtaaggagggtacgaataagattgaactaggcccttcggagtttcttacaggagtatctggaacaagcggcccattcaaaaatctaacaaatgttgtaacgtcacttacgtttgtcaccaatactcgtagttacggaccctttggaaaagggcgaggaacaccgttccacatccaaacgcagaacaacggcaggatcgttggcttctttggccgttctggccagtatctctatgcgattggggtctacacgaaccaagatgctagggtcgcaaggatcgggcgacctttgggtggagatgaaggggttcttcatggcatcacagacctcagtgggcagcagcgcagcagaggtggaggtccatcgggagaatgtggagacagcgacgacgagcccaacggtgatttcgccaaattcggcccgtggggcggcgacggaggacagccgcaggacatcggaacactaccctgccgtctagacaggatcaagatcagcagtgggcttatcatcgactcgatcgagttctcgtacgctggccctgacagccagtaccgcaccgcaggcccttggggtggtcatggaggagacaacagctcttttcagctagctggttcagagttccttacaggtgtgtctgggtcaatcggcacattcaacggccatgcaaacgtcataacgtctctgacgttcgtcaccaacgctcgtagctacgggccgtttggaagagggcgaggcacatccttccacatcccagtgcagggcaatggctgcatcgtcggtttctttgggcgctccggacggtacctcaacgcgatcggtgtctacacggcgccgaaacccgaaccaaaagcaggtggtgatgaggccgtcgtcgccaggattgggccttggggcggggttggaaatgctctccatgacatcgcagagaggccgcatcgcctgcacagagtgacgatcttcagcgggacgatcgtaaactcgctggagtatctgtacagcgatggcgacgggcagcagcacaccaccggtccgtggggcggctgcggaggaactggtcgaaagattcatcttgcccctgaagagttcatagtggaagttactgggacattccatccatgcgcgtgggacagaacaatacccagtgtcgtgtcctctctgacgctcgtgaccagcacgggcaaaacacacgggcctttcggaacgcagctgggagccgcgttccaggttccggtgcagagcgacagcaggatcgttggcttcttcgcccacggagacaattacatcgaagcaattggcgcctacgtgaagaaattgacagaatccagcaaccgttaactcttggaacaacttgcagctgttcacactgtttcttgggccattgctccttaaatttagtccagatggccaaggagcaaccaaacagaaatcgctatggcagggaagatggactaaactggactgtggcacctccagcatagcctgctcttagattagtgaccagacatcatcgagatatttcgatattataataaatgaggaacccatctcagatgtttatgttagctcctcagtttttgcttctgaatgattaatttagatcttccttatttttgcaataaatgaggattcttttctgtctcttctgaatggatacgaatcatgcatcacgtatcagtgcacctattgcagtgaggagatgaggacaaggtgctgacgaacttattgtcctgagctcccacttgagtttctgattgctgctttacaactttggtctatacgtgttgttccatcactagcctagtgaagcctgaaaacgtgtctgcatgctttagaaaaagactgcttccatccttacaatttccaggatatatccttacaaattcccaaactgggtgacgtcgaaaaggtgatctatagcatgacgttttgcagtgcctgtcagaggcaaaaaa

SEQ ID NO: 38739 - DNA, 2980 bp, Zea Mays
gtccatccctttccagctctccagagcctccgccggcgcatccggcgactgatttgcagggcgtatgtgttggaaatgctcagctgctagtttttcctggtagatcatcaagtcttgagagcagttaaaacaaaccaatttttcctgcaagagctctacgtgctatggagacagcaaatacattttcctttggttcacttcaattttgacggagtgcttgaagatggctttgttgccgtcaagaagttatactcgtatattgcaattgaagacgaaccatttcatcgtgaggttgattgtctaatgaatattaggcaccacaacatagtcttgtttgttggttactgtgctgaaacacaggaagtggttgtgcgtcaagaagggaaacatatttttgcggaaaaacgagaaagattactttgcttcgagtatttgcataatggaagccttcacaagcatctgacaggggttacatggcacccgagtacttggatgatggagtgatcacaatgaagacagacatctatagcttgggtgtgataatcagacacatggtgaagggacgtaactcggcagacaccactgatgaagaagtactggcaaactggttgattaggctggaaaaggatccatcacagatgatgaggcagcagacgacccgattattatttgaaacagagtacaaagagcaaataaaagcgtgcatggatatatcatggaggtgcacgctgcgtaaaccaatggacaggccaacgacgcagcacatcctacttacactggaggaaacagaagcaaagatcaaatcggtcgttgggcctactccaccaaatgccgggcagcttcagattgccaaatttgggccgtggggtggagatggagggaagacgcgagacataagaatgacgccttgccatttgcatagcgtaacaattagcagtggaactattatcgattctatcgggttttcattcactgatcactatggtcagcaccacacaacagggccttggggcggtaaggagggtacgaataagattgaactaggcccttcggagtttcttacaggagtatctggaacaagcggcccattcaaaaatctaacaaatgttgtaacgtcacttacgtttgtcaccaatactcgtagttacggaccctttggaaaagggcgaggaacaccgttccacatccaaacgcagaacaacggcaggatcgttggcttctttggccgttctggccagtatctctatgcgattggggtctacacgaaccaagatgctagggtcgcaaggatcgggcgacctttgggtggagatgaaggggttcttcatggcatcacagacctcagtgggcagcagcgcagcagaggtggaggtccatcgggagaatgtggagacagcgacgacgagcccaacggtgatttcgccaaattcggcccgtggggcggcgacggaggacagccgcaggacatcggaacactaccctgccgtctagacaggatcaagatcagcagtgggcttatcatcgactcgatcgagttctcgtacgctggccctgacagccagtaccgcaccgcaggcccttggggtggtcatggaggagacaacagctcttttcagctagctggttcagagttccttacaggtgtgtctgggtcaatcggcacattcaacggccatgcaaacgtcataacgtctctgacgttcgtcaccaacgctcgtagctacgggccgtttggaagagggcgaggcacatccttccacatcccagtgcagggcaatggctgcatcgtcggtttctttgggcgctccggacggtacctcaacgcgatcggtgtctacacggcgccgaaacccgaaccaaaagcagttgggaaacaagatggtggtgatgaggccgtcgtcgccaggattgggccttggggcggggttggaaatgctctccatgacatcgcagagaggccgcatcgcctgcacagagtgacgatcttcagcgggacgatcgtaaactcgctggagtatctgtacagcgatggcgacgggcagcagcacaccaccggtccgtggggcggctgcggaggaactggtcgaaagattcatcttgcccctgaagagttcatagtggaagttactgggacattccatccatgcgcgtgggacagaacaatacccagtgtcgtgtcctctctgacgctcgtgaccagcacgggcaaaacacacgggcctttcggaacgcagctgggagccgcgttccaggttccggtgcagagcgacagcaggatcgttggcttcttcgcccacggagacaattacatcgaagcaattggcgcctacgtgaagaaattgacagaatccagcaaccgttaactcttggaacaacttgcagctgttcacactgtttcttgggccattgctccttaaatttagtccagatggccaaggagcaaccaaacagaaatcgctatggcagggaagatggactaaactggactgtggcacctccagcatagcctgctcttagattagtgaccagacatcatcgagatatttcgatattataataaatgaggaacccatctcagatgtttatgttagctcctcagtttttgcttctgaatgattaatttagatcttccttatttttgcaataaatgaggattcttttctgtctcttctgaatggatacgaatcatgcatcacgtatcagtgcacctattgcagtgaggagatgaggacaaggtgctgacgaacttattgtcctgagctcccacttgagtttctgattgctgctttacaactttggtctatacgtgttgttccatcactagcctagtgaagcctgaaaacgtgtctgcatgctttagaaaaagactgcttccatccttacaatttccaggatatatccttacaaattcccaaactgggtgacgtcgaaaaggtgatctatagcatgacgttttgcagtgcctgtcagaggcaaaaaa

SEQ ID NO: 38740 - DNA, 2791 bp, Zea Mays
ccctttccagctctccagagcctccgccggcgcatccggcgactgatttgcagggagtgcttgaagatggctttgttgccgtcaagaagttatactcgtatattgcaattgaagacgaaccatttcatcgtgaggttgattgtctaatgaatattaggcaccacaacatagtcttgtttgttggttactgtgctgaaacacaggaagtggttgtgcgtcaagaagggaaacatatttttgcggaaaaacgagaaagattactttgcttcgagtatttgcataatggaagccttcacaagcatctgacagccgaaccatgtgggcttccatggcacatttgttaccaaataataaaagggatttgcctgggcttgcactacctacatgacaagaacataattcatctagatctgaaaccggacaatatattgcttgatgatgacatggtgcccaaaatcacggacttcggtttgtcaagactcttgggtaatggaaaaagccacaccattacacaaacaagaataggaacatggggttacatggcacccgagtacttggatgatggagtgatcacaatgaagacagacatctatagcttgggtgtgataatcagacacatggtgaagggacgtaactcggcagacaccactgatgaagaagtactggcaaactggttgattaggctggaaaaggatccatcacagatgatgaggcagcagacgacccgattattatttgaaacagagtacaaagagcaaataaaagcgtgcatggatatatcatggaggtgcacgctgcgtaaaccaatggacaggccaacgacgcagcacatcctacttacactggaggaaacagaagcaaagatcaaatcggtcgttgggcctactccaccaaatgccgggcagcttcagattgccaaatttgggccgtggggtggagatggagggaagacgcgagacataagaatgacgccttgccatttgcatagcgtaacaattagcagtggaactattatcgattctatcgggttttcattcactgatcactatggtcagcaccacacaacagggccttggggcggtaaggagggtacgaataaggctagggtcgcaaggatcgggcgacctttgggtggagatgaaggggttcttcatggcatcacagacctcagtgggcagcagcgcagcagaggtggaggtccatcgggagaatgtggagacagcgacgacgagcccaacggtgatttcgccaaattcggcccgtggggcggcgacggaggacagccgcaggacatcggaacactaccctgccgtctagacaggatcaagatcagcagtgggcttatcatcgactcgatcgagttctcgtacgctggccctgacagccagtaccgcaccgcaggcccttggggtggtcatggaggagacaacagctcttttcagctagctggttcagagttccttacaggtgtgtctgggtcaatcggcacattcaacggccatgcaaacgtcataacgtctctgacgttcgtcaccaacgctcgtagctacgggccgtttggaagagggcgaggcacatccttccacatcccagtgcagggcaatggctgcatcgtcggtttctttgggcgctccggacggtacctcaacgcgatcggtgtctacacggcgccgaaacccgaaccaaaagcaggtggtgatgaggccgtcgtcgccaggattgggccttggggcggggttggaaatgctctccatgacatcgcagagaggccgcatcgcctgcacagagtgacgatcttcagcgggacgatcgtaaactcgctggagtatctgtacagcgatggcgacgggcagcagcacaccaccggtccgtggggcggctgcggaggaactggtcgaaagattcatcttgcccctgaagagttcatagtggaagttactgggacattccatccatgcgcgtgggacagaacaatacccagtgtcgtgtcctctctgacgctcgtgaccagcacgggcaaaacacacgggcctttcggaacgcagctgggagccgcgttccaggttccggtgcagagcgacagcaggatcgttggcttcttcgcccacggagacaattacatcgaagcaattggcgcctacgtgaagaaattgacagaatccagcaaccgttaactcttggaacaacttgcagctgttcacactgtttcttgggccattgctccttaaatttagtccagatggccaaggagcaaccaaacagaaatcgctatggcagggaagatggactaaactggactgtggcacctccagcatagcctgctcttagattagtgaccagacatcatcgagatatttcgatattataataaatgaggaacccatctcagatgtttatgttagctcctcagtttttgcttctgaatgattaatttagatcttccttatttttgcaataaatgaggattcttttctgtctcttctgaatggatacgaatcatgcatcacgtatcagtgcacctattgcagtgaggagatgaggacaaggtgctgacgaacttattgtcctgagctcccacttgagtttctgattgctgctttacaactttggtctatacgtgttgttccatcactagcctagtgaagcctgaaaacgtgtctgcatgctttagaaaaagactgcttccatccttacaatttccaggatatatccttacaaattcccaaactgggtgacgtcgaaaaggtgatctatagcatgacgttttgcagtgcctgtcagaggcaaaaaa

SEQ ID NO: 38741 - DNA, 3049 bp, Zea Mays
ccctttccagctctccagagcctccgccggcgcatccggcgactgatttgcagggagtgcttgaagatggctttgttgccgtcaagaagttatactcgtatattgcaattgaagacgaaccatttcatcgtgaggttgattgtctaatgaatattaggcaccacaacatagtcttgtttgttggttactgtgctgaaacacaggaagtggttgtgcgtcaagaagggaaacatatttttgcggaaaaacgagaaagattactttgcttcgagtatttgcataatggaagccttcacaagcatctgacagccgaaccatgtgggcttccatggcacatttgttaccaaataataaaagggatttgcctgggcttgcactacctacatgacaagaacataattcatctagatctgaaaccggacaatatattgcttgatgatgacatggtgcccaaaatcacggacttcggtttgtcaagactcttgggtaatggaaaaagccacaccattacacaaacaagaataggaacatggggttacatggcacccgagtacttggatgatggagtgatcacaatgaagacagacatctatagcttgggtgtgataatcagacacatggtgaagggacgtaactcggcagacaccactgatgaagaagtactggcaaactggttgattaggctggaaaaggatccatcacagatgatgaggcagcagacgacccgattattatttgaaacagagtacaaagagcaaataaaagcgtgcatggatatatcatggaggtgcacgctgcgtaaaccaatggacaggccaacgacgcagcacatcctacttacactggaggaaacagaagcaaagatcaaatcggtcgttgggcctactccaccaaatgccgggcagcttcagattgccaaatttgggccgtggggtggagatggagggaagacgcgagacataagaatgacgccttgccatttgcatagcgtaacaattagcagtggaactattatcgattctatcgggttttcattcactgatcactatggtcagcaccacacaacagggccttggggcggtaaggagggtacgaataagattgaactaggcccttcggagtttcttacaggagtatctggaacaagcggcccattcaaaaatctaacaaatgttgtaacgtcacttacgtttgtcaccaatactcgtagttacggaccctttggaaaagggcgaggaacaccgttccacatccaaacgcagaacaacggcaggatcgttggcttctttggccgttctggccagtatctctatgcgattggggtctacacgaaccaagatgtgctgcaaatctagctagctagggtcgcaaggatcgggcgacctttgggtggagatgaaggggttcttcatggcatcacagacctcagtgggcagcagcgcagcagaggtggaggtccatcgggagaatgtggagacagcgacgacgagcccaacggtgatttcgccaaattcggcccgtggggcggcgacggaggacagccgcaggacatcggaacactaccctgccgtctagacaggatcaagatcagcagtgggcttatcatcgactcgatcgagttctcgtacgctggccctgacagccagtaccgcaccgcaggcccttggggtggtcatggaggagacaacagctcttttcagctagctggttcagagttccttacaggtgtgtctgggtcaatcggcacattcaacggccatgcaaacgtcataacgtctctgacgttcgtcaccaacgctcgtagctacgggccgtttggaagagggcgaggcacatccttccacatcccagtgcagggcaatggctgcatcgtcggtttctttgggcgctccggacggtacctcaacgcgatcggtgtctacacggcgccgaaacccgaaccaaaagcaggtggtgatgaggccgtcgtcgccaggattgggccttggggcggggttggaaatgctctccatgacatcgcagagaggccgcatcgcctgcacagagtgacgatcttcagcgggacgatcgtaaactcgctggagtatctgtacagcgatggcgacgggcagcagcacaccaccggtccgtggggcggctgcggaggaactggtcgaaagattcatcttgcccctgaagagttcatagtggaagttactgggacattccatccatgcgcgtgggacagaacaatacccagtgtcgtgtcctctctgacgctcgtgaccagcacgggcaaaacacacgggcctttcggaacgcagctgggagccgcgttccaggttccggtgcagagcgacagcaggatcgttggcttcttcgcccacggagacaattacatcgaagcaattggcgcctacgtgaagaaattgacagaatccagcaaccgttaactcttggaacaacttgcagctgttcacactgtttcttgggccattgctccttaaatttagtccagatggccaaggagcaaccaaacagaaatcgctatggcagggaagatggactaaactggactgtggcacctccagcatagcctgctcttagattagtgaccagacatcatcgagatatttcgatattataataaatgaggaacccatctcagatgtttatgttagctcctcagtttttgcttctgaatgattaatttagatcttccttatttttgcaataaatgaggattcttttctgtctcttctgaatggatacgaatcatgcatcacgtatcagtgcacctattgcagtgaggagatgaggacaaggtgctgacgaacttattgtcctgagctcccacttgagtttctgattgctgctttacaactttggtctatacgtgttgttccatcactagcctagtgaagcctgaaaacgtgtctgcatgctttagaaaaagactgcttccatccttacaatttccaggatatatccttacaaattcccaaactgggtgacgtcgaaaaggtgatctatagcatgacgttttgcagtgcctgtcagaggcaaaaaa

SEQ ID NO: 38742 - DNA, 3621 bp, Zea Mays
ccctttccagctctccagagcctccgccggcgcatccggcgactgatttgcagggagtgcttgaagatggctttgttgccgtcaagaagttatactcgtatattgcaattgaagacgaaccatttcatcgtgaggttgattgtctaatgaatattaggcaccacaacatagtcttgtttgttggttactgtgctgaaacacaggaagtggttgtgcgtcaagaagggaaacatatttttgcggaaaaacgagaaagattactttgcttcgagtatttgcataatggaagccttcacaagcatctgacagccgaaccatgtgggcttccatggcacatttgttaccaaataataaaagggatttgcctgggcttgcactacctacatgacaagaacataattcatctagatctgaaaccggacaatatattgcttgatgatgacatggtgcccaaaatcacggacttcggtttgtcaagactcttgggtaatggaaaaagccacaccattacacaaacaagaataggaacatggggttacatggcacccgagtacttggatgatggagtgatcacaatgaagacagacatctatagcttgggtgtgataatcagacacatggtgaagggacgtaactcggcagacaccactgatgaagaagtactggcaaactggttgattaggctggaaaaggatccatcacagatgatgaggcagcagacgacccgattattatttgaaacagagtacaaagagcaaataaaagcgtgcatggatatatcatggaggtgcacgctgcgtaaaccaatggacaggccaacgacgcagcacatcctacttacactggaggaaacagaagcaaagatcaaatcggtcgttgggcctactccaccaaatgccgggcagcttcagattgccaaatttgggccgtggggtggagatggagggaagacgcgagacataagaatgacgccttgccatttgcatagcgtaacaattagcagtggaactattatcgattctatcgggttttcattcactgatcactatggtcagcaccacacaacagggccttggggcggtaaggagggtacgaataagcttgggggactacatccaaatacattccagcatagcatgcacatccaaatacgggtagccagcatgatggtatgtgactagctccaaattactaagaaagaataacataccatgatagtactactacaatggtatatcattccctattttataaagcatgtcatctttggagaacttgctatggaataatggtggtaacaattggactcatatatatatatatatatacaattatatataaaagaataagtaaacaaggggttcttgaagacattcctaagttacaatttgaagtactaaaatttggtactcgagatgccgattttcacatgcttcttatgctttagtaacggtaattaaatcttgatttctctccaaggcggtagggctcaaagtcactaccgtctgactgctcatgactgtctttacaggaggatatttgtatgtgaaatagaaatactgtttctctttctctttctctttctcttgcagattgaactaggcccttcggagtttcttacaggagtatctggaacaagcggcccattcaaaaatctaacaaatgttgtaacgtcacttacgtttgtcaccaatactcgtagttacggaccctttggaaaagggcgaggaacaccgttccacatccaaacgcagaacaacggcaggatcgttggcttctttggccgttctggccagtatctctatgcgattggggtctacacgaaccaagatgtgctgcaaatctagctagtccatactagttttatcgatcttatttaatatttatgttttcattcaaacatttgcttattagtccggttcacttccaggctagggtcgcaaggatcgggcgacctttgggtggagatgaaggggttcttcatggcatcacagacctcagtgggcagcagcgcagcagaggtggaggtccatcgggagaatgtggagacagcgacgacgagcccaacggtgatttcgccaaattcggcccgtggggcggcgacggaggacagccgcaggacatcggaacactaccctgccgtctagacaggatcaagatcagcagtgggcttatcatcgactcgatcgagttctcgtacgctggccctgacagccagtaccgcaccgcaggcccttggggtggtcatggaggagacaacagctcttttcagctagctggttcagagttccttacaggtgtgtctgggtcaatcggcacattcaacggccatgcaaacgtcataacgtctctgacgttcgtcaccaacgctcgtagctacgggccgtttggaagagggcgaggcacatccttccacatcccagtgcagggcaatggctgcatcgtcggtttctttgggcgctccggacggtacctcaacgcgatcggtgtctacacggcgccgaaacccgaaccaaaagcaggtggtgatgaggccgtcgtcgccaggattgggccttggggcggggttggaaatgctctccatgacatcgcagagaggccgcatcgcctgcacagagtgacgatcttcagcgggacgatcgtaaactcgctggagtatctgtacagcgatggcgacgggcagcagcacaccaccggtccgtggggcggctgcggaggaactggtcgaaagattcatcttgcccctgaagagttcatagtggaagttactgggacattccatccatgcgcgtgggacagaacaatacccagtgtcgtgtcctctctgacgctcgtgaccagcacgggcaaaacacacgggcctttcggaacgcagctgggagccgcgttccaggttccggtgcagagcgacagcaggatcgttggcttcttcgcccacggagacaattacatcgaagcaattggcgcctacgtgaagaaattgacagaatccagcaaccgttaactcttggaacaacttgcagctgttcacactgtttcttgggccattgctccttaaatttagtccagatggccaaggagcaaccaaacagaaatcgctatggcagggaagatggactaaactggactgtggcacctccagcatagcctgctcttagattagtgaccagacatcatcgagatatttcgatattataataaatgaggaacccatctcagatgtttatgttagctcctcagtttttgcttctgaatgattaatttagatcttccttatttttgcaataaatgaggattcttttctgtctcttctgaatggatacgaatcatgcatcacgtatcagtgcacctattgcagtgaggagatgaggacaaggtgctgacgaacttattgtcctgagctcccacttgagtttctgattgctgctttacaactttggtctatacgtgttgttccatcactagcctagtgaagcctgaaaacgtgtctgcatgctttagaaaaagactgcttccatccttacaatttccaggatatatccttacaaattcccaaactgggtgacgtcgaaaaggtgatctatagcatgacgttttgcagtgcctgtcagaggcaaaaaa

SEQ ID NO: 38743 - DNA, 3143 bp, Zea Mays
ccctttccagctctccagagcctccgccggcgcatccggcgactgatttgcagggagtgcttgaagatggctttgttgccgtcaagaagttatactcgtatattgcaattgaagacgaaccatttcatcgtgaggttgattgtctaatgaatattaggcaccacaacatagtcttgtttgttggttactgtgctgaaacacaggaagtggttgtgcgtcaagaagggaaacatatttttgcggaaaaacgagaaagattactttgcttcgagtatttgcataatggaagccttcacaagcatctgacagccgaaccatgtgggcttccatggcacatttgttaccaaataataaaagggatttgcctgggcttgcactacctacatgacaagaacataattcatctagatctgaaaccggacaatatattgcttgatgatgacatggtgcccaaaatcacggacttcggtttgtcaagactcttgggtaatggaaaaagccacaccattacacaaacaagaataggaacatggggttacatggcacccgagtacttggatgatggagtgatcacaatgaagacagacatctatagcttgggtgtgataatcagacacatggtgaagggacgtaactcggcagacaccactgatgaagaagtactggcaaactggttgattaggctggaaaaggatccatcacagatgatgaggcagcagacgacccgattattatttgaaacagagtacaaagagcaaataaaagcgtgcatggatatatcatggaggtgcacgctgcgtaaaccaatggacaggccaacgacgcagcacatcctacttacactggaggaaacagaagcaaagatcaaatcggtcgttgggcctactccaccaaatgccgggcagcttcagattgccaaatttgggccgtggggtggagatggagggaagacgcgagacataagaatgacgccttgccatttgcatagcgtaacaattagcagtggaactattatcgattctatcgggttttcattcactgatcactatggtcagcaccacacaacagggccttggggcggtaaggagggtacgaataagttgaactaggcccttcggagtttcttacaggagtatctggaacaagcggcccattcaaaaatctaacaaatgttgtaacgtcacttacgtttgtcaccaatactcgtagttacggaccctttggaaaagggcgaggaacaccgttccacatccaaacgcagaacaacggcaggatcgttggcttctttggccgttctggccagtatctctatgcgattggggtctacacgaaccaagatgtgctgcaaatctagctagtccatactagttttatcgatcttatttaatatttatgttttcattcaaacatttgcttattagtccggttcacttccaggctagggtcgcaaggatcgggcgacctttgggtggagatgaaggggttcttcatggcatcacagacctcagtgggcagcagcgcagcagaggtggaggtccatcgggagaatgtggagacagcgacgacgagcccaacggtgatttcgccaaattcggcccgtggggcggcgacggaggacagccgcaggacatcggaacactaccctgccgtctagacaggatcaagatcagcagtgggcttatcatcgactcgatcgagttctcgtacgctggccctgacagccagtaccgcaccgcaggcccttggggtggtcatggaggagacaacagctcttttcagctagctggttcagagttccttacaggtgtgtctgggtcaatcggcacattcaacggccatgcaaacgtcataacgtctctgacgttcgtcaccaacgctcgtagctacgggccgtttggaagagggcgaggcacatccttccacatcccagtgcagggcaatggctgcatcgtcggtttctttgggcgctccggacggtacctcaacgcgatcggtgtctacacggcgccgaaacccgaaccaaaagcagttgggaaacaagatggtggtgatgaggccgtcgtcgccaggattgggccttggggcggggttggaaatgctctccatgacatcgcagagaggccgcatcgcctgcacagagtgacgatcttcagcgggacgatcgtaaactcgctggagtatctgtacagcgatggcgacgggcagcagcacaccaccggtccgtggggcggctgcggaggaactggtcgaaagattcatcttgcccctgaagagttcatagtggaagttactgggacattccatccatgcgcgtgggacagaacaatacccagtgtcgtgtcctctctgacgctcgtgaccagcacgggcaaaacacacgggcctttcggaacgcagctgggagccgcgttccaggttccggtgcagagcgacagcaggatcgttggcttcttcgcccacggagacaattacatcgaagcaattggcgcctacgtgaagaaattgacagaatccagcaaccgttaactcttggaacaacttgcagctgttcacactgtttcttgggccattgctccttaaatttagtccagatggccaaggagcaaccaaacagaaatcgctatggcagggaagatggactaaactggactgtggcacctccagcatagcctgctcttagattagtgaccagacatcatcgagatatttcgatattataataaatgaggaacccatctcagatgtttatgttagctcctcagtttttgcttctgaatgattaatttagatcttccttatttttgcaataaatgaggattcttttctgtctcttctgaatggatacgaatcatgcatcacgtatcagtgcacctattgcagtgaggagatgaggacaaggtgctgacgaacttattgtcctgagctcccacttgagtttctgattgctgctttacaactttggtctatacgtgttgttccatcactagcctagtgaagcctgaaaacgtgtctgcatgctttagaaaaagactgcttccatccttacaatttccaggatatatccttacaaattcccaaactgggtgacgtcgaaaaggtgatctatagcatgacgttttgcagtgcctgtcagaggcaaaaaa

SEQ ID NO: 38744 - DNA, 3401 bp, Zea Mays
cagctctccagagcctccgccggcgcatccggcgactgatttgcagggagtgcttgaagatggctttgttgccgtcaagaagttatactcgtatattgcaattgaagacgaaccatttcatcgtgaggttgattgtctaatgaatattaggcaccacaacatagtcttgtttgttggttactgtgctgaaacacaggaagtggttgtgcgtcaagaagggaaacatatttttgcggaaaaacgagaaagattactttgcttcgagtatttgcataatggaagccttcacaagcatctgacaggggttacatggcacccgagtacttggatgatggagtgatcacaatgaagacagacatctatagcttgggtgtgataatcagacacatggtgaagggacgtaactcggcagacaccactgatgaagaagtactggcaaactggttgattaggctggaaaaggatccatcacagatgatgaggcagcagacgacccgattattatttgaaacagagtacaaagagcaaataaaagcgtgcatggatatatcatggaggtgcacgctgcgtaaaccaatggacaggccaacgacgcagcacatcctacttacactggaggaaacagaagcaaagatcaaatcggtcgttgggcctactccaccaaatgccgggcagcttcagattgccaaatttgggccgtggggtggagatggagggaagacgcgagacataagaatgacgccttgccatttgcatagcgtaacaattagcagtggaactattatcgattctatcgggttttcattcactgatcactatggtcagcaccacacaacagggccttggggcggtaaggagggtacgaataaggtgagcatcaaagaataacactttctgtactttaaatataaataatgttatttagacgtgtgcaacacaaacttaaatttgcatttgtgaatgttatcattgtttaagcttgggggactacatccaaatacattccagcatagcatgcacatccaaatacgggtagccagcatgatggtatgtgactagctccaaattactaagaaagaataacataccatgatagtactactacaatggtatatcattccctattttataaagcatgtcatctttggagaacttgctatggaataatggtggtaacaattggactcatatatatatatatatatacaattatatataaaagaataagtaaacaaggggttcttgaagacattcctaagttacaatttgaagtactaaaatttggtactcgagatgccgattttcacatgcttcttatgctttagtaacggtaattaaatcttgatttctctccaaggcggtagggctcaaagtcactaccgtctgactgctcatgactgtctttacaggaggatatttgtatgtgaaatagaaatactgtttctctttctctttctctttctcttgcagattgaactaggcccttcggagtttcttacaggagtatctggaacaagcggcccattcaaaaatctaacaaatgttgtaacgtcacttacgtttgtcaccaatactcgtagttacggaccctttggaaaagggcgaggaacaccgttccacatccaaacgcagaacaacggcaggatcgttggcttctttggccgttctggccagtatctctatgcgattggggtctacacgaaccaagatgctagggtcgcaaggatcgggcgacctttgggtggagatgaaggggttcttcatggcatcacagacctcagtgggcagcagcgcagcagaggtggaggtccatcgggagaatgtggagacagcgacgacgagcccaacggtgatttcgccaaattcggcccgtggggcggcgacggaggacagccgcaggacatcggaacactaccctgccgtctagacaggatcaagatcagcagtgggcttatcatcgactcgatcgagttctcgtacgctggccctgacagccagtaccgcaccgcaggcccttggggtggtcatggaggagacaacagctcttttcagctagctggttcagagttccttacaggtgtgtctgggtcaatcggcacattcaacggccatgcaaacgtcataacgtctctgacgttcgtcaccaacgctcgtagctacgggccgtttggaagagggcgaggcacatccttccacatcccagtgcagggcaatggctgcatcgtcggtttctttgggcgctccggacggtacctcaacgcgatcggtgtctacacggcgccgaaacccgaaccaaaagcaggtggtgatgaggccgtcgtcgccaggattgggccttggggcggggttggaaatgctctccatgacatcgcagagaggccgcatcgcctgcacagagtgacgatcttcagcgggacgatcgtaaactcgctggagtatctgtacagcgatggcgacgggcagcagcacaccaccggtccgtggggcggctgcggaggaactggtcgaaagattcatcttgcccctgaagagttcatagtggaagttactgggacattccatccatgcgcgtgggacagaacaatacccagtgtcgtgtcctctctgacgctcgtgaccagcacgggcaaaacacacgggcctttcggaacgcagctgggagccgcgttccaggttccggtgcagagcgacagcaggatcgttggcttcttcgcccacggagacaattacatcgaagcaattggcgcctacgtgaagaaattgacagaatccagcaaccgttaactcttggaacaacttgcagctgttcacactgtttcttgggccattgctccttaaatttagtccagatggccaaggagcaaccaaacagaaatcgctatggcagggaagatggactaaactggactgtggcacctccagcatagcctgctcttagattagtgaccagacatcatcgagatatttcgatattataataaatgaggaacccatctcagatgtttatgttagctcctcagtttttgcttctgaatgattaatttagatcttccttatttttgcaataaatgaggattcttttctgtctcttctgaatggatacgaatcatgcatcacgtatcagtgcacctattgcagtgaggagatgaggacaaggtgctgacgaacttattgtcctgagctcccacttgagtttctgattgctgctttacaactttggtctatacgtgttgttccatcactagcctagtgaagcctgaaaacgtgtctgcatgctttagaaaaagactgcttccatccttacaatttccaggatatatccttacaaattcccaaactgggtgacgtcgaaaaggtgatctatagcatgacgttttgcagtgcctgtcagaggcaaaaaa

SEQ ID NO: 38745 - DNA, 3079 bp, Zea Mays
cagctctccagagcctccgccggcgcatccggcgactgatttgcagggcgtatgtgttggaaatgctcagctgctagtttttcctgggagtgcttgaagatggctttgttgccgtcaagaagttatactcgtatattgcaattgaagacgaaccatttcatcgtgaggttgattgtctaatgaatattaggcaccacaacatagtcttgtttgttggttactgtgctgaaacacaggaagtggttgtgcgtcaagaagggaaacatatttttgcggaaaaacgagaaagattactttgcttcgagtatttgcataatggaagccttcacaagcatctgacagccgaaccatgtgggcttccatggcacatttgttaccaaataataaaagggatttgcctgggcttgcactacctacatgacaagaacataattcatctagatctgaaaccggacaatatattgcttgatgatgacatggtgcccaaaatcacggacttcggtttgtcaagactcttgggtaatggaaaaagccacaccattacacaaacaagaataggaacatggggttacatggcacccgagtacttggatgatggagtgatcacaatgaagacagacatctatagcttgggtgtgataatcagacacatggtgaagggacgtaactcggcagacaccactgatgaagaagtactggcaaactggttgattaggctggaaaaggatccatcacagatgatgaggcagcagacgacccgattattatttgaaacagagtacaaagagcaaataaaagcgtgcatggatatatcatggaggtgcacgctgcgtaaaccaatggacaggccaacgacgcagcacatcctacttacactggaggaaacagaagcaaagatcaaatcggtcgttgggcctactccaccaaatgccgggcagcttcagattgccaaatttgggccgtggggtggagatggagggaagacgcgagacataagaatgacgccttgccatttgcatagcgtaacaattagcagtggaactattatcgattctatcgggttttcattcactgatcactatggtcagcaccacacaacagggccttggggcggtaaggagggtacgaataagattgaactaggcccttcggagtttcttacaggagtatctggaacaagcggcccattcaaaaatctaacaaatgttgtaacgtcacttacgtttgtcaccaatactcgtagttacggaccctttggaaaagggcgaggaacaccgttccacatccaaacgcagaacaacggcaggatcgttggcttctttggccgttctggccagtatctctatgcgattggggtctacacgaaccaagatgctagggtcgcaaggatcgggcgacctttgggtggagatgaaggggttcttcatggcatcacagacctcagtgggcagcagcgcagcagaggtggaggtccatcgggagaatgtggagacagcgacgacgagcccaacggtgatttcgccaaattcggcccgtggggcggcgacggaggacagccgcaggacatcggaacactaccctgccgtctagacaggatcaagatcagcagtgggcttatcatcgactcgatcgagttctcgtacgctggccctgacagccagtaccgcaccgcaggcccttggggtggtcatggaggagacaacagctcttttcagctagctggttcagagttccttacaggtgtgtctgggtcaatcggcacattcaacggccatgcaaacgtcataacgtctctgacgttcgtcaccaacgctcgtagctacgggccgtttggaagagggcgaggcacatccttccacatcccagtgcagggcaatggctgcatcgtcggtttctttgggcgctccggacggtacctcaacgcgatcggtgtctacacggcgccgaaacccgaaccaaaagcagttgggaaacaagatggtggtgatgaggccgtcgtcgccaggattgggccttggggcggggttggaaatgctctccatgacatcgcagagaggccgcatcgcctgcacagagtgacgatcttcagcgggacgatcgtaaactcgctggagtatctgtacagcgatggcgacgggcagcagcacaccaccggtccgtggggcggctgcggaggaactggtcgaaagattcatcttgcccctgaagagttcatagtggaagttactgggacattccatccatgcgcgtgggacagaacaatacccagtgtcgtgtcctctctgacgctcgtgaccagcacgggcaaaacacacgggcctttcggaacgcagctgggagccgcgttccaggttccggtgcagagcgacagcaggatcgttggcttcttcgcccacggagacaattacatcgaagcaattggcgcctacgtgaagaaattgacagaatccagcaaccgttaactcttggaacaacttgcagctgttcacactgtttcttgggccattgctccttaaatttagtccagatggccaaggagcaaccaaacagaaatcgctatggcagggaagatggactaaactggactgtggcacctccagcatagcctgctcttagattagtgaccagacatcatcgagatatttcgatattataataaatgaggaacccatctcagatgtttatgttagctcctcagtttttgcttctgaatgattaatttagatcttccttatttttgcaataaatgaggattcttttctgtctcttctgaatggatacgaatcatgcatcacgtatcagtgcacctattgcagtgaggagatgaggacaaggtgctgacgaacttattgtcctgagctcccacttgagtttctgattgctgctttacaactttggtctatacgtgttgttccatcactagcctagtgaagcctgaaaacgtgtctgcatgctttagaaaaagactgcttccatccttacaatttccaggatatatccttacaaattcccaaactgggtgacgtcgaaaaggtgatctatagcatgacgttttgcagtgcctgtcagaggcaaaaaa

SEQ ID NO: 38746 - DNA, 3288 bp, Zea Mays
gctctccagagcctccgccggcgcatccggcgactgatttgcagggcgtatgtgttggaaatgctcagctgctagtttttcctggtagatcatcaagtcttgagagcagttaaaacaaaccaatttttcctgcaagagctctacgtgctatggagacagcaaatacattttcctttggttcacttcaattttgacggagtgcttgaagatggctttgttgccgtcaagaagttatactcgtatattgcaattgaagacgaaccatttcatcgtgaggttgattgtctaatgaatattaggcaccacaacatagtcttgtttgttggttactgtgctgaaacacaggaagtggttgtgcgtcaagaagggaaacatatttttgcggaaaaacgagaaagattactttgcttcgagtatttgcataatggaagccttcacaagcatctgacagccgaaccatgtgggcttccatggcacatttgttaccaaataataaaagggatttgcctgggcttgcactacctacatgacaagaacataattcatctagatctgaaaccggacaatatattgcttgatgatgacatggtgcccaaaatcacggacttcggtttgtcaagactcttgggtaatggaaaaagccacaccattacacaaacaagaataggaacatggggttacatggcacccgagtacttggatgatggagtgatcacaatgaagacagacatctatagcttgggtgtgataatcagacacatggtgaagggacgtaactcggcagacaccactgatgaagaagtactggcaaactggttgattaggctggaaaaggatccatcacagatgatgaggcagcagacgacccgattattatttgaaacagagtacaaagagcaaataaaagcgtgcatggatatatcatggaggtgcacgctgcgtaaaccaatggacaggccaacgacgcagcacatcctacttacactggaggaaacagaagcaaagatcaaatcggtcgttgggcctactccaccaaatgccgggcagattgccaaatttgggccgtggggtggagatggagggaagacgcgagacataagaatgacgccttgccatttgcatagcgtaacaattagcagtggaactattatcgattctatcgggttttcattcactgatcactatggtcagcaccacacaacagggccttggggcggtaaggagggtacgaataagattgaactaggcccttcggagtttcttacaggagtatctggaacaagcggcccattcaaaaatctaacaaatgttgtaacgtcacttacgtttgtcaccaatactcgtagttacggaccctttggaaaagggcgaggaacaccgttccacatccaaacgcagaacaacggcaggatcgttggcttctttggccgttctggccagtatctctatgcgattggggtctacacgaaccaagatgctagggtcgcaaggatcgggcgacctttgggtggagatgaaggggttcttcatggcatcacagacctcagtgggcagcagcgcagcagaggtggaggtccatcgggagaatgtggagacagcgacgacgagcccaacggtgatttcgccaaattcggcccgtggggcggcgacggaggacagccgcaggacatcggaacactaccctgccgtctagacaggatcaagatcagcagtgggcttatcatcgactcgatcgagttctcgtacgctggccctgacagccagtaccgcaccgcaggcccttggggtggtcatggaggagacaacagctctgtgagtgtgatgaacatttaaaaaaacaaactatccaccgagaacgtggtattcaaaattgtcccgagggacaatgaagtataacttctctttgatttccttacagtttcagctagctggttcagagttccttacaggtgtgtctgggtcaatcggcacattcaacggccatgcaaacgtcataacgtctctgacgttcgtcaccaacgctcgtagctacgggccgtttggaagagggcgaggcacatccttccacatcccagtgcagggcaatggctgcatcgtcggtttctttgggcgctccggacggtacctcaacgcgatcggtgtctacacggcgccgaaacccgaaccaaaagcagttgggaaacaagatggtggtgatgaggccgtcgtcgccaggattgggccttggggcggggttggaaatgctctccatgacatcgcagagaggccgcatcgcctgcacagagtgacgatcttcagcgggacgatcgtaaactcgctggagtatctgtacagcgatggcgacgggcagcagcacaccaccggtccgtggggcggctgcggaggaactggtcgaaagattcatcttgcccctgaagagttcatagtggaagttactgggacattccatccatgcgcgtgggacagaacaatacccagtgtcgtgtcctctctgacgctcgtgaccagcacgggcaaaacacacgggcctttcggaacgcagctgggagccgcgttccaggttccggtgcagagcgacagcaggatcgttggcttcttcgcccacggagacaattacatcgaagcaattggcgcctacgtgaagaaattgacagaatccagcaaccgttaactcttggaacaacttgcagctgttcacactgtttcttgggccattgctccttaaatttagtccagatggccaaggagcaaccaaacagaaatcgctatggcagggaagatggactaaactggactgtggcacctccagcatagcctgctcttagattagtgaccagacatcatcgagatatttcgatattataataaatgaggaacccatctcagatgtttatgttagctcctcagtttttgcttctgaatgattaatttagatcttccttatttttgcaataaatgaggattcttttctgtctcttctgaatggatacgaatcatgcatcacgtatcagtgcacctattgcagtgaggagatgaggacaaggtgctgacgaacttattgtcctgagctcccacttgagtttctgattgctgctttacaactttggtctatacgtgttgttccatcactagcctagtgaagcctgaaaacgtgtctgcatgctttagaaaaagactgcttccatccttacaatttccaggatatatccttacaaattcccaaactgggtgacgtcgaaaaggtgatctatagcatgacgttttgcagtgcctgtcagaggcaaaaaa

SEQ ID NO: 38747 - DNA, 2928 bp, Zea Mays
tccagagcctccgccggcgcatccggcgactgatttgcagggagtgcttgaagatggctttgttgccgtcaagaagttatactcgtatattgcaattgaagacgaaccatttcatcgtgaggttgattgtctaatgaatattaggcaccacaacatagtcttgtttgttggttactgtgctgaaacacaggaagtggttgtgcgtcaagaagggaaacatatttttgcggaaaaacgagaaagattactttgcttcgagtatttgcataatggaagccttcacaagcatctgacagatctgaaaccggacaatatattgcttgatgatgacatggtgcccaaaatcacggacttcggtttgtcaagactcttgggtaatggaaaaagccacaccattacacaaacaagaataggaacatggggttacatggcacccgagtacttggatgatggagtgatcacaatgaagacagacatctatagcttgggtgtgataatcagacacatggtgaagggacgtaactcggcagacaccactgatgaagaagtactggcaaactggttgattaggctggaaaaggatccatcacagatgatgaggcagcagacgacccgattattatttgaaacagagtacaaagagcaaataaaagcgtgcatggatatatcatggaggtgcacgctgcgtaaaccaatggacaggccaacgacgcagcacatcctacttacactggaggaaacagaagcaaagatcaaatcggtcgttgggcctactccaccaaatgccgggcagattgccaaatttgggccgtggggtggagatggagggaagacgcgagacataagaatgacgccttgccatttgcatagcgtaacaattagcagtggaactattatcgattctatcgggttttcattcactgatcactatggtcagcaccacacaacagggccttggggcggtaaggagggtacgaataagattgaactaggcccttcggagtttcttacaggagtatctggaacaagcggcccattcaaaaatctaacaaatgttgtaacgtcacttacgtttgtcaccaatactcgtagttacggaccctttggaaaagggcgaggaacaccgttccacatccaaacgcagaacaacggcaggatcgttggcttctttggccgttctggccagtatctctatgcgattggggtctacacgaaccaagatgctagggtcgcaaggatcgggcgacctttgggtggagatgaaggggttcttcatggcatcacagacctcagtgggcagcagcgcagcagaggtggaggtccatcgggagaatgtggagacagcgacgacgagcccaacggtgatttcgccaaattcggcccgtggggcggcgacggaggacagccgcaggacatcggaacactaccctgccgtctagacaggatcaagatcagcagtgggcttatcatcgactcgatcgagttctcgtacgctggccctgacagccagtaccgcaccgcaggcccttggggtggtcatggaggagacaacagctcttttcagctagctggttcagagttccttacaggtgtgtctgggtcaatcggcacattcaacggccatgcaaacgtcataacgtctctgacgttcgtcaccaacgctcgtagctacgggccgtttggaagagggcgaggcacatccttccacatcccagtgcagggcaatggctgcatcgtcggtttctttgggcgctccggacggtacctcaacgcgatcggtgtctacacggcgccgaaacccgaaccaaaagcagttgggaaacaagatggtggtgatgaggccgtcgtcgccaggattgggccttggggcggggttggaaatgctctccatgacatcgcagagaggccgcatcgcctgcacagagtgacgatcttcagcgggacgatcgtaaactcgctggagtatctgtacagcgatggcgacgggcagcagcacaccaccggtccgtggggcggctgcggaggaactggtcgaaagattcatcttgcccctgaagagttcatagtggaagttactgggacattccatccatgcgcgtgggacagaacaatacccagtgtcgtgtcctctctgacgctcgtgaccagcacgggcaaaacacacgggcctttcggaacgcagctgggagccgcgttccaggttccggtgcagagcgacagcaggatcgttggcttcttcgcccacggagacaattacatcgaagcaattggcgcctacgtgaagaaattgacagaatccagcaaccgttaactcttggaacaacttgcagctgttcacactgtttcttgggccattgctccttaaatttagtccagatggccaaggagcaaccaaacagaaatcgctatggcagggaagatggactaaactggactgtggcacctccagcatagcctgctcttagattagtgaccagacatcatcgagatatttcgatattataataaatgaggaacccatctcagatgtttatgttagctcctcagtttttgcttctgaatgattaatttagatcttccttatttttgcaataaatgaggattcttttctgtctcttctgaatggatacgaatcatgcatcacgtatcagtgcacctattgcagtgaggagatgaggacaaggtgctgacgaacttattgtcctgagctcccacttgagtttctgattgctgctttacaactttggtctatacgtgttgttccatcactagcctagtgaagcctgaaaacgtgtctgcatgctttagaaaaagactgcttccatccttacaatttccaggatatatccttacaaattcccaaactgggtgacgtcgaaaaggtgatctatagcatgacgttttgcagtgcctgtcagaggcaaaaaa

SEQ ID NO: 38748 - DNA, 3361 bp, Zea Mays
tccagagcctccgccggcgcatccggcgactgatttgcagggcgtatgtgttggaaatgctcagctgctagtttttcctggtagatcatcaagtcttgagagcagttaaaacaaaccaatttttcctgcaagagctctacgtgctatggagacagcaaatacattttcctttggttcacttcaattttgacggagtgcttgaagatggctttgttgccgtcaagaagttatactcgtatattgcaattgaagacgaaccatttcatcgtgaggttgattgtctaatgaatattaggcaccacaacatagtcttgtttgttggttactgtgctgaaacacaggaagtggttgtgcgtcaagaagggaaacatatttttgcggaaaaacgagaaagattactttgcttcgagtatttgcataatggaagccttcacaagcatctgacagccgaaccatgtgggcttccatggcacatttgttaccaaataataaaagggatttgcctgggcttgcactacctacatgacaagaacataattcatctagatctgaaaccggacaatatattgcttgatgatgacatggtgcccaaaatcacggacttcggtttgtcaagactcttgggtaatggaaaaagccacaccattacacaaacaagaataggaacatggggttacatggcacccgagtacttggatgatggagtgatcacaatgaagacagacatctatagcttgggtgtgataatcagacacatggtgaagggacgtaactcggcagacaccactgatgaagaagtactggcaaactggttgattaggctggaaaaggatccatcacagatgatgaggcagcagacgacccgattattatttgaaacagagtacaaagagcaaataaaagcgtgcatggatatatcatggaggtgcacgctgcgtaaaccaatggacaggccaacgacgcagcacatcctacttacactggaggaaacagaagcaaagatcaaatcggtcgttgggcctactccaccaaatgccgggcagcttcagattgccaaatttgggccgtggggtggagatggagggaagacgcgagacataagaatgacgccttgccatttgcatagcgtaacaattagcagtggaactattatcgattctatcgggttttcattcactgatcactatggtcagcaccacacaacagggccttggggcggtaaggagggtacgaataaggtgagcatcaaagaataacactttctgtactttaaatataaataatgttatttagacgtgtgcaacacaaacttaaatttgcatttgtgaatgttatcattgtttaagcttgggggactacatccaaatacattccagcatagcatgcacatccaaatacgggtagccagcatgatgattgaactaggcccttcggagtttcttacaggagtatctggaacaagcggcccattcaaaaatctaacaaatgttgtaacgtcacttacgtttgtcaccaatactcgtagttacggaccctttggaaaagggcgaggaacaccgttccacatccaaacgcagaacaacggcaggatcgttggcttctttggccgttctggccagtatctctatgcgattggggtctacacgaaccaagatgctagggtcgcaaggatcgggcgacctttgggtggagatgaaggggttcttcatggcatcacagacctcagtgggcagcagcgcagcagaggtggaggtccatcgggagaatgtggagacagcgacgacgagcccaacggtgatttcgccaaattcggcccgtggggcggcgacggaggacagccgcaggacatcggaacactaccctgccgtctagacaggatcaagatcagcagtgggcttatcatcgactcgatcgagttctcgtacgctggccctgacagccagtaccgcaccgcaggcccttggggtggtcatggaggagacaacagctcttttcagctagctggttcagagttccttacaggtgtgtctgggtcaatcggcacattcaacggccatgcaaacgtcataacgtctctgacgttcgtcaccaacgctcgtagctacgggccgtttggaagagggcgaggcacatccttccacatcccagtgcagggcaatggctgcatcgtcggtttctttgggcgctccggacggtacctcaacgcgatcggtgtctacacggcgccgaaacccgaaccaaaagcagttgggaaacaagatggtggtgatgaggccgtcgtcgccaggattgggccttggggcggggttggaaatgctctccatgacatcgcagagaggccgcatcgcctgcacagagtgacgatcttcagcgggacgatcgtaaactcgctggagtatctgtacagcgatggcgacgggcagcagcacaccaccggtccgtggggcggctgcggaggaactggtcgaaagattcatcttgcccctgaagagttcatagtggaagttactgggacattccatccatgcgcgtgggacagaacaatacccagtgtcgtgtcctctctgacgctcgtgaccagcacgggcaaaacacacgggcctttcggaacgcagctgggagccgcgttccaggttccggtgcagagcgacagcaggatcgttggcttcttcgcccacggagacaattacatcgaagcaattggcgcctacgtgaagaaattgacagaatccagcaaccgttaactcttggaacaacttgcagctgttcacactgtttcttgggccattgctccttaaatttagtccagatggccaaggagcaaccaaacagaaatcgctatggcagggaagatggactaaactggactgtggcacctccagcatagcctgctcttagattagtgaccagacatcatcgagatatttcgatattataataaatgaggaacccatctcagatgtttatgttagctcctcagtttttgcttctgaatgattaatttagatcttccttatttttgcaataaatgaggattcttttctgtctcttctgaatggatacgaatcatgcatcacgtatcagtgcacctattgcagtgaggagatgaggacaaggtgctgacgaacttattgtcctgagctcccacttgagtttctgattgctgctttacaactttggtctatacgtgttgttccatcactagcctagtgaagcctgaaaacgtgtctgcatgctttagaaaaagactgcttccatccttacaatttccaggatatatccttacaaattcccaaactgggtgacgtcgaaaaggtgatctatagcatgacgttttgcagtgcctgtcagaggcaaaaaa

SEQ ID NO: 38749 - DNA, 5223 bp, Zea Mays
ccagagcctccgccggcgcatccggcgactgatttgcagatgatgttgttatcttcctcaagccggctactagtgatatgctttcatcatggatgtgcttcacttgtttgggggaggcttctggtcttaaaaacaatgtgcaaaaaactagtgattttcctataaggtgtgaagattaatacttgatggtcattcaaggccttctgccatgcaacatcttgagcttgataggattgccaattagctacagaggtggaaggctaacttaataacaagggctagcaggagggtttgagtttagtttgtgctcataggaatgttgatctactttgctatgactactgacattcctccttgggttttcaaagcaattgataaaatcagacaaagatttctatggaggagaaggaaggatgccaaaggcgggcactgcctcgtggcgtggggaaaggtttgtcacccccttgagcttggcggccttggtatttcaagtcttctagagctatcttgggcactccgcatgagatggctttggctccaaaaaactgagtcaaataaaccatgggctgatttacctatccaagtcctagccaaagcctaggtgcttttttctattgctctgatttctaaggttggggacggcacatccaccctattctggactaatcgttggttgatggggcaaaatatcatggaagtggcaccaaggttgtttgctgcttgttcctaagagaattacaagaaggagaattgttcttgaagccctcactaatcatcactggattttggatgttcaagttgctttaacaattcaagtaattgtggattatatctagattcgggactgtctcagtcaggtggagttacagcagggggtggctgattctcacatccagttctcgcgtaatggaagatattcagccaaaatggcatatgcgggtttttttgttggctcggttccttttgaaccttatgagaagatttgatgttcatggccccttcctaaatataaatgttttctgtggttggtgacgcacaacagatactggatggcaggcaggctggcttgtagaggcctcccggtgcctgctgtgtgactaggaagatgaaacagtcagccatgtgcttctttcttgtatgtttgcgtgagaattttggttcaaaatcctaaggccttatggcctgcagacccttgcaccataatctgaaggtaggagtttctttctctggtggacgcaggctgaagagagaactaaggggttgacaagaaaaggtttcaactccctcgtcatcctgggagcttgaactctgtggaagatacgaaatggatgtctttgaaggcctctccccatcatatgatttcagcttctgctcactttggtgaagaaatagatttatggatgatggctcacgccaaaggattggtgttcctttcagccgtggctgaggattagtggtagttggtctgctataatctatgcctatgaataatcctttcttgtataagaggttttggccaccatgagctagccatttgagttttgtaaggcctttatacgtttcttcttagtataatgatacgtagttctcctgcgtctttgagaaaaaaagttctaacgaaattcactagaatttatttgatgtggcacattttgatatcaggtacttcttgaagattatatatagctcatttaaatgtgtgatccatgtcaaaaggtggacctgattaactgattttgaaaacattatattcacaccttaaattattaaatttgtttcaaggccaagtagcaatgtatatacacccaaatgcgtctctaccaaatttgaaatgtcttatcataaaattcaagctctaggtccatatagatctcattctctaaaaattgatccatatagatctatccctacatgtaaacaaaacctagtcatgcatacctatgatttattccaacaaggcgcccacaaaaataaatgatcaaatattttatcagaatttacatatcatttcttttttctagtcattgtaatctgtactattcaatagacacatgtttgtgaaaattatagagatgcaaggcaggttatccgtaaacccgtaaatagactaaatttttacgagttacccacaaatttgcaaaagattagcctatttgtgggtttatggacaacccgacttgcatccctcaaatattacataaaaaaactgagggtggttgaaaacatacagggagtgcttgaagatggctttgttgccgtcaagaagttatactcgtatattgcaattgaagacgaaccatttcatcgtgaggttgattgtctaatgaatattaggcaccacaacatagtcttgtttgttggttactgtgctgaaacacaggaagtggttgtgcgtcaagaagggaaacatatttttgcggaaaaacgagaaagattactttgcttcgagtatttgcataatggaagccttcacaagcatctgacagccgaaccatgtgggcttccatggcacatttgttaccaaataataaaagggatttgcctgggcttgcactacctacatgacaagaacataattcatctagatctgaaaccggacaatatattgcttgatgatgacatggtgcccaaaatcacggacttcggtttgtcaagactcttgggtaatggaaaaagccacaccattacacaaacaagaataggaacatggggttacatggcacccgagtacttggatgatggagtgatcacaatgaagacagacatctatagcttgggtgtgataatcagacacatggtgaagggacgtaactcggcagacaccactgatgaagaagtactggcaaactggttgattaggctggaaaaggatccatcacagatgatgaggcagcagacgacccgattattatttgaaacagagtacaaagagcaaataaaagcgtgcatggatatatcatggaggtgcacgctgcgtaaaccaatggacaggccaacgacgcagcacatcctacttacactggaggaaacagaagcaaagatcaaatcggtcgttgggcctactccaccaaatgccgggcagcttcagattgccaaatttgggccgtggggtggagatggagggaagacgcgagacataagaatgacgccttgccatttgcatagcgtaacaattagcagtggaactattatcgattctatcgggttttcattcactgatcactatggtcagcaccacacaacagggccttggggcggtaaggagggtacgaataagattgaactaggcccttcggagtttcttacaggagtatctggaacaagcggcccattcaaaaatctaacaaatgttgtaacgtcacttacgtttgtcaccaatactcgtagttacggaccctttggaaaagggcgaggaacaccgttccacatccaaacgcagaacaacggcaggatcgttggcttctttggccgttctggccagtatctctatgcgattggggtctacacgaaccaagatgctagggtcgcaaggatcgggcgacctttgggtggagatgaaggggttcttcatggcatcacagacctcagtgggcagcagcgcagcagaggtggaggtccatcgggagaatgtggagacagcgacgacgagcccaacggtgatttcgccaaattcggcccgtggggcggcgacggaggacagccgcaggacatcggaacactaccctgccgtctagacaggatcaagatcagcagtgggcttatcatcgactcgatcgagttctcgtacgctggccctgacagccagtaccgcaccgcaggcccttggggtggtcatggaggagacaacagctcttttcagctagctggttcagagttccttacaggtgtgtctgggtcaatcggcacattcaacggccatgcaaacgtcataacgtctctgacgttcgtcaccaacgctcgtagctacgggccgtttggaagagggcgaggcacatccttccacatcccagtgcagggcaatggctgcatcgtcggtttctttgggcgctccggacggtacctcaacgcgatcggtgtctacacggcgccgaaacccgaaccaaaagcagttgggaaacaagatggtggtgatgaggccgtcgtcgccaggattgggccttggggcggggttggaaatgctctccatgacatcgcagagaggccgcatcgcctgcacagagtgacgatcttcagcgggacgatcgtaaactcgctggagtatctgtacagcgatggcgacgggcagcagcacaccaccggtccgtggggcggctgcggaggaactggtcgaaagattcatcttgcccctgaagagttcatagtggaagttactgggacattccatccatgcgcgtgggacagaacaatacccagtgtcgtgtcctctctgacgctcgtgaccagcacgggcaaaacacacgggcctttcggaacgcagctgggagccgcgttccaggttccggtgcagagcgacagcaggatcgttggcttcttcgcccacggagacaattacatcgaagcaattggcgcctacgtgaagaaattgacagaatccagcaaccgttaactcttggaacaacttgcagctgttcacactgtttcttgggccattgctccttaaatttagtccagatggccaaggagcaaccaaacagaaatcgctatggcagggaagatggactaaactggactgtggcacctccagcatagcctgctcttagattagtgaccagacatcatcgagatatttcgatattataataaatgaggaacccatctcagatgtttatgttagctcctcagtttttgcttctgaatgattaatttagatcttccttatttttgcaataaatgaggattcttttctgtctcttctgaatggatacgaatcatgcatcacgtatcagtgcacctattgcagtgaggagatgaggacaaggtgctgacgaacttattgtcctgagctcccacttgagtttctgattgctgctttacaactttggtctatacgtgttgttccatcactagcctagtgaagcctgaaaacgtgtctgcatgctttagaaaaagactgcttccatccttacaatttccaggatatatccttacaaattcccaaactgggtgacgtcgaaaaggtgatctatagcatgacgttttgcagtgcctgtcagaggcaaaaaa

SEQ ID NO: 38750 - DNA, 2794 bp, Zea Mays
ccagagcctccgccggcgcatccggcgactgatttgcagggagtgcttgaagatggctttgttgccgtcaagaagttatactcgtatattgcaattgaagacgaaccatttcatcgtgaggttgattgtctaatgaatattaggcaccacaacatagtcttgtttgttggttactgtgctgaaacacaggaagtggttgtgcgtcaagaagggaaacatatttttgcggaaaaacgagaaagattactttgcttcgagtatttgcataatggaagccttcacaagcatctgacaggggttacatggcacccgagtacttggatgatggagtgatcacaatgaagacagacatctatagcttgggtgtgataatcagacacatggtgaagggacgtaactcggcagacaccactgatgaagaagtactggcaaactggttgattaggctggaaaaggatccatcacagatgatgaggcagcagacgacccgattattatttgaaacagagtacaaagagcaaataaaagcgtgcatggatatatcatggaggtgcacgctgcgtaaaccaatggacaggccaacgacgcagcacatcctacttacactggaggaaacagaagcaaagatcaaatcggtcgttgggcctactccaccaaatgccgggcagcttcagattgccaaatttgggccgtggggtggagatggagggaagacgcgagacataagaatgacgccttgccatttgcatagcgtaacaattagcagtggaactattatcgattctatcgggttttcattcactgatcactatggtcagcaccacacaacagggccttggggcggtaaggagggtacgaataagattgaactaggcccttcggagtttcttacaggagtatctggaacaagcggcccattcaaaaatctaacaaatgttgtaacgtcacttacgtttgtcaccaatactcgtagttacggaccctttggaaaagggcgaggaacaccgttccacatccaaacgcagaacaacggcaggatcgttggcttctttggccgttctggccagtatctctatgcgattggggtctacacgaaccaagatgctagggtcgcaaggatcgggcgacctttgggtggagatgaaggggttcttcatggcatcacagacctcagtgggcagcagcgcagcagaggtggaggtccatcgggagaatgtggagacagcgacgacgagcccaacggtgatttcgccaaattcggcccgtggggcggcgacggaggacagccgcaggacatcggaacactaccctgccgtctagacaggatcaagatcagcagtgggcttatcatcgactcgatcgagttctcgtacgctggccctgacagccagtaccgcaccgcaggcccttggggtggtcatggaggagacaacagctcttttcagctagctggttcagagttccttacaggtgtgtctgggtcaatcggcacattcaacggccatgcaaacgtcataacgtctctgacgttcgtcaccaacgctcgtagctacgggccgtttggaagagggcgaggcacatccttccacatcccagtgcagggcaatggctgcatcgtcggtttctttgggcgctccggacggtacctcaacgcgatcggtgtctacacggcgccgaaacccgaaccaaaagcaggtggtgatgaggccgtcgtcgccaggattgggccttggggcggggttggaaatgctctccatgacatcgcagagaggccgcatcgcctgcacagagtgacgatcttcagcgggacgatcgtaaactcgctggagtatctgtacagcgatggcgacgggcagcagcacaccaccggtccgtggggcggctgcggaggaactggtcgaaagattcatcttgcccctgaagagttcatagtggaagttactgggacattccatccatgcgcgtgggacagaacaatacccagtgtcgtgtcctctctgacgctcgtgaccagcacgggcaaaacacacgggcctttcggaacgcagctgggagccgcgttccaggttccggtgcagagcgacagcaggatcgttggcttcttcgcccacggagacaattacatcgaagcaattggcgcctacgtgaagaaattgacagaatccagcaaccgttaactcttggaacaacttgcagctgttcacactgtttcttgggccattgctccttaaatttagtccagatggccaaggagcaaccaaacagaaatcgctatggcagggaagatggactaaactggactgtggcacctccagcatagcctgctcttagattagtgaccagacatcatcgagatatttcgatattataataaatgaggaacccatctcagatgtttatgttagctcctcagtttttgcttctgaatgattaatttagatcttccttatttttgcaataaatgaggattcttttctgtctcttctgaatggatacgaatcatgcatcacgtatcagtgcacctattgcagtgaggagatgaggacaaggtgctgacgaacttattgtcctgagctcccacttgagtttctgattgctgctttacaactttggtctatacgtgttgttccatcactagcctagtgaagcctgaaaacgtgtctgcatgctttagaaaaagactgcttccatccttacaatttccaggatatatccttacaaattcccaaactgggtgacgtcgaaaaggtgatctatagcatgacgttttgcagtgcctgtcagaggcaaaaaa

SEQ ID NO: 38751 - DNA, 3580 bp, Zea Mays
ccggcgcatccggcgactgatttgcagggcgtatgtgttggaaatgctcagctgctagtttttcctggtagatcatcaagtcttgagagcagttaaaacaaaccaatttttcctgcaagagctctacgtgctatggagacagcaaatacattttcctttggttcacttcaattttgacggagtgcttgaagatggctttgttgccgtcaagaagttatactcgtatattgcaattgaagacgaaccatttcatcgtgaggttgattgtctaatgaatattaggcaccacaacatagtcttgtttgttggttactgtgctgaaacacaggaagtggttgtgcgtcaagaagggaaacatatttttgcggaaaaacgagaaagattactttgcttcgagtatttgcataatggaagccttcacaagcatctgacaggggttacatggcacccgagtacttggatgatggagtgatcacaatgaagacagacatctatagcttgggtgtgataatcagacacatggtgaagggacgtaactcggcagacaccactgatgaagaaccaggtactggcaaactggttgattaggctggaaaaggatccatcacagatgatgaggcagcagacgacccgattattatttgaaacagagtacaaagagcaaataaaagcgtgcatggatatatcatggaggtgcacgctgcgtaaaccaatggacaggccaacgacgcagcacatcctacttacactggaggaaacagaagcaaagatcaaatcggtcgttgggcctactccaccaaatgccgggcagcttcagattgccaaatttgggccgtggggtggagatggagggaagacgcgagacataagaatgacgccttgccatttgcatagcgtaacaattagcagtggaactattatcgattctatcgggttttcattcactgatcactatggtcagcaccacacaacagggccttggggcggtaaggagggtacgaataaggtgagcatcaaagaataacactttctgtactttaaatataaataatgttatttagacgtgtgcaacacaaacttaaatttgcatttgtgaatgttatcattgtttaagcttgggggactacatccaaatacattccagcatagcatgcacatccaaatacgggtagccagcatgatggtatgtgactagctccaaattactaagaaagaataacataccatgatagtactactacaatggtatatcattccctattttataaagcatgtcatctttggagaacttgctatggaataatggtggtaacaattggactcatatatatatatatatatacaattatatataaaagaataagtaaacaaggggttcttgaagacattcctaagttacaatttgaagtactaaaatttggtactcgagatgccgattttcacatgcttcttatgctttagtaacggtaattaaatcttgatttctctccaaggcggtagggctcaaagtcactaccgtctgactgctcatgactgtctttacaggaggatatttgtatgtgaaatagaaatactgtttctctttctctttctctttctcttgcagattgaactaggcccttcggagtttcttacaggagtatctggaacaagcggcccattcaaaaatctaacaaatgttgtaacgtcacttacgtttgtcaccaatactcgtagttacggaccctttggaaaagggcgaggaacaccgttccacatccaaacgcagaacaacggcaggatcgttggcttctttggccgttctggccagtatctctatgcgattggggacctcagtgggcagcagcgcagcagaggtggaggtccatcgggagaatgtggagacagcgacgacgagcccaacggtgatttcgccaaattcggcccgtggggcggcgacggaggacagccgcaggacatcggaacactaccctgccgtctagacaggatcaagatcagcagtgggcttatcatcgactcgatcgagttctcgtacgctggccctgacagccagtaccgcaccgcaggcccttggggtggtcatggaggagacaacagctcttttcagctagctggttcagagttccttacaggtgtgtctgggtcaatcggcacattcaacggccatgcaaacgtcataacgtctctgacgttcgtcaccaacgctcgtagctacgggccgtttggaagagggcgaggcacatccttccacatcccagtgcagggcaatggctgcatcgtcggtttctttgggcgctccggacggtacctcaacgcgatcggtgtctacacggcgccgaaacccgaaccaaaagcagttgggaaacaagatgtgtgctgtgctaatttattttagttataatttgtgtttgtgtttttttttgttggtttgttctgtccttgttttgtttgactcaaactggtttttgttactcgcacagggtggtgatgaggccgtcgtcgccaggattgggccttggggcggggttggaaatgctctccatgacatcgcagagaggccgcatcgcctgcacagagtgacgatcttcagcgggacgatcgtaaactcgctggagtatctgtacagcgatggcgacgggcagcagcacaccaccggtccgtggggcggctgcggaggaactggtcgaaagattcatcttgcccctgaagagttcatagtggaagttactgggacattccatccatgcgcgtgggacagaacaatacccagtgtcgtgtcctctctgacgctcgtgaccagcacgggcaaaacacacgggcctttcggaacgcagctgggagccgcgttccaggttccggtgcagagcgacagcaggatcgttggcttcttcgcccacggagacaattacatcgaagcaattggcgcctacgtgaagaaattgacagaatccagcaaccgttaactcttggaacaacttgcagctgttcacactgtttcttgggccattgctccttaaatttagtccagatggccaaggagcaaccaaacagaaatcgctatggcagggaagatggactaaactggactgtggcacctccagcatagcctgctcttagattagtgaccagacatcatcgagatatttcgatattataataaatgaggaacccatctcagatgtttatgttagctcctcagtttttgcttctgaatgattaatttagatcttccttatttttgcaataaatgaggattcttttctgtctcttctgaatggatacgaatcatgcatcacgtatcagtgcacctattgcagtgaggagatgaggacaaggtgctgacgaacttattgtcctgagctcccacttgagtttctgattgctgctttacaactttggtctatacgtgttgttccatcactagcctagtgaagcctgaaaacgtgtctgcatgctttagaaaaagactgcttccatccttacaatttccaggatatatccttacaaattcccaaactgggtgacgtcgaaaaggtgatctatagcatgacgttttgcagtgcctgtcagaggcaaaaaa

SEQ ID NO: 38752 - DNA, 2538 bp, Zea Mays
gcgcatccggcgactgatttgcaggggttacatggcacccgagtacttggatgatggagtgatcacaatgaagacagacatctatagcttgggtgtgataatcagacacatggtgaagggacgtaactcggcagacaccactgatgaagaagtactggcaaactggttgattaggctggaaaaggatccatcacagatgatgaggcagcagacgacccgattattatttgaaacagagtacaaagagcaaataaaagcgtgcatggatatatcatggaggtgcacgctgcgtaaaccaatggacaggccaacgacgcagcacatcctacttacactggaggaaacagaagcaaagatcaaatcggtcgttgggcctactccaccaaatgccgggcagcttcagattgccaaatttgggccgtggggtggagatggagggaagacgcgagacataagaatgacgccttgccatttgcatagcgtaacaattagcagtggaactattatcgattctatcgggttttcattcactgatcactatggtcagcaccacacaacagggccttggggcggtaaggagggtacgaataagattgaactaggcccttcggagtttcttacaggagtatctggaacaagcggcccattcaaaaatctaacaaatgttgtaacgtcacttacgtttgtcaccaatactcgtagttacggaccctttggaaaagggcgaggaacaccgttccacatccaaacgcagaacaacggcaggatcgttggcttctttggccgttctggccagtatctctatgcgattggggtctacacgaaccaagatgctagggtcgcaaggatcgggcgacctttgggtggagatgaaggggttcttcatggcatcacagacctcagtgggcagcagcgcagcagaggtggaggtccatcgggagaatgtggagacagcgacgacgagcccaacggtgatttcgccaaattcggcccgtggggcggcgacggaggacagccgcaggacatcggaacactaccctgccgtctagacaggatcaagatcagcagtgggcttatcatcgactcgatcgagttctcgtacgctggccctgacagccagtaccgcaccgcaggcccttggggtggtcatggaggagacaacagctcttttcagctagctggttcagagttccttacaggtgtgtctgggtcaatcggcacattcaacggccatgcaaacgtcataacgtctctgacgttcgtcaccaacgctcgtagctacgggccgtttggaagagggcgaggcacatccttccacatcccagtgcagggcaatggctgcatcgtcggtttctttgggcgctccggacggtacctcaacgcgatcggtgtctacacggcgccgaaacccgaaccaaaagcagttgggaaacaagatggtggtgatgaggccgtcgtcgccaggattgggccttggggcggggttggaaatgctctccatgacatcgcagagaggccgcatcgcctgcacagagtgacgatcttcagcgggacgatcgtaaactcgctggagtatctgtacagcgatggcgacgggcagcagcacaccaccggtccgtggggcggctgcggaggaactggtcgaaagattcatcttgcccctgaagagttcatagtggaagttactgggacattccatccatgcgcgtgggacagaacaatacccagtgtcgtgtcctctctgacgctcgtgaccagcacgggcaaaacacacgggcctttcggaacgcagctgggagccgcgttccaggttccggtgcagagcgacagcaggatcgttggcttcttcgcccacggagacaattacatcgaagcaattggcgcctacgtgaagaaattgacagaatccagcaaccgttaactcttggaacaacttgcagctgttcacactgtttcttgggccattgctccttaaatttagtccagatggccaaggagcaaccaaacagaaatcgctatggcagggaagatggactaaactggactgtggcacctccagcatagcctgctcttagattagtgaccagacatcatcgagatatttcgatattataataaatgaggaacccatctcagatgtttatgttagctcctcagtttttgcttctgaatgattaatttagatcttccttatttttgcaataaatgaggattcttttctgtctcttctgaatggatacgaatcatgcatcacgtatcagtgcacctattgcagtgaggagatgaggacaaggtgctgacgaacttattgtcctgagctcccacttgagtttctgattgctgctttacaactttggtctatacgtgttgttccatcactagcctagtgaagcctgaaaacgtgtctgcatgctttagaaaaagactgcttccatccttacaatttccaggatatatccttacaaattcccaaactgggtgacgtcgaaaaggtgatctatagcatgacgttttgcagtgcctgtcagaggcaaaaaa

SEQ ID NO: 38753 - DNA, 3441 bp, Zea Mays
ctagtttttcctggaagtggttgtgcgtcaagaagggaaacatatttttgcggaaaaacgagaaagattactttgcttcgagtatttgcataatggaagccttcacaagcatctgacagccgaaccatgtgggcttccatggcacatttgttaccaaataataaaagggatttgcctgggcttgcactacctacatgacaagaacataattcatctagatctgaaaccggacaatatattgcttgatgatgacatggtgcccaaaatcacggacttcggtttgtcaagactcttgggtaatggaaaaagccacaccattacacaaacaagaataggaacatggggttacatggcacccgagtacttggatgatggagtgatcacaatgaagacagacatctatagcttgggtgtgataatcagacacatggtgaagggacgtaactcggcagacaccactgatgaagaagtactggcaaactggttgattaggctggaaaaggatccatcacagatgatgaggcagcagacgacccgattattatttgaaacagagtacaaagagcaaataaaagcgtgcatggatatatcatggaggtgcacgctgcgtaaaccaatggacaggccaacgacgcagcacatcctacttacactggaggaaacagaagcaaagatcaaatcggtcgttgggcctactccaccaaatgccgggcagcttcagattgccaaatttgggccgtggggtggagatggagggaagacgcgagacataagaatgacgccttgccatttgcatagcgtaacaattagcagtggaactattatcgattctatcgggttttcattcactgatcactatggtcagcaccacacaacagggccttggggcggtaaggagggtacgaataaggtgagcatcaaagaataacactttctgtactttaaatataaataatgttatttagacgtgtgcaacacaaacttaaatttgcatttgtgaatgttatcattgtttaagcttgggggactacatccaaatacattccagcatagcatgcacatccaaatacgggtagccagcatgatggtatgtgactagctccaaattactaagaaagaataacataccatgatagtactactacaatggtatatcattccctattttataaagcatgtcatctttggagaacttgctatggaataatggtggtaacaattggactcatatatatatatatatatacaattatatataaaagaataagtaaacaaggggttcttgaagacattcctaagttacaatttgaagtactaaaatttggtactcgagatgccgattttcacatgcttcttatgctttagtaacggtaattaaatcttgatttctctccaaggcggtagggctcaaagtcactaccgtctgactgctcatgactgtctttacaggaggatatttgtatgtgaaatagaaatactgtttctctttctctttctctttctcttgcagattgaactaggcccttcggagtttcttacaggagtatctggaacaagcggcccattcaaaaatctaacaaatgttgtaacgtcacttacgtttgtcaccaatactcgtagttacggaccctttggaaaagggcgaggaacaccgttccacatccaaacgcagaacaacggcaggatcgttggcttctttggccgttctggccagtatctctatgcgattggggtctacacgaaccaagatgctagggtcgcaaggatcgggcgacctttgggtggagatgaaggggttcttcatggcatcacagacctcagtgggcagcagcgcagcagaggtggaggtccatcgggagaatgtggagacagcgacgacgagcccaacggtgatttcgccaaattcggcccgtggggcggcgacggaggacagccgcaggacatcggaacactaccctgccgtctagacaggatcaagatcagcagtgggcttatcatcgactcgatcgagttctcgtacgctggccctgacagccagtaccgcaccgcaggcccttggggtggtcatggaggagacaacagctcttttcagctagctggttcagagttccttacaggtgtgtctgggtcaatcggcacattcaacggccatgcaaacgtcataacgtctctgacgttcgtcaccaacgctcgtagctacgggccgtttggaagagggcgaggcacatccttccacatcccagtgcagggcaatggctgcatcgtcggtttctttgggcgctccggacggtacctcaacgcgatcggtgtctacacggcgccgaaacccgaaccaaaagcaggtggtgatgaggccgtcgtcgccaggattgggccttggggcggggttggaaatgctctccatgacatcgcagagaggccgcatcgcctgcacagagtgacgatcttcagcgggacgatcgtaaactcgctggagtatctgtacagcgatggcgacgggcagcagcacaccaccggtccgtggggcggctgcggaggaactggtcgaaagattcatcttgcccctgaagagttcatagtggaagttactgggacattccatccatgcgcgtgggacagaacaatacccagtgtcgtgtcctctctgacgctcgtgaccagcacgggcaaaacacacgggcctttcggaacgcagctgggagccgcgttccaggttccggtgcagagcgacagcaggatcgttggcttcttcgcccacggagacaattacatcgaagcaattggcgcctacgtgaagaaattgacagaatccagcaaccgttaactcttggaacaacttgcagctgttcacactgtttcttgggccattgctccttaaatttagtccagatggccaaggagcaaccaaacagaaatcgctatggcagggaagatggactaaactggactgtggcacctccagcatagcctgctcttagattagtgaccagacatcatcgagatatttcgatattataataaatgaggaacccatctcagatgtttatgttagctcctcagtttttgcttctgaatgattaatttagatcttccttatttttgcaataaatgaggattcttttctgtctcttctgaatggatacgaatcatgcatcacgtatcagtgcacctattgcagtgaggagatgaggacaaggtgctgacgaacttattgtcctgagctcccacttgagtttctgattgctgctttacaactttggtctatacgtgttgttccatcactagcctagtgaagcctgaaaacgtgtctgcatgctttagaaaaagactgcttccatccttacaatttccaggatatatccttacaaattcccaaactgggtgacgtcgaaaaggtgatctatagcatgacgttttgcagtgcctgtcagaggcaaaaaa

SEQ ID NO: 38754 - DNA, 2181 bp, Zea Mays
gataaattttgaccattccattgtcttcacaccctctcagtctctcagtgctgatacttctctccactctcctctttctttccctgtcccgacagagttcgaggaagctggggtgggcctgatgcttctccttctcttgcagtctagcgtccattccacttcgcaagggcttttctttctgttttaagtaaaacggatccagcaacgcaccagttcctgaaacagaaacgtgatgatggattcagtaagcatgaagctgttagcttttgtgttccttctgttgcgatgccagcgggcatcgcttgctcttgctgtcgacttccaagaattttgagctcgtcagggttaacaggatccttatcacccagcattgcaaagctaacaactttacagcagctgatactggataacaacaacattactggagggattcctccggagtttggaaacctatcaggtttgacaattctaaaccttggaagaaataatttaaatgggtcaataccggactcccttggacaactttctaaactccaaaatctggatctaagccataattatttgaccggaaatatcccaagctctttctcaaatcttctgtcattgagtgatattaatctggcatataataatataagaggtgcaatcccacaacatctacttcaggtggcccaatacaactatgcaggcaaccacttgaattgtggccaaaatttatctgcatgtgaacgaggcagcacattgacaggtggatccaaaaatttcaagctaaacgtggttattggaagcattgctggagcagtcacattttctgtaactgtagttctagttttgctatggtggcaaagaatgcgttaccggcctgaaatcttcattgacgtgtcaggtcagaatgatcatatgcttgagtttgggcaaataaagcggttctcatggcgggagcttcagattgcaaccagcaatttcagtgaacagaatgttcttggcaagggtggttttggtaaggtgtataaaggagttcttccaggtccaaacagtataaagattgcagtgaaacgactactgaacgtggacagtcgtgatggggaaatggctttcctcagagaagttgaattgataagcattgctgtacacaagaacatattaaggttgataggattctgtacaacaccaacagagaggcttttggtctaccctttcatggagaatcttagtgttgcttcccgtttaagagatataaaactaaacgaaccagcattagattggtctacaagaatgcgaattgctcttggcgctgcctgtggtttggagtaccttcatgagcactgcaatcccaagatcatccaccgtgatgtcaaggctgcaaatgtcctgcttgatgggaactttgaagcagtggtaggagattttgggctggcgaagatggtagacatagggaggaatacagtaacaacaggggttcgtggaactatgggccacgtagctcctgagtacataaagacaggaaggccatcagtgaagacagatatctttggttatggtgtcatgctgttagagattgtgacaggagagcgtgcaattgcattccatcctgaccgtatagaagaagcaggcgagatcctgctcactgatcaggtcaagctatggatggaagaagggcgactactcgacctagtggatcgcaatctagatgctggaaggagagattgtcccagcagagcggtgggaggagtggcagctggctgagctccaacgacgacaacagcatgagatgaggcaacagggcaaactattcaacttcagtgaagagtctcaaaacatccaggaagccattgagttgtcagctggcagatgagctgtcataagaaagtgacatgattttcacttgttccttaaatagaaaggctataagagaaatattgactattaggaatagtctataaggtcctggactcctggtgtaatatcttgcacaagtaactccgtccatatgctgttaatacaacgataggaccacacctagctcagaccatgtgtatatcaagaatagactgttctacattttaattgcattctgtattactggataactctgaaattctctgttgtgtgtgtgtagaacttgaagccttgaattcaaactttagcttaaaagccaaaaatttcggcagtaatataatg

SEQ ID NO: 38755 - DNA, 2682 bp, Zea Mays
tcagtctctcagtgctgatacttctctccactctcctctttctttccctgtcccgacagagttcgaggaagctggggtgggcctgatgcttctccttctcttgcagtctagcgtccattccacttcgcaagggcttttctttctgttttaagtaaaacggatccagcaacgcaccagttcctgaaacagaaacgtgatgatggattcagtaagcatgaagctgttagcttttgtgttccttctgttgcgatgccagcgggcatcgcttgctcttgctgtcgacttccaagtcgaagcattggttgaaatgaggacgcaacttggtgacaaacgtggtgtccttagtgattggaaggataatcaaatgagcccctgctactgggccaatgttaattgccaagataacaaagtcacaacaatgtaagttcagcccattcatctcaactttctacactttgaactgaattactgccaaaaaggtagaaaattcacattatgccattatggtcattgaacagaaggaaatcttcaattctaacagttgactatgtccaaagtgattaaaccccaccatttgtaaaggagaagagatttcgtttgaattgaatagtttcatgctctattttttcctagtttgcctactattataagcttgtgatgctgtgtacttgactacttgtgttcacaaaactatttgcttagtttctcattatgagtttgcagaattttgagctcgtcagggttaacaggatccttatcacccagcattgcaaagctaacaactttacagcagctgatactggataacaacaacattactggagggattcctccggagtttggaaacctatcaggtttgacaattctaaaccttggaagaaataatttaaatgggtcaataccggactcccttggacaactttctaaactccaaaatctggatctaagccataattatttgaccggaaatatcccaagctctttctcaaatcttctgtcattgagtgatattaatctggcatataataatataagaggtgcaatcccacaacatctacttcaggtggcccaatacaactatgcaggcaaccacttgaattgtggccaaaatttatctgcatgtgaacgaggcagcacattgacaggtggatccaaaaatttcaagctaaacgtggttattggaagcattgctggagcagtcacattttctgtaactgtagttctagttttgctatggtggcaaagaatgcgttaccggcctgaaatcttcattgacgtgtcaggtcagaatgatcatatgcttgagtttgggcaaataaagcggttctcatggcgggagcttcagattgcaaccagcaatttcagtgaacagaatgttcttggcaagggtggttttggtaaggtgtataaaggagttcttccaggtccaaacagtataaagattgcagtgaaacgactactgaacgtggacagtcgtgatggggaaatggctttcctcagagaagttgaattgataagcattgctgtacacaagaacatattaaggttgataggattctgtacaacaccaacagagaggcttttggtctaccctttcatggagaatcttagtgttgcttcccgtttaagagatataaaactaaacgaaccagcattagattggtctacaagaatgcgaattgctcttggcgctgcctgtggtttggagtaccttcatgagcactgcaatcccaagatcatccaccgtgatgtcaaggctgcaaatgtcctgcttgatgggaactttgaagcagtggtaggagattttgggctggcgaagatggtagacatagggaggaatacagtaacaacaggggttcgtggaactatgggccacgtagctcctgagtacataaagacaggaaggccatcagtgaagacagatatctttggttatggtgtcatgctgttagagattgtgacaggagagcgtgcaattgcattccatcctgaccgtatagaagaagcaggcgagatcctgctcactgatcaggtcaagctatggatggaagaagggcgactactcgacctagtggatcgcaatctaggtggcgtctacaaccttgaagagctggagaaggttacccagatagcacttctctgcactcacatggatcctgaacaacgccctacaatgtctgaggtggtgcagatgctggaaggagagattgtcccagcagagcggtgggaggagtggcagctggctgagctccaacgacgacaacagcatgagatgaggcaacagggcaaactattcaacttcagtgaagagtctcaaaacatccaggaagccattgagttgtcagctggcagatgagctgtcataagaaagtgacatgattttcacttgttccttaaatagaaaggctataagagaaatattgactattaggaatagtctataaggtcctggactcctggtgtaatatcttgcacaagtaactccgtccatatgctgttaatacaacgataggaccacacctagctcagaccatgtgtatatcaagaatagactgttctacattttaattgcattctgtattactggataactctgaaattctctgttgtgtgtgtgtagaacttgaagccttgaattcaaactttagcttaaaagccaaaaatttcggcagtaatataatg

SEQ ID NO: 38756 - DNA, 2229 bp, Zea Mays
tcagtctctcagtgctgatacttctctccactctcctctttctttccctgtcccgacagagttcgaggaagctggggtgggcctgatgcttctccttctcttgcagtctagcgtccattccacttcgcaagggcttttctttctgttttaagtaaaacggatccagcaacgcaccagttcctgaaacagaaacgtgatgatggattcagtaagcatgaagctgttagcttttgtgttccttctgttgcgatgccagcgggcatcgcttgctcttgctgtcgacttccaagaattttgagctcgtcagggttaacaggatccttatcacccagcattgcaaagctaacaactttacagcagctgatactggataacaacaacattactggagggattcctccggagtttggaaacctatcaggtttgacaattctaaaccttggaagaaataatttaaatgggtcaataccggactcccttggacaactttctaaactccaaaatctggatctaagccataattatttgaccggaaatatcccaagctctttctcaaatcttctgtcattgagtgatattaatctggcatataataatataagaggtgcaatcccacaacatctacttcaggtggcccaatacaactatgcaggcaaccacttgaattgtggccaaaatttatctgcatgtgaacgaggcagcacattgacagctaaacgtggttattggaagcattgctggagcagtcacattttctgtaactgtagttctagttttgctatggtggcaaagaatgcgttaccggcctgaaatcttcattgacgtgtcaggtcagaatgatcatatgcttgagtttgggcaaataaagcggttctcatggcgggagcttcagattgcaaccagcaatttcagtgaacagaatgttcttggcaagggtggttttggtaaggtgtataaaggagttcttccaggtccaaacagtataaagattgcagtgaaacgactactgaacgtggacagtcgtgatggggaaatggctttcctcagagaagttgaattgataagcattgctgtacacaagaacatattaaggttgataggattctgtacaacaccaacagagaggcttttggtctaccctttcatggagaatcttagtgttgcttcccgtttaagagatataaaactaaacgaaccagcattagattggtctacaagaatgcgaattgctcttggcgctgcctgtggtttggagtaccttcatgagcactgcaatcccaagatcatccaccgtgatgtcaaggctgcaaatgtcctgcttgatgggaactttgaagcagtggtaggagattttgggctggcgaagatggtagacatagggaggaatacagtaacaacaggggttcgtggaactatgggccacgtagctcctgagtacataaagacaggaaggccatcagtgaagacagatatctttggttatggtgtcatgctgttagagattgtgacaggagagcgtgcaattgcattccatcctgaccgtatagaagaagcaggcgagatcctgctcactgatcaggtcaagctatggatggaagaagggcgactactcgacctagtggatcgcaatctaggtggcgtctacaaccttgaagagctggagaaggttacccagatagcacttctctgcactcacatggatcctgaacaacgccctacaatgtctgaggtggtgcagatgctggaaggagagattgtcccagcagagcggtgggaggagtggcagctggctgagctccaacgacgacaacagcatgagatgaggcaacagggcaaactattcaacttcagtgaagagtctcaaaacatccaggaagccattgagttgtcagctggcagatgagctgtcataagaaagtgacatgattttcacttgttccttaaatagaaaggctataagagaaatattgactattaggaatagtctataaggtcctggactcctggtgtaatatcttgcacaagtaactccgtccatatgctgttaatacaacgataggaccacacctagctcagaccatgtgtatatcaagaatagactgttctacattttaattgcattctgtattactggataactctgaaattctctgttgtgtgtgtgtagaacttgaagccttgaattcaaactttagcttaaaagccaaaaatttcggcagtaatataatg

SEQ ID NO: 38757 - DNA, 968 bp, Zea Mays
gggaccttccggatacagacgatataaaactaaacgaaccagcattagattggtctacaagaatgcgaattgctcttggcgctgcctgtggtttggagtaccttcatgagcactgcaatcccaagatcatccaccgtgatgtcaaggctgcaaatgtcctgcttgatgggaactttgaagcagtggtaggagattttgggctggcgaagatggtagacatagggaggaatacagtaacaacaggggttcgtggaactatgggccacgtagctcctgagtacataaagacaggaaggccatcagtgaagacagatatctttggttatggtgtcatgctgttagagattgtgacaggagagcgtgcaattgcattccatcctgaccgtatagaagaagcaggcgagatcctgctcactgatcaggtcaagctatggatggaagaagggcgactactcgacctagtggatcgcaatctagatgctggaaggagagattgtcccagcagagcggtgggaggagtggcagctggctgagctccaacgacgacaacagcatgagatgaggcaacagggcaaactattcaacttcagtgaagagtctcaaaacatccaggaagccattgagttgtcagctggcagatgagctgtcataagaaagtgacatgattttcacttgttccttaaatagaaaggctataagagaaatattgactattaggaatagtctataaggtcctggactcctggtgtaatatcttgcacaagtaactccgtccatatgctgttaatacaacgataggaccacacctagctcagaccatgtgtatatcaagaatagactgttctacattttaattgcattctgtattactggataactctgaaattctctgttgtgtgtgtgtagaacttgaagccttgaattcaaactttagcttaaaagccaaaaatttcggcagtaatataatg

SEQ ID NO: 38758 - DNA, 1915 bp, Zea Mays
  misc_feature (1915)..(1915): n is a, c, g, or t
gtaggcgcatctataaatttggacggggtataatcaaacgcacacacccggaccccggtctgcgtttgtccctgcgggctgcggccctgcctcttctcgtctcccgttcccctcgccgcgtgagctctctctctctctctctctcctctgtggtgacgactgggcgcccgcacccctggcagccgccgccgcccagtccccgtcgggcccttcggcaggtcttcttcggccccttcgccggcgacgagccgcaccaggcgtacatgtgtacacccagcccaggcccttaactgcgcccgcccctgcgactggttttcctgctggtttctgtggatttggctgccggaggattggtgcagcctttaggatcacggtagattcgctgtgaaatccgaagggtgctcaggagctgcgtgatcgaccgcctgcaggtggggtgggcgcagaagggaggacaggtggagggtctggtgaattgttatagcaagaagaagaacaagaccggcagtggttcgaggaatcttgcagccagagcctggtcctccgagatggagggttctgatgagggtggagaagtcaacacgggcgacctcatcggcgggatcggcagggagttggccatttcatgcctgctccgtcttccccggtcttactattatgatgtggcatgtgttaatcgatctttctactcccttgtgaggtttggggagctttacaggttgaggcgtgaggctgggatcgtcgagcagatgatctactgctcatgcaatgttctcgagtgggaaggttttgatccgcgccgccaacggagaaatgatgaacacaccaaggtgcttatttggctccgcaagcttcggtgagaaggctattgtagctggcggtattggccagaacggtacattggactctgctgagctttatgattctgagatgcagacatggaccactcttccaagcatgaatagggcacggcagatgtgctctggtttcttcatggatggcaagttctatgtcatcggtgggaaatctgagaggcacaatgagatccttagttgtgctgaggagtttgacttggagagcagcacctggcgcttgatcccagatatggcacagggtcttaatggtggaagtggtgctccacctcttgttgctgttgtgaataatgaactttatgctgctgactatgcaacgaaggaggttaggaaatatgacaaggaaaataatgcatggatcactcttggattgttacccgggaggtatacatcagttcatggctggggcattgctttccgtagttgtggagatatgctcattgtaattggtgcaatgagtgctggtggtagcggggtgattgaaatttgttcctgggtacccaataatggactgccagattggaagatcattggcacccgccgttccggaagctttgtgtacaattgtgctgtgatgagttgttgacataccagggctattacattatcaactgtacatcttgaccaaaaggaaggataaagaaggcaaattctgctgagtctgtttactccttgatgggtaacttctgcccacaggcattttaggctaagctgaaggtaagctatctactatctatgaaggcacaagttggatgatagcacattgtcttcatgagcttataagtgtggtgattagtcatgtatatgtttagcatataataggtgattgtgtaattcagtttgtgtaatggtccattcaaacgtaacaaaatcgataggaggatgaacagaagattgacgtctgtgttctgggcctgctctctgatgagggacacacatcgggcatgcatatgtgagcccttcagcggatatcatatgtttgtatggttttctgtcagctgaattgaacttaatagccattgcttttaagtctgactatttgn

SEQ ID NO: 38759 - DNA, 3255 bp, Zea Mays
  misc_feature (3255)..(3255): n is a, c, g, or t
acacacccggaccccggtctgcgtttgtccctgcgggctgcggccctgcctcttctcgtctcccgttcccctcgccgcgtgagctctctctctctctctctctcctctgtggtgacgactgggcgcccgcacccctggcagccgccgccgcccagtccccgtcgggcccttcggcaggtcttcttcggccccttcgccggcgacgagccgcaccaggcgtacatgtgtacacccagcccaggcccttaactgcgcccgcccctgcgactggttttcctgctggtttctgtggatttggctgccggaggattggtgcagcctttaggatcacggtagattcgctgtgaaatccgaagggtgctcaggagctgcgtgatcgaccgcctgcaggtggggtgggcgcagaagggaggacaggtggagggtctggtgaattgttatagcaagaagaagaacaagaccggcagtggttcgaggaatcttgcagccagagcctggtcctccgagatggagggttctgatgagggtggagaagtcaacacgggcgacctcatcggcgggatcggcagggagttggccatttcatgcctgctccgtcttccccggtcttactattatgatgtggcatgtgttaatcgatctttctactcccttgtgaggtttggggagctttacaggttgaggcgtgaggctgggatcgtcgagcagatgatctactgctcatgcaatgttctcgagtgggaaggttttgatccgcgccgccaacggagaaatgatgaacacaccaaggtgcttatttggctccgcaagcttcggtgagaaggctattgtagctggcggtattggccagaacggtacattggactctgctgagctttatgattctgagatgcagacatggaccactcttccaagcatgaatagggcacggcagatgtgctctggtttcttcatggatggcaagttctatgtcatcggtgggaaatctgagaggcacaatgagatccttagttgtgctgaggagtttgacttggagagcagcacctggcgcttgatcccagatatggcacagggtcttaatggtggaagtggtgctccacctcttgttgctgttgtgaataatgaactttatgctgctgactatgcaacgaaggaggttaggaaatatgacaaggaaaataatgcatggatcactcttggattgttacccgggaggtatacatcagttcatggctggggcattgctttccgtagttgtggagatatgctcattgtaattggtgcaatgagtgctggtggtagcggggtgattgaaatttgttcctgggtacccaataatggactgccagattggaagatcattggcacccgccgttccggaagctttgtgtacaattgtgctgtgatgagttgttgacataccagggctattacattatcaactgtacatcttgaccaaaaggaaggataaagaaggcaaattctgctgagtctgtttactccttgatgggtaacttctgcccacaggcattttaggctaagctgaaggtccgatagaacttctcatgtagcttcttacatgcctatgtctaatctcttcattttaattccatttggagggcctgcaattgatttctggaacgtgggacatgcagtgcagtattttagattaataatttggtgcaacctcaaaaattttgatcttccctgtgtatcttgatcaaagtttttttagctccagagaatagccttacattggcaaatcatttgcccatagattgtaagaaataaagaaaaaagaaatatctttgttgacaattgttgccttttccctttgtcttctcttggttaatagtgactggaggcaactgtgaatcattaccttctgttttatgcaatgtttactcatcaactgtgccttgttatcctaccctacctatggtgtctgataatgttaattctgtctcaatttggcttcttcagcgtggaaagctgcttttggtcatctgtgaactaacattttagttttggaacacatgaatgttttgggacattagttgccatttagacttgcaataattctgattaactgatcatttcttttgggttatgactttgtagctttgaggttttctaaataattcacagcaacattaatataatactgatgtgatgcattccattatgtttcgaacatgatgtattgtagtcagtctaaattgtatggatacaatgttgaaataattctatactggcttgaaagtagatgctttaagtggtgagcagaaacgacaattgtttactgtaatgagtgtgtacgtttttgcctgtttgttctgttgacaatgactttatattcttctgttcattaaaaaaagggatgctgattgctttgcatcaccgatgagtgaagcatagtagtacctaagcatagtaggggggaccattctgttattgatctgaattgatagcatggcatggtttttgaggcgtcacctaggagtccaggtgtgtccccaacaccacaggacagcacaagatcctggttacgtctaggcgttaaggcacgttcctaatgtcacaggacaccacaccacaataactccaaaccatgtcctttgctttccttttttttgacctgttcatatgtaccttgggaattgtggtaatgtaggggagggattctttttagtaacatttctagggaataataagtcttccttatctatgtgactattttggtagttatccttttatttctagtgctcactaagagaattgatgatatcaaatgattaatttttaacattttacacttgtgcatcactctggttatacaaggtgactatgttctttttaatagtgcatttcatgcttattgaagaatctctttaatgcttaaaagcgtatgttcttcctgctccaacaggtaagctatctactatctatgaaggcacaagttggatgatagcacattgtcttcatgagcttataagtgtggtgattagtcatgtatatgtttagcatataataggtgattgtgtaattcagtttgtgtaatggtccattcaaacgtaacaaaatcgataggaggatgaacagaagattgacgtctgtgttctgggcctgctctctgatgagggacacacatcgggcatgcatatgtgagcccttcagcggatatcatatgtttgtatggttttctgtcagctgaattgaacttaatagccattgcttttaagtctgactatttgn

SEQ ID NO: 38760 - DNA, 2783 bp, Zea Mays
gtttgtttttcttttctacactgtcgaatactggaatgtaataagtttggtgcaaagtatggttaaaatggactgcagttaattcaccattttggctcctaggatagaaagtattagaacatttttccgtagtatttctttacaaatgctacaaagcattttgacatagaattatgaaaataatatttggttaagctcattcatttggaatataattcagagtgaaaagaatatagtcctgtttgtttccattagttctgagttctgactatgccaaaacaggagaggtttgtggcactagaatttgctttggcaatgatgattcacatgtttattatagcattctggtcccgtatcttggttgtggcaaattgtgctaatgtgcacagaagtaaatatgcggattagaagtagaggtaaattatctgcgtttgaacgaccttttgttcgagaaaaaaaggtaaattatctgctgtgtttcaaagcagaatcaatatggtacagttttacctttattattgtttacctgaactaagttacttattattccctcggtctgaaaaaagaatgcaattctaggtttggaacaagtcgaactttcatttaagtttgactaagtttatagaaaataacattaacgtttatgtctttaaaataggtttactatgaaaacatattccaagatcattatgatatgtattcggtatcgcaaatattagtacttattgtatagattttcgtcaaaattgaattatttgactgcccacgaagctagaattgcattcttttagggacggagggagtgactgttttcagttcatgctatcatattgagtctaagtgttctattagagctattagttattgacaatttgattagccaaattgtcaagatcccattaacaaagctgtggcatttgagtttgctgacatgcttgctcctttaccttttattgccttctcaacataaattgcagttttttggaacatattttgttgcatgctaccagtttctattggtttgaccttgacatgaaatagcaactttccaattttgtctccctttctctgaacacaatatttgaatattaacaacgtggctgcctttcatctagtcatctctactctcaaagcaacttctagactgccaagttgatgcttatgttctttgaatggggcaacatatttatggttccatgttcctgctaatgaagaggaagtgcctccttttctagcaataatttcagtgcagaacaaactaaagaacagaacaaggatatggcattgtgcttcacctggagaaccaagaaaaggcagaagcagaaaggacaagcaatcaaacaaatagtgttactaactagtgtgacaagcctctgaaaaagaatcagatccatcgctacatttgatggagatgttctttaaattacatgccgtcgattttttttttcactaattgtttaaccacagattcctcattcatccatatgtgctgcaggattcaagttggtagaatctccaacgtaacatctccattagctgtgtctgtctcagtggctacatgcctacatgatgaagaaggtcacgatctacagtgttggattagatgcacctcacctgcaggctgaaggatgtagtacccaattactcaattatttcgtgtggatgctgcacttgtcctcgagaagatgaagcatcaccagacatatcgattccatccgaggccagatgcaagtgaaggcggcccagcactcatgtctgtcttggtgtatcccttcacttgccattcgtcgttgtccttcacttgccatttactgtacaaaggggaaaaaatgcgattctgatagagaattggaagttttgtcgcgagcttatttactttgttggtgctgtcaggtcaggaaatggacgattgcagattaccgaacactactgcctgttggggaaaaaaaatggtgctcttgcatcggacgcaatggcaagttggcagtatcttatgcctttggcaattctcttgtggtccatagcggagtgctcactgcatctaaaatggtaaaagtgaatgggtgctgtggtgtgtggcatccaggcgaccttaatattctcctgtaattcgtccctttaacgaagaagcctgtcttgagagactgcaaagtgcatttggacagttgagttgccatctctcttccattattcggaccacttgtttcttcccgtctcctggaaatctctgaactgcatggatccatccatctcatcaagtggcacacttacttctcttcgcctatctgagaattaataactcttcgacacccttcaaaacctgtttgttgttccttgtacctgagtttctctacctgctgtttatgtccacccaacactcttttcttatgggagatcattagtatcgttaaatatatattttttcccccaagggccccatggtctcccctagatgagacacccttgcacttttatccttattatagtatgtgataacatattgccctctacgcactcatgagaggctgagacaactgaaacatttccatcctaacctactgtacatccatccagacatcttttagccagagccacctacagggctcagtgcctatcccctatggcgccattcacaatcataggcctttagttagttgatggtggttagaacacaatgattgctttgatcaccaagtgctgcaactgaacactctcaagattgtttaagttccatgtaaaggtctcctgtggatgttgcacgggccgaattttttgtattttag

SEQ ID NO: 38761 - DNA, 2712 bp, Zea Mays
gtttgtttttcttttctacactgtcgaatactggaatgtaataagtttggtgcaaagtatggttaaaatggactgcagttaattcaccattttggctcctaggatagaaagtattagaacatttttccgtagtatttctttacaaatgctacaaagcattttgacatagaattatgaaaataatatttggttaagctcattcatttggaatataattcagagtgaaaagaatatagtcctgtttgtttccattagttctgagttctgactatgccaaaacaggagaggtttgtggcactagaatttgctttggcaatgatgattcacatgtttattatagcattctggtcccgtatcttggttgtggcaaattgtgctaatgtgcacagaagtaaatatgcggattagaagtagaggtaaattatctgcgtttgaacgaccttttgttcgagaaaaaaaggtaaattatctgctgtgtttcaaagcagaatcaatatggtacagttttacctttattattgtttacctgaactaagttacttattattccctcggtctgaaaaaagaatgcaattctaggtttggaacaagtcgaactttcatttaagtttgactaagtttatagaaaataacattaacgtttatgtctttaaaataggtttactatgaaaacatattccaagatcattatgatatgtattcggtatcgcaaatattagtacttattgtatagattttcgtcaaaattgaattatttgactgcccacgaagctagaattgcattcttttagggacggagggagtgactgttttcagttcatgctatcatattgagtctaagtgttctattagagctattagttattgacaatttgattagccaaattgtcaagatcccattaacaaagctgtggcatttgagtttgctgacatgcttgctcctttaccttttattgccttctcaacataaattgcagttttttggaacatattttgttgcatgctaccagtttctattggtttgaccttgacatgaaatagcaactttccaattttgtctccctttctctgaacacaatatttgaatattaacaacgtggctgcctttcatctagtcatctctactctcaaagcaacttctagactgccaagttgatgcttatgttctttgaatggggcaacatatttatggttccatgttcctgctaatgaagaggaagtgcctccttttctagcaataatttcagtgcagaacaaactaaagaacagaacaaggatatggcattgtgcttcacctggagaaccaagaaaaggcagaagcagaaaggacaagcaatcaaacaaatagtgttactaactagtgtgacaagcctctgaaaaagaatcagatccatcgctacatttgatggagatgttctttaaattacatgccgtcgattttttttttcactaattgtttaaccacagattcctcattcatccatatgtgctgcaggattcaagttggtagaatctccaacgtaacatctccattagctgtgtctgtctcagtggctacatgcctacatgatgaagaaggtttctatggttattattatcaatacttcagcattatgaataatcttttgctggggaaatcattggtgggtcacgatctacagtgttggattagatgcacctcacctgcaggctgaaggatgtagtacccaattactcaattatttcgtgtggatgctgcacttgtcctcgagaagatgaagcatcaccagacatatcgattccatccgaggccagatgcaagtgaaggcggcccagcactcatgtcaggaaatggacgattgcagattaccgaacactactgcctgttggggaaaaaaaatggtgctcttgcatcggacgcaatggcaagttggcagtatcttatgcctttggcaattctcttgtggtccatagcggagtgctcactgcatctaaaatggtaaaagtgaatgggtgctgtggtgtgtggcatccaggcgaccttaatattctcctgtaattcgtccctttaacgaagaagcctgtcttgagagactgcaaagtgcatttggacagttgagttgccatctctcttccattattcggaccacttgtttcttcccgtctcctggaaatctctgaactgcatggatccatccatctcatcaagtggcacacttacttctcttcgcctatctgagaattaataactcttcgacacccttcaaaacctgtttgttgttccttgtacctgagtttctctacctgctgtttatgtccacccaacactcttttcttatgggagatcattagtatcgttaaatatatattttttcccccaagggccccatggtctcccctagatgagacacccttgcacttttatccttattatagtatgtgataacatattgccctctacgcactcatgagaggctgagacaactgaaacatttccatcctaacctactgtacatccatccagacatcttttagccagagccacctacagggctcagtgcctatcccctatggcgccattcacaatcataggcctttagttagttgatggtggttagaacacaatgattgctttgatcaccaagtgctgcaactgaacactctcaagattgtttaagttccatgtaaaggtctcctgtggatgttgcacgggccgaattttttgtattttag

SEQ ID NO: 38762 - DNA, 1588 bp, Zea Mays
gaattcccgtgccggtggggccgtcggcgacgccatgtgtcgccgcgctatcgcctgggtcacacaagtgtgcggggtgggtggccgccacacgctcgctgcgcctgcgtgcgtgtgctcgcctcccaccctccccgcactagctctgcactttccctggcagtcgtcccttgttcctgacttcctgcctgagcgcatccggccaccttctatccgcccgccagtccccgccggcctccgcggatcatctgcctgggatcaagatccgtcgaggccgaggcacccgcgcgccaaagatcgtttcttgatctaaatttgggtggtcgtagggatcaaagctcggttctctgcggtgcagttgagagggcaccaatattcttggcatggtggctgacacggaaagctcagattcactgcctggcagttcaaatgctgcttctgagatgcctgctaatgggtctattcaccgaaagtctcaggaaaagccccccaaaaaaacacataaagctgaacgagagaagcttaaacgtgatcagttgaatgacctttttgttgagctcggcagtatgctagatcttgatcgacaaaacactggaaaggctacagtgctaggtgatgctgcgcgagtactgcgagatctaatcactcaagtggaatctctcaggcaggaacaatctgctcttgtatcggagcgccaatatttccgagaagaatgagctgcaagaggagaacagttcgctcaagtcccaaatatcggaactacaaaccgagctctgcgcaaggatgaggagcagcagcctgagccaaaccagcatcgggatgtcggatccggcaactcaccagcagatgcagatgtggagcagcattccccacttaagctccgtggccatggcggcgcgcccagcaagtgcagcgtccccgttgcacggccaggagggctactctgctgacgccggtcaagcgggctacgcgccgcagccgcaacctcgggagctgcagctctttccggggtcatcggcatcgtcttcaccggagcgtgaacgttcttcccggctcggaagcggccaggccacgccgccgagcctgacagattccttgccgggtcagctctgcctgagcctcctacagccatctcaggaagcaagcggcggcggcggcggcggcgtcatgtcgcgcagcagagaggaacggcgggacgggtagccaactgacagacaacgcacttgaatcggggtgtgtggcggcggcgattgtcctgtaaataccaagaattccgtccctttactggctcgttcatccagaactaatgctggtagctgccctgtgttgagcggcagctctgcttgttctagaagcttctgagaacatgtgtgggctatgttttccatgagattgtaagatgtgaggtggagccgctagaacacttagcgtgcgttttactgacagtgtggagtgctgctccttagttggaatagaaaaatgcaatttgatggctgtgctgctgtcttgatctgttatcttcctgctcctggtgaaagttacccagcacatgtaatcatgccgtctttcaaacaatgagaagagcagg

SEQ ID NO: 38763 - DNA, 1386 bp, Zea Mays
gccacacgctcgctgcgcctgcgtgcgtgtgctcgcctcccaccctccccgcactagctctgcactttccctggcagtcgtcccttgttcctgacttcctgcctgagcgcatccggccaccttctatccgcccgccagtccccgccggcctccgcggatcatctgcctgggatcaagatccgtcgaggccgaggcacccgcgcgccaaagatcgtttcttgatctaaatttgggtggtcgtagggatcaaagctcggttctctgcggtgcagttgagagggcaccaatattcttggcatggtggctgacacggaaagctcagattcactgcctggcagttcaaatgctgcttctgagatgcctgctaatggatcttgatcgacaaaacactggaaaggctacagtgctaggtgatgctgcgcgagtactgcgagatctaatcactcaagtggaatctctcaggcaggaacaatctgctcttgtatcggagcgccaatatttccgagaagaatgagctgcaagaggagaacagttcgctcaagtcccaaatatcggaactacaaaccgagctctgcgcaaggatgaggagcagcagcctgagccaaaccagcatcgggatgtcggatccggcaactcaccagcagatgcagatgtggagcagcattccccacttaagctccgtggccatggcggcgcgcccagcaagtgcagcgtccccgttgcacggccaggagggctactctgctgacgccggtcaagcgggctacgcgccgcagccgcaacctcgggagctgcagctctttccggggtcatcggcatcgtcttcaccggagcgtgaacgttcttcccggctcggaagcggccaggccacgccgccgagcctgacagattccttgccgggtcagctctgcctgagcctcctacagccatctcaggaagcaagcggcggcggcggcggcggcgtcatgtcgcgcagcagagaggaacggcgggacgggtagccaactgacagacaacgcacttgaatcggggtgtgtggcggcggcgattgtcctgtaaataccaagaattccgtccctttactggctcgttcatccagaactaatgctggtagctgccctgtgttgagcggcagctctgcttgttctagaagcttctgagaacatgtgtgggctatgttttccatgagattgtaagatgtgaggtggagccgctagaacacttagcgtgcgttttactgacagtgtggagtgctgctccttagttggaatagaaaaatgcaatttgatggctgtgctgctgtcttgatctgttatcttcctgctcctggtgaaagttacccagcacatgtaatcatgccgtctttcaaacaatgagaagagcagg

SEQ ID NO: 38764 - DNA, 1391 bp, Zea Mays
gccacacgctcgctgcgcctgcgtgcgtgtgctcgcctcccaccctccccgcactagctctgcactttccctggcagtcgtcccttgttcctgacttcctgcctgagcgcatccggccaccttctatccgcccgccagtccccgccggcctccgcggatcatctgcctgggatcaagatccgtcgaggccgaggcacccgcgcgccaaagatcgtttcttgatctaaatttgggtggtcgtagggatcaaagctcggttctctgcggtgcagttgagagggcaccaatattcttggcatggtggctgacacggaaagctcagattcactgcctggcagttcaaatgctgcttctgagatgcctgctaatggatcttgatcgacaaaacactggaaaggctacagtgctaggtgatgctgcgcgagtactgcgagatctaatcactcaagtggaatctctcaggcaggaacaatctgctcttgtatcggagcgccaatatgtcagttccgagaagaatgagctgcaagaggagaacagttcgctcaagtcccaaatatcggaactacaaaccgagctctgcgcaaggatgaggagcagcagcctgagccaaaccagcatcgggatgtcggatccggcaactcaccagcagatgcagatgtggagcagcattccccacttaagctccgtggccatggcggcgcgcccagcaagtgcagcgtccccgttgcacggccaggagggctactctgctgacgccggtcaagcgggctacgcgccgcagccgcaacctcgggagctgcagctctttccggggtcatcggcatcgtcttcaccggagcgtgaacgttcttcccggctcggaagcggccaggccacgccgccgagcctgacagattccttgccgggtcagctctgcctgagcctcctacagccatctcaggaagcaagcggcggcggcggcggcggcgtcatgtcgcgcagcagagaggaacggcgggacgggtagccaactgacagacaacgcacttgaatcggggtgtgtggcggcggcgattgtcctgtaaataccaagaattccgtccctttactggctcgttcatccagaactaatgctggtagctgccctgtgttgagcggcagctctgcttgttctagaagcttctgagaacatgtgtgggctatgttttccatgagattgtaagatgtgaggtggagccgctagaacacttagcgtgcgttttactgacagtgtggagtgctgctccttagttggaatagaaaaatgcaatttgatggctgtgctgctgtcttgatctgttatcttcctgctcctggtgaaagttacccagcacatgtaatcatgccgtctttcaaacaatgagaagagcagg

SEQ ID NO: 38765 - DNA, 572 bp, Zea Mays
gttcatatttctttttccagcgaggttaaaagtttagctcgttgtggtattgtgatttgtgagcaattgatgcttccatggtacagcatcctaaggaactccatatttttatgtggactgtatttgtgttctaaattgtgataccttgcggctcagattagttgccctttgttgctacacatgtttttaactcttttgattcttaaatattcaattttgtgatgcagcaccaatattcttggcatggtggctgacacggaaagctcagattcactgcctggcagttcaaatgctgcttctgagatgcctgctaatgggtctattcaccgaaagtctcaggaaaagccccccaaaaaaacacataaagctgaacgagagaagcttaaacgtgatcagttgaatgacctttttgttgagctcggcagtatgctaggatcgctgcctggcagatcgtgaaccatttcttctgattacgtctatggttgttgccatgaaaagaactgctaatctctctacaaaattcttcaaaattaatgtatggttaagctattaatactacgctgtactttgaa

SEQ ID NO: 38766 - DNA, 702 bp, Zea Mays
aaaatatatacttcaagcaaggtagtgcttatcaagagctatcctttggcctataaataggcctaaccaatcctactgattttgcaaagcaacaatccctacattcaaaacaactcaaaacaatactagtttttggtcacttagtacagggatatggcacaagaggataccaactctgcggtggataagatgggaacatctcaagcaccaaggcagcacttgtcacaaaatagggcctcactgaccagcaagattctgttgaaagctaaggcacccaggaagaagaaaactactatgtatccggtcctagcagctgcactcaaatttcataaagatgatgacgtttgtcctgcagctgctggagtgaagcagcagcagcagcacaacaaggagatgtagagatctattatgaatgcacctcatgccaacatcgatctaccttagttatgtattaatttcctagtacctattgtcatctcaagctatctatctttacattatatcgtgtcatcatgtcagttcgctattatgttgtatggcttggttcaaaatgagttataacttaatctcctattgcaatgattgtccattagttactctttttatgatggtgtcttcaatatttgaagaaaaagctatattgtaagcaacataacatggaaaatacatgatgtttaaaagaatatgatgcttagatctaac

SEQ ID NO: 38767 - DNA, 523 bp, Zea Mays
aaacaactcaaaacaatactagtttttggtcacttagtacagggatatggcacaagaggataccaactctgcgattctgttgaaagctaaggcacccaggaagaagaaaactactatgtatccggtcctagcagctgcactcaaatttcataaagatgatgacgtttgtcctgcagctgctggagtgaagcagcagcagcagcacaacaaggagatgtagagatctattatgaatgcacctcatgccaacatcgatctaccttagttatgtattaatttcctagtacctattgtcatctcaagctatctatctttacattatatcgtgtcatcatgtcagttcgctattatgttgtatggcttggttcaaaatgagttataacttaatctcctattgcaatgattgtccattagttactctttttatgatggtgtcttcaatatttgaagaaaaagctatattgtaagcaacataacatggaaaatacatgatgtttaaaagaatatgatgcttagatctaac

SEQ ID NO: 38768 - DNA, 148 bp, Zea Mays
cccagatcgagatcgcaggcgtgaaggacagcggttaccagatcgcgatttgttttcgcgcttcgaggaatcgacagtcaagcttcggcgaccaagaggtcgaactcttcgagttctacaaggctgaagaccctgagcatctgtttgg

SEQ ID NO: 38769 - DNA, 600 bp, Zea Mays
gtcgagcaggactggaggtggcggcgcagcagcaggatacccgagtggcggctccgccgccgtcgtcgtcgccgggcgcacaacaccatcaggaggccgccggcggcgccgtagctgcggaggcggcgcccgtcgggaggaagaggacggagctggagctggtggaggactaccctggctccggcgccaacgaccgccactcgccgtgggcacagaagcggaggaactgatcgtcgatcttgatccacgatcgatcgatcgagtcacctctctggatttttttttttggttccacacgcacagcagtttcgtatgcagggcgtttcgctactgtagctatatagtatgtacggctatacgattatacatcgtatttgtacttgtatattattactatatgcgtacgctgtcgccgcgtgtcggaccatgcctccgtgatccgtggagcgaatcatacggcggaatactatactatggcactgtgctcgagtgagtagctagtctgcacgaattagggcctgtttgtttggaaatgcagttttaaaacattatagttttaagatactatagtttataattgtatatgatacaaatactacg

SEQ ID NO: 38770 - DNA, 844 bp, Zea Mays
accacaaaggacatcgccgtaacgtcaaagtccaagcaaaccttttttttttatttgcaccgaccgaccgaccgacgacaccgccaggtccgccaccaccaccggtacaaggtctgaacaagaaggacagaatcggagacgtgggaggtaggaacttctacctgcacaagaacgattcaagcaacgacgggctctacctccagggccaggaggagcccggtgcagatccaagtggtggtgacatcagccggcactcctcctcaggagtaggacaagcatctggtggcgctacaagtcagcaccaggtcctcaccatcgtcatcagcaagctggataagattgggcggcggacgaggcggatctggaggttcatcacctgcaacaactgcgcatgacgcagcacaatgcacaaagcatctgctgcacaacagtgcaggcaagaggtagttagctaattaaccagtgaaaggcttggcatggattctggttaaccagtgtgtggtgtggtgtggtgtgtaatcctaattcctagcagcagttaaccagtgtacatgccattgtggttgtggttaaaccacaagaagagccagtggggaaggggatagccccactaagcagagtcatgggcacctatcgccgatttattaagatatgtgtccatgcgcatgtataaaattcaaaagttgtagctcgaaagaaaaattacagctctctctctctctctctctctctctataccgtggtcggtgctgcagtgtgtcgttgtctgtcgtctctgcccagctgggactggttttacatgaaaaccttgaaaacttgtaaggcttcgattttcaactgttcc

SEQ ID NO: 38771 - DNA, 939 bp, Zea Mays
ggaggtgcaggaggcgaaggtggtggtgagcgtgacggttgagggcagcgtcggcccggtgaaggccatggtcaggctgggcgccagcgtcggggaggccattgctgccgtggtcgagaggtacgccagggaggggagaagcccgcgcctggacccggccgcagccgagagcttccaacttcaccactcccacttcagccttgagagtctgaacaagaaggacagaatcggagacgtgggaggtaggaacttctacctgcacaagaacgattcaagcaacgacgggctctacctccagggccaggaggagcccggtgcagatccaagtggtggtgacatcagccggcactcctcctcaggagtaggacaagcatctggtggcgctacaagtcagcaccaggtcctcaccatcgtcatcagcaagctggataagattgggcggcggacgaggcggatctggaggttcatcacctgcaacaactgcgcatgacgcagcacaatgcacaaagcatctgctgcacaacagtgcaggcaagaggtagttagctaattaaccagtgaaaggcttggcatggattctggttaaccagtgtgtggtgtggtgtggtgtgtaatcctaattcctagcagcagttaaccagtgtacatgccattgtggttgtggttaaaccacaagaagagccagtggggaaggggatagccccactaagcagagtcatgggcacctatcgccgatttattaagatatgtgtccatgcgcatgtataaaattcaaaagttgtagctcgaaagaaaaattacagctctctctctctctctctctctctctataccgtggtcggtgctgcagtgtgtcgttgtctgtcgtctctgcccagctgggactggttttacatgaaaaccttgaaaacttgtaaggcttcgattttcaactgttcc

SEQ ID NO: 38772 - DNA, 875 bp, Zea Mays
attacgcttgattttagtaagaagtgtcatacgaacgtttcggtgcttgtgcttgtattttggatgttagcgtgcgataggaaccattctggcttgatcaaattggcgaaccattccggatttctcgaaatcgaactgcagagtctgaacaagaaggacagaatcggagacgtgggaggtaggaacttctacctgcacaagaacgattcaagcaacgacgggctctacctccagggccaggaggagcccggtgcagatccaagtggtggtgacatcagccggcactcctcctcaggagtaggacaagcatctggtggcgctacaagtcagcaccaggtcctcaccatcgtcatcagcaagctggataagattgggcggcggacgaggcggatctggaggttcatcacctgcaacaactgcgcatgacgcagcacaatgcacaaagcatctgctgcacaacagtgcaggcaagaggtagttagctaattaaccagtgaaaggcttggcatggattctggttaaccagtgtgtggtgtggtgtggtgtgtaatcctaattcctagcagcagttaaccagtgtacatgccattgtggttgtggttaaaccacaagaagagccagtggggaaggggatagccccactaagcagagtcatgggcacctatcgccgatttattaagatatgtgtccatgcgcatgtataaaattcaaaagttgtagctcgaaagaaaaattacagctctctctctctctctctctctctctataccgtggtcggtgctgcagtgtgtcgttgtctgtcgtctctgcccagctgggactggttttacatgaaaaccttgaaaacttgtaaggcttcgattttcaactgttcc

SEQ ID NO: 38773 - DNA, 1133 bp, Zea Mays
tgcgcttggcgggagaggcaggctcgttttcgtcttcttctgctcgaaagaaagagaacagcggaacagcagaggctgcaggtcttccaattccaacctcaaggtcaaggtggaaacgaatcggaagccggaagggaagccagtacagtacgagaagctcccagattactcacgaaggctcgccatgccgccaatcaagccgcgtgcagggtgaacaagatcgatttcgaggaggtcacggtggatctgttcaagtctcggcaccgcaccccggaatttaaaaagataaacccaatggcacaagtgcctgtaattgtggatggaaggtttaaactgtttgaaaggtatcctacagacttgtttagcagagccaaaattgagtcgatcttggattggcatcactcaaatttgcattttggtgcaggaacctttgtatactacactgcactggcaccttttcttggttttaggccacgtccagagactacaaaacatgcagaaaaatcgctgatgcaatccctggcaaggattgaatctgtatggctgaaaggtgacgccaagttcttactgggtagatcccacccatcaatcgcagatctaatccttgtttgttcgataatgcatttggaggttcttgatgatgatatgcggaacagatttttgggaggtcgtaagaggatcctcgcttggatcgataacgtgaagaaagccacgagtcctcactttgaggaagcccatgtattcctcctggaagtgaaggcacagatgcaaagcaaggctgccgccgccgccacggccgcaaaacagggtggttcggaggcaagctcagagctcaaattttcgtcgaagctctgatagatcgtgttgagagaagcgaagacagttcagtatagatagatagaaagaatagtataaacaatgaaaagagagaactcgttgtgtgtccagcattttgctgcctatgtacagctccactccagatttcagttttatgtttcattttggctaatatagcggcaaaatgtgcctaggcatgccctagattgaattaggagttacttcctcggtacattttactgtcgttctcgcttactgagaagttaaacatatttaactttgatcaaatataaaaa

SEQ ID NO: 38774 - DNA, 2796 bp, Zea Mays
agaagtccgcaccccacctgctcgcgcgacgcgtcacgaaaaacacccgattccgcgggcgacgccggcaggcaagatattttccgcctcgcttcatccacgtgtcatccccgtgctctcggcacgcctcccgcaccgaccacgcctcgccagcgccgcttttaaccgcaggcaggctggcgcagtgcgggacgcgtttgcaatacaactgggcgtgctcccgtccacccacctcacgaccgatcggaaatcccatctcccctgcccacccagagagagagaaaaaaaatcacaccaaatcccctccccccgatccatccatcccctcccgccgccgccgcgcgccgctgcctagatccgccttccctcccccgctccccgccgccatggcgtcctcccgcacctcctgggccgacgtcgccgacgccgagcccgccccgcctcccccggtcgccgcccccgccgccgcatccaacggccccgcgcgttcctcctacgttccgccccacctccgcaaccgcccaccagccgccgccgccgccgcgcccgcctccgccgccccgccgccgcgctccaccgccggcctcctcacccgcaccggcggcggcagcagcttcggtgcgggcggcggcggaggattcggcgggggccgcgcccgcggcggtgcccggtgggaccgcgagccggacccgttcgcggactccgccgccgacgccgaggtcccgttcgacgagcaccagaacacggggatcaacttcgacgcgtacgaggacatcccggtcgagatgtccggccgcgacatcccgccccccgtctccaccttcgccgacattgacctcggcgacgcgctcaacgaaaacatccgccggtgcaaacgggctccgggaagaccgccgccttctgcttccccatcatcagcggcatcatgaaggccccgtccgcgggaaggccgcagcggggcggcggcatggggatgaggaccgcttacccgtccgcgctcatcctctccccgactagagagctctctatgcagattcatgaagaggcgaggaagttttcgtatcagactggtgttagggtagttgtcgcttatggaggagcgccaattactcagcagttaagagagcttgagagaggtgttgacattcttgtggctacacctggccgattggttgatttattggaaagggcaagagtatctctacagtcaattagataccttgctcttgatgaggcagatagaatgcttgatatggggtttgaaccacaagttagaagaattgttgagcaaatggacatgccacttccaggtgccaggcagacaatgctgtttagtgcgacgttcccaaaagagatccagaaaatggcatcggatttcctggataactacatcttcctggctgttggaagagttgggtcaagtactgatttgattgcccagcgagttgagtttgtgcaggaggcagataaaagaagccacctgatggatcttcttcatgcacaaagagatacaggaaagcaaactctcacgcttgtctttgtggaaaccaagaggggcgctgattcattggaaagctggttgtgcatgaatgggtttccagctacttctattcatggagatagaaaccagcaggaaagagaatatgctctgaggtccttcaagagtgggcaaactcctattttagttgcaactgatgtggcagctcggggcctcgacattcctcatgttgctcatgttgtcaactttgatctccccaatgatattgatgactacgtacacaggattggaagaactggaagagctgggaagagcggacttgccactgccttcttcaatgataataactcatcactggcaagatctcttgctgacctaatgcaagaatctaaccaagaggtacctgcatggctattgcgctatgcagctcgtccttcttatggtggtggtggtggtgggaggaaccggcgatcagggggagggagccgctttggtggccgtgacttccgcaatgattcttcgtcatttggcaaggggggatcccgtggtggtggtgactactatggtggaggcagcagtggtggttatggtggtggcggacacggtggagctggggctccgagtgcctgggattgatgttacagttgctcccaagtagaggggtctgccaagtttaggtcactttttactctagttctatttaggtatacatttttggtaggagctgttatacagcaacaagtacaaggtgaatgtggtcatcccctttcttcttctggttgctactggctgcagtcttaatcttgcagatgttcattacgaagagggtcttgaggacattcaagcacacgagattcctagttaggtgaaattccttggtagggatagtagctaggctctgacaagtagtgcttggtgccctttgctctttttccctttgtcagcgtcgaattttggtggtcggttgtaaagcttgtgttgagggggcttttgcggcttgatttttgtcctggattcgagttttgacaccggaggttgaagaagcggtaggatgatggtagtcctttagatcctgttgtaatgtatttaactgtgaggtgaggctggacacaataaattctgtaggcgtgtttagaggaagaagggggaagttgtgtgtgatggtttcttcagagaagattcctgctactgtgtacttcgaatctgtttttggatggagttaaattgacattatcgatgtcgtccaaatgctgtctcatttactttttgggtgtaatgtttccatgatatgctcgtgc

SEQ ID NO: 38775 - DNA, 2871 bp, Zea Mays
agaagtccgcaccccacctgctcgcgcgacgcgtcacgaaaaacacccgattccgcgggcgacgccggcaggcaagatattttccgcctcgcttcatccacgtgtcatccccgtgctctcggcacgcctcccgcaccgaccacgcctcgccagcgccgcttttaaccgcaggcaggctggcgcagtgcgggacgcgtttgcaatacaactgggcgtgctcccgtccacccacctcacgaccgatcggaaatcccatctcccctgcccacccagagagagagaaaaaaaatcacaccaaatcccctccccccgatccatccatcccctcccgccgccgccgcgcgccgctgcctagatccgccttccctcccccgctccccgccgccatggcgtcctcccgcacctcctgggccgacgtcgccgacgccgagcccgccccgcctcccccggtcgccgcccccgccgccgcatccaacggccccgcgcgttcctcctacgttccgccccacctccgcaaccgcccaccagccgccgccgccgccgcgcccgcctccgccgccccgccgccgcgctccaccgccggcctcctcacccgcaccggcggcggcagcagcttcggtgcgggcggcggcggaggattcggcgggggccgcgcccgcggcggtgcccggtgggaccgcgagccggacccgttcgcggactccgccgccgacgccgaggtcccgttcgacgagcaccagaacacggggatcaacttcgacgcgtacgaggacatcccggtcgagatgtccggccgcgacatcccgccccccgtctccaccttcgccgacattgacctcggcgacgcgctcaacgaaaacatccgccggtgcaagtacgtccgccccacccccgtgcagcgccacgccatcccgatctcgctcgccggccgcgacctcatggcctgcgcgcagacgggctccgggaagaccgccgccttctgcttccccatcatcagcggcatcatgaaggccccgtccgcgggaaggccgcagcggggcggcggcatggggatgaggaccgcttacccgtccgcgctcatcctctccccgactagagagctctctatattcatgaagaggcgaggaagttttcgtatcagactggtgttagggtagttgtcgcttatggaggagcgccaattactcagcagttaagagagcttgagagaggtgttgacattcttgtggctacacctggccgattggttgatttattggaaagggcaagagtatctctacagtcaattagataccttgctcttgatgaggcagatagaatgcttgatatggggtttgaaccacaagttagaagaattgttgagcaaatggacatgccacttccaggtgccaggcagacaatgctgtttagtgcgacgttcccaaaagagatccagaaaatggcatcggatttcctggataactacatcttcctggctgttggaagagttgggtcaagtactgatttgattgcccagcgagttgagtttgtgcaggaggcagataaaagaagccacctgatggatcttcttcatgcacaaagagatacaggaaagcaaactctcacgcttgtctttgtggaaaccaagaggggcgctgattcattggaaagctggttgtgcatgaatgggtttccagctacttctattcatggagatagaaaccagcaggaaagagaatatgctctgaggtccttcaagagtgggcaaactcctattttagttgcaactgatgtggcagctcggggcctcgacattcctcatgttgctcatgttgtcaactttgatctccccaatgatattgatgactacgtacacaggattggaagaactggaagagctgggaagagcggacttgccactgccttcttcaatgataataactcatcactggcaagatctcttgctgacctaatgcaagaatctaaccaagaggtacctgcatggctattgcgctatgcagctcgtccttcttatggtggtggtggtggtgggaggaaccggcgatcagggggagggagccgctttggtggccgtgacttccgcaatgattcttcgtcatttggcaaggggggatcccgtggtggtggtgactactatggtggaggcagcagtggtggttatggtggtggcggacacggtggagctggggctccgagtgcctgggattgatgttacagttgctcccaagtagaggggtctgccaagtttaggtcactttttactctagttctatttaggtatacatttttggtaggagctgttatacagcaacaagtacaaggtgaatgtggtcatcccctttcttcttctggttgctactggctgcagtcttaatcttgcagatgttcattacgaagagggtcttgaggacattcaagcacacgagattcctagttaggtgaaattccttggtagggatagtagctaggctctgacaagtagtgcttggtgccctttgctctttttccctttgtcagcgtcgaattttggtggtcggttgtaaagcttgtgttgagggggcttttgcggcttgatttttgtcctggattcgagttttgacaccggaggttgaagaagcggtaggatgatggtagtcctttagatcctgttgtaatgtatttaactgtgaggtgaggctggacacaataaattctgtaggcgtgtttagaggaagaagggggaagttgtgtgtgatggtttcttcagagaagattcctgctactgtgtacttcgaatctgtttttggatggagttaaattgacattatcgatgtcgtccaaatgctgtctcatttactttttgggtgtaatgtttccatgatatgctcgtgc

SEQ ID NO: 38776 - DNA, 1776 bp, Zea Mays
ttagaggtatgaaggcagaagtcatccttgcatttgcagacatttgcactcatgaggaatatatgaagtgtgacattactatgttactattgtggtttctacctgcgaggtgtggtaactaggtgcgttgtacgttgtatacgtgctgcaccttcgtaataagaaggttgtggaattaagtggtggtaaaacaatgttcttatgtggttaaactgtttgatattattttacttgctgagatgtgtcatctcactcttgcattactcaatgcaggtacttgatacatgttgggaatgaggggagtagcagcacgtccactttcactctcacaaactgcccaggcgcagccatgatttaaatagaaacttattgtcaaaggaagtttgttttttttatatggtcgtgcacactggttaattcagttcaggtcgtatgtttatctttccttgctagccgagtaataatacttagtatgttttagtcatgatatatgtttatactctgttgctccctcttttatgcaatcttgcaaaggggatgctgccgaaattttatatatggacgtcggaagtgtagtacagtagcataccgggttgtttgtggaacctggagtgttacacattgtcccttcagtcaaggggtaaggtgttccaattgaagtcatctagagagctgacattgttttggaggacattcattccaaaaaacctacgaggcgtgtgatcagtgaaattaacagcaacagacaagagcagtaccaggatgcagagactaaaccgatggccttcgacacacaaaaaggtgacctgaacggcttcttctaggaactatttcccttctaattcaatttttggtgactaatattggcgaggatcccatctagcttcctaattatgttggctttcactagtgtcccttcagtcaagggtcaaggatcaactcaaataagtcacactgtcacgtggatggtcctcatgtttgcctgttagaagatgttccaattgaagtcatccagagagctgacattgttttgagggatattcattccaaaaaacctacgaggcatgtgatcagtgaaattaacagcaacagacaagagtagtaccaggatgcagagactaaactgatggccttcgatacacaaaaaggtgacctgaacagcttcttctaggaactatttcccttctaattcaatttttgggcgagtccattctacttctgggcatatttcatcgattccagcagttcatgggtgatcatatcgacgctcatcaccacaaggtgctggaagaaggtttcgacaacatttcaagctaacaaggtcaagactagatgatcctgcattattcatgagtccttcgctcgcccagcttgaaagaagtttatttgaaagcataattcatgttgggcctgtgcttcgtcgccgaaggtcttctaggaagaagcggccttcggctgaagctgtttgtataagatggccgaaggtccctcttcatgaagcttcgatattacaaaccgacttaaagatagaatgacattttagtccataaaggtctgagtcaatgttataaacttttataaggggcatacttgtaatccctcacaggctgcaccctgtgcctataaatagtgaacagtattcccttacggttcacggattctggtaactgcaaccgcatactctggaattcaaccttttgtcaaggcagaggtattattgtattcaatgattggatatattaagaaaatataatataattcgtctatgacttgttt

SEQ ID NO: 38777 - DNA, 2248 bp, Zea Mays
actattgtggtttctacctgcgaggtgtggtaactaggtgcgttgtacgttgtatacgtgctgcaccttcgtaataagaaggttgtggaattaagtggtggtaaaacaatgttcttatgtggttaaactgtttgatattattttacttgctgagatgtgtcatctcactcttgcattactcaatgcaggtacttgatacatgttgggaatgaggggagtagcagcacgtccactttcactctcacaaactgcccaggcgcagccatgatttaaatagaaacttattgtcaaaggaagtttgttttttttatatggtcgtgcacactggttaattcagttcaggtcgtatgtttatctttccttgctagccgagtaataatacttagtatgttttagtcatgatatatgtttatactctgttgctccctcttttatgcaatcttgcaaaggggatgctgccgaaattttatatatggacgtcggaagtgtagtacagtagcataccgggttgtttgtggaacctggagtgttacacattgtcccttcagtcaaggggtaaggtatgatgatgcttccatcatattccttaaccatgtatcataaggcttctacttgataattgcgtctggacaactgatatagtttatgtccagttactggtctgtttaatatctattaaggattgccatcactctcaataggtatttgatagtagtcatttcctttgctactatctattttagtcttaacatcatggttcctttatgcattcgtcttggatgtctgttggaaaggatcaactcaaataagtcacactgtcatgtggatggtcctcatgtttccctgtttaaatatggtcctcatgtttgcctgttagaaggtgttccaattgaagtcatctagagagctgacattgttttggaggacattcattccaaaaaacctacgaggcgtgtgatcagtgaaattaacagcaacagacaagagcagtaccaggatgcagagactaaaccgatggccttcgacacacaaaaaggtgacctgaacggcttcttctaggaactatttcccttctaattcaatttttggtgactaatattggcgaggatcccatctagcttcctaattatgttggctttcactagtgtcccttcagtcaagggtcaaggtatgatgatgcttccatcatattccttaaccatgtatcataaggcttctacttgataattgcgtctagatgatcaacatagtttatgtctagttactggtctgtttaatatctattaaggattgccatcactctcaatagatatttgatattagtcattttctttgctgctatctaatttagtcttaacaacatggttcctttatgcattcatcttggatgtttgttggaaaggatcaactcaaataagtcacactgtcacgtggatggtcctcatgtttgcctgttagaagatgttccaattgaagtcatccagagagctgacattgttttgagggatattcattccaaaaaacctacgaggcatgtgatcagtgaaattaacagcaacagacaagagtagtaccaggatgcagagactaaactgatggccttcgatacacaaaaagcagttcatgggtgatcatatcgacgctcatcaccacaaggtgctggaagaaggtttcgacaacatttcaagctaacaaggtcaagactagatgatcctgcattattcatgagtccttcgctcgcccagcttgaaagaagtttatttgaaagcataatgtatgttgtacaagaatgatcaaatcatgaccatataagttgcaaaaagtaaacatttacctttgttaactctactgttttacccctctctatgcagtcatgttgggcctgtgcttcgtcgccgaaggtcttctaggaagaagcggccttcggctgaagctgtttgtataagatggccgaaggtccctcttcatgaagcttcgatattacaaaccgacttaaagatagaatgacattttagtccataaaggtctgagtcaatgttataaacttttataaggggcatacttgtaatccctcacaggctgcaccctgtgcctataaatagtgaacagtattcccttacggttcacggattctggtaactgcaaccgcatactctggaattcaaccttttgtcaaggcagaggtattattgtattcaatgattggatatattaagaaaatataatataattcgtctatgacttgttt

SEQ ID NO: 38778 - DNA, 1685 bp, Zea Mays
gtttctacctgcgaggtgtggtaactaggtgcgttgtacgttgtatacgtgctgcaccttcgtaataagaaggttgtggaattaagtggtggtaaaacaatgttcttatgtggttaaactgtttgatattattttacttgctgagatgtgtcatctcactcttgcattactcaatgcaggtacttgatacatgttgggaatgaggggagtagcagcacgtccactttcactctcacaaactgcccaggcgcagccatgatttaaatagaaacttattgtcaaaggaagtttgttttttttatatggtcgtgcacactggttaattcagttcaggtcgtatgtttatctttccttgctagccgagtaataatacttagtatgttttagtcatgatatatgtttatactctgttgctccctcttttatgcaatcttgcaaaggggatgctgccgaaattttatatatggacgtcggaagtgtagtacagtagcataccgggttgtttgtggaacctggagtgttacacattgtcccttcagtcaaggggtaaggtagtgttccaattgaagtcatctagagagctgacattgttttggaggacattcattccaaaaaacctacgaggcgtgtgatcagtgaaattaacagcaacagacaagagcagtaccaggatgcagagactaaaccgatggccttcgacacacaaaaaggtgacctgaacggcttcttctaggaactatttcccttctaattcaatttttggtgactaatattggcgaggatcccatctagcttcctaattatgttggctttcactagtgtcccttcagtcaagggtcaaggatcaactcaaataagtcacactgtcacgtggatggtcctcatgtttgcctgttagaagatgttccaattgaagtcatccagagagctgacattgttttgagggatattcattccaaaaaacctacgaggcatgtgatcagtgaaattaacagcaacagacaagagtagtaccaggatgcagagactaaactgatggccttcgatacacaaaaaggtgacctgaacagcttcttctaggaactatttcccttctaattcaatttttgggcgagtccattctacttctgggcatatttcatcgattccagcagttcatgggtgatcatatcgacgctcatcaccacaaggtgctggaagaaggtttcgacaacatttcaagctaacaaggtcaagactagatgatcctgcattattcatgagtccttcgctcgcccagcttgaaagaagtttatttgaaagcataattcatgttgggcctgtgcttcgtcgccgaaggtcttctaggaagaagcggccttcggctgaagctgtttgtataagatggccgaaggtccctcttcatgaagcttcgatattacaaaccgacttaaagatagaatgacattttagtccataaaggtctgagtcaatgttataaacttttataaggggcatacttgtaatccctcacaggctgcaccctgtgcctataaatagtgaacagtattcccttacggttcacggattctggtaactgcaaccgcatactctggaattcaaccttttgtcaaggcagaggtattattgtattcaatgattggatatattaagaaaatataatataattcgtctatgacttgttt

SEQ ID NO: 38779 - DNA, 2003 bp, Zea Mays
gtttctacctgcgaggtgtggtaactaggtgcgttgtacgttgtatacgtgctgcaccttcgtaataagaaggttgtggaattaagtggtggtaaaacaatgttcttatgtggttaaactgtttgatattattttacttgctgagatgtgtcatctcactcttgcattactcaatgcaggtacttgatacatgttgggaatgaggggagtagcagcacgtccactttcactctcacaaactgcccaggcgcagccatgatttaaatagaaacttattgtcaaaggaagtttgttttttttatatggtcgtgcacactggttaattcagttcaggtcgtatgtttatctttccttgctagccgagtaataatacttagtatgttttagtcatgatatatgtttatactctgttgctccctcttttatgcaatcttgcaaaggggatgctgccgaaattttatatatggacgtcggaagtgtagtacagtagcataccgggttgtttgtggaacctggagtgttacacattgtcccttcagtcaaggggtaaggtatgatgatgcttccatcatattccttaaccatgtatcataaggcttctacttgataattgcgtctggacaactgatatagtttatgtccagttactggtctgtttaatatctattaaggattgccatcactctcaataggtatttgatagtagtcatttcctttgctactatctattttagtcttaacatcatggttcctttatgcattcgtcttggatgtctgttggaaaggatcaactcaaataagtcacactgtcatgtggatggtcctcatgtttccctgtttaaatatggtcctcatgtttgcctgttagaaggtgttccaattgaagtcatctagagagctgacattgttttggaggacattcattccaaaaaacctacgaggcgtgtgatcagtgaaattaacagcaacagacaagagcagtaccaggatgcagagactaaaccgatggccttcgacacacaaaaaggtgacctgaacggcttcttctaggaactatttcccttctaattcaatttttgggtgactaatattggcgaggatcccatctagcttcctaattatgttggctttcactagtgtcccttcagtcaagggtcaaggatcaactcaaataagtcacactgtcacgtggatggtcctcatgtttgcctgttagaagatgttccaattgaagtcatccagagagctgacattgttttgagggatattcattccaaaaaacctacgaggcatgtgatcagtgaaattaacagcaacagacaagagtagtaccaggatgcagagactaaactgatggccttcgatacacaaaaaggtgacctgaacagcttcttctaggaactatttcccttctaattcaatttttgggcgagtccattctacttctgggcatatttcatcgattccagcagttcatgggtgatcatatcgacgctcatcaccacaaggtgctggaagaaggtttcgacaacatttcaagctaacaaggtcaagactagatgatcctgcattattcatgagtccttcgctcgcccagcttgaaagaagtttatttgaaagcataattcatgttgggcctgtgcttcgtcgccgaaggtcttctaggaagaagcggccttcggctgaagctgtttgtataagatggccgaaggtccctcttcatgaagcttcgatattacaaaccgacttaaagatagaatgacattttagtccataaaggtctgagtcaatgttataaacttttataaggggcatacttgtaatccctcacaggctgcaccctgtgcctataaatagtgaacagtattcccttacggttcacggattctggtaactgcaaccgcatactctggaattcaaccttttgtcaaggcagaggtattattgtattcaatgattggatatattaagaaaatataatataattcgtctatgacttgttt

SEQ ID NO: 38780 - DNA, 1421 bp, Zea Mays
ttgatacatgttgggaatgaggggagtagcagcacgtccactttcactctcacaaactgcccaggcgcagccatgatttaaatagaaacttattgtcaaaggaagtttgttttttttatatggtcgtgcacactggttaattcagttcaggtcgtatgtttatctttccttgctagccgagtaataatacttagtatgttttagtcatgatatatgtttatactctgttgctccctcttttatgcaatcttgcaaaggggatgctgccgaaattttatatatggacgtcggaagtgtagtacagtagcataccgggttgtttgtggaacctggagtgttacacattgtcccttcagtcaaggggtaaggtgttccaattgaagtcatctagagagctgacattgttttggaggacattcattccaaaaaacctacgaggcgtgtgatcagtgaaattaacagcaacagacaagagcagtaccaggatgcagagactaaaccgatggccttcgacacacaaaaaggtgacctgaacggcttcttctaggaactatttcccttctaattcaatttttggtgactaatattggcgaggatcccatctagcttcctaattatgttggctttcactagtgtcccttcagtcaagggtcaaggatgcagagactaaactgatggccttcgatacacaaaaaggtgacctgaacagcttcttctaggaactatttcccttctaattcaatttttgggcgagtccattctacttctgggcatatttcatcgattccagcagttcatgggtgatcatatcgacgctcatcaccacaaggtgctggaagaaggtttcgacaacatttcaagctaacaaggtcaagactagatgatcctgcattattcatgagtccttcgctcgcccagcttgaaagaagtttatttgaaagcataatgtatgttgtacaagaatgatcaaatcatgaccatataagttgcaaaaagtaaacatttacctttgttaactctactgttttacccctctctatgcagtcatgttgggcctgtgcttcgtcgccgaaggtcttctaggaagaagcggccttcggctgaagctgtttgtataagatggccgaaggtccctcttcatgaagcttcgatattacaaaccgacttaaagatagaatgacattttagtccataaaggtctgagtcaatgttataaacttttataaggggcatacttgtaatccctcacaggctgcaccctgtgcctataaatagtgaacagtattcccttacggttcacggattctggtaactgcaaccgcatactctggaattcaaccttttgtcaaggcagaggtattattgtattcaatgattggatatattaagaaaatataatataattcgtctatgacttgttt

SEQ ID NO: 38781 - DNA, 1851 bp, Zea Mays
gttgggaatgaggggagtagcagcacgtccactttcactctcacaaactgcccaggcgcagccatgatttaaatagaaacttattgtcaaaggaagtttgttttttttatatggtcgtgcacactggttaattcagttcaggtcgtatgtttatctttccttgctagccgagtaataatacttagtatgttttagtcatgatatatgtttatactctgttgctccctcttttatgcaatcttgcaaaggggatgctgccgaaattttatatatggacgtcggaagtgtagtacagtagcataccgggttgtttgtggaacctggagtgttacacattgtcccttcagtcaaggggtaaggtatgatgatgcttccatcatattccttaaccatgtatcataaggcttctacttgataattgcgtctggacaactgatatagtttatgtccagttactggtctgtttaatatctattaaggattgccatcactctcaataggtatttgatagtagtcatttcctttgctactatctattttagtcttaacatcatggttcctttatgcattcgtcttggatgtctgttggaaaggatcaactcaaataagtcacactgtcatgtggatggtcctcatgtttccctgtttaaatatggtcctcatgtttgcctgttagaaggtgttccaattgaagtcatctagagagctgacattgttttggaggacattcattccaaaaaacctacgaggcgtgtgatcagtgaaattaacagcaacagacaagagcagtaccaggatgcagagactaaaccgatggccttcgacacacaaaaaggtgacctgaacggcttcttctaggaactatttcccttctaattcaatttttggtgactaatattggcgaggatcccatctagcttcctaattatgttggctttcactagtgtcccttcagtcaagggtcaagaagatgttccaattgaagtcatccagagagctgacattgttttgagggatattcattccaaaaaacctacgaggcatgtgatcagtgaaattaacagcaacagacaagagtagtaccaggatgcagagactaaactgatggccttcgatacacaaaaaggtgacctgaacagcttcttctaggaactatttcccttctaattcaatttttgggcgagtccattctacttctgggcatatttcatcgattccagcagttcatgggtgatcatatcgacgctcatcaccacaaggtgctggaagaaggtttcgacaacatttcaagctaacaaggtcaagactagatgatcctgcattattcatgagtccttcgctcgcccagcttgaaagaagtttatttgaaagcataatgtatgttgtacaagaatgatcaaatcatgaccatataagttgcaaaaagtaaacatttacctttgttaactctactgttttacccctctctatgcagtcatgttgggcctgtgcttcgtcgccgaaggtcttctaggaagaagcggccttcggctgaagctgtttgtataagatggccgaaggtccctcttcatgaagcttcgatattacaaaccgacttaaagatagaatgacattttagtccataaaggtctgagtcaatgttataaacttttataaggggcatacttgtaatccctcacaggctgcaccctgtgcctataaatagtgaacagtattcccttacggttcacggattctggtaactgcaaccgcatactctggaattcaaccttttgtcaaggcagaggtattattgtattcaatgattggatatattaagaaaatataatataattcgtctatgacttgttt

SEQ ID NO: 38782 - DNA, 1470 bp, Zea Mays
gtccactttcactctcacaaactgcccaggcgcagccatgatttaaatagaaacttattgtcaaaggaagtttgttttttttatatggtcgtgcacactggttaattcagttcaggtcgtatgtttatctttccttgctagccgagtaataatacttagtatgttttagtcatgatatatgtttatactctgttgctccctcttttatgcaatcttgcaaaggggatgctgccgaaattttatatatggacgtcggaagtgtagtacagtagcataccgggttgtttgtggaacctggagtgttacacattgtcccttcagtcaaggggtaagaaggtgttccaattgaagtcatctagagagctgacattgttttggaggacattcattccaaaaaacctacgaggcgtgtgatcagtgaaattaacagcaacagacaagagcagtaccaggatgcagagactaaaccgatggccttcgacacacaaaaaggtgacctgaacggcttcttctaggaactatttcccttctaattcaatttttggtgactaatattggcgaggatcccatctagcttcctaattatgttggctttcactagtgtcccttcagtcaagggtcaaggatcaactcaaataagtcacactgtcacgtggatggtcctcatgtttgcctgttagaagatgttccaattgaagtcatccagagagctgacattgttttgagggatattcattccaaaaaacctacgaggcatgtgatcagtgaaattaacagcaacagacaagagtagtaccaggatgcagagactaaactgatggccttcgatacacaaaaagcagttcatgggtgatcatatcgacgctcatcaccacaaggtgctggaagaaggtttcgacaacatttcaagctaacaaggtcaagactagatgatcctgcattattcatgagtccttcgctcgcccagcttgaaagaagtttatttgaaagcataatgtatgttgtacaagaatgatcaaatcatgaccatataagttgcaaaaagtaaacatttacctttgttaactctactgttttacccctctctatgcagtcatgttgggcctgtgcttcgtcgccgaaggtcttctaggaagaagcggccttcggctgaagctgtttgtataagatggccgaaggtccctcttcatgaagcttcgatattacaaaccgacttaaagatagaatgacattttagtccataaaggtctgagtcaatgttataaacttttataaggggcatacttgtaatccctcacaggctgcaccctgtgcctataaatagtgaacagtattcccttacggttcacggattctggtaactgcaaccgcatactctggaattcaaccttttgtcaaggcagaggtattattgtattcaatgattggatatattaagaaaatataatataattcgtctatgacttgttt

SEQ ID NO: 38783 - DNA, 1414 bp, Zea Mays
gtcccttcagtcaaggggtaaggtatgatgatgcttccatcatattccttaaccatgtatcataaggcttctacttgataattgcgtctggacaactgatatagtttatgtccagttactggtctgtttaatatctattaaggattgccatcactctcaataggtatttgatagtagtcatttcctttgctactatctattttagtcttaacatcatggttcctttatgcattcgtcttggatgtctgttggaaaggatcaactcaaataagtcacactgtcatgtggatggtcctcatgtttccctgtttaaatatggtcctcatgtttgcctgttagaaggtgttccaattgaagtcatctagagagctgacattgttttggaggacattcattccaaaaaacctacgaggcgtgtgatcagtgaaattaacagcaacagacaagagcagtaccaggatgcagagactaaaccgatggccttcgacacacaaaaaggtgacctgaacggcttcttctaggaactatttcccttctaattcaatttttggtgactaatattggcgaggatcccatctagcttcctaattatgttggctttcactagtgtcccttcagtcaagggtcaagatgttccaattgaagtcatccagagagctgacattgttttgagggatattcattccaaaaaacctacgaggcatgtgatcagtgaaattaacagcaacagacaagagtagtaccaggatgcagagactaaactgatggccttcgatacacaaaaagttcatgggtgatcatatcgacgctcatcaccacaaggtgctggaagaaggtttcgacaacatttcaagctaacaaggtcaagactagatgatcctgcattattcatgagtccttcgctcgcccagcttgaaagaagtttatttgaaagcataatgtatgttgtacaagaatgatcaaatcatgaccatataagttgcaaaaagtaaacatttacctttgttaactctactgttttacccctctctatgcagtcatgttgggcctgtgcttcgtcgccgaaggtcttctaggaagaagcggccttcggctgaagctgtttgtataagatggccgaaggtccctcttcatgaagcttcgatattacaaaccgacttaaagatagaatgacattttagtccataaaggtctgagtcaatgttataaacttttataaggggcatacttgtaatccctcacaggctgcaccctgtgcctataaatagtgaacagtattcccttacggttcacggattctggtaactgcaaccgcatactctggaattcaaccttttgtcaaggcagaggtattattgtattcaatgattggatatattaagaaaatataatataattcgtctatgacttgttt

SEQ ID NO: 38784 - DNA, 3689 bp, Zea Mays
gtttgatatggtttatttgcttctcaaattggtattgcttttgccagtaggggcggagggcctgttatggccaagtatagcccacgccatacctcaactcagcccagtcgcagcctccctgctagtgcttcccctctgtggccgcgcaacaggcacaactgtagtatcgcaggcgcacaagcgagccatctgctcatcgttccgttcgcgaccgcctctgcctggccggccgccagctgcccgagcacggccgcgcgcctgtgccttactgagtcgccgcctctctgaaagttgcctaaagggggggtgaatatgcgaaacctgaaatttataaactttaaaaacacattaaggccggggttagtgttagaattaaattcaagtctgaaagattgtttctcttgctaagagttactcaaaggttgcggatgacatatgggagcaaactcaaatcaatactagcaaggaaacgttagagagaggaaagagggcaaacaaatcaagcgagaatcaaggcgagtagacacggtgatttgttttaccgaggttcggttctaaagaacctagtcccgttgaggaggccacaaacgtcgggtctatttcaaccctttccctctcccaaacggtcacatagaccgagtgagccttctccttaatcaaacgggtcactaagaccccgcaaggaccaccacacacttaggtgtctcttgcttagctttacaaacacttagaaaaggaatgaagaaggaagaaaggcaatccaagcgacaagagcaacaaaagaacacaaatgatcctctcacaagcccttaagcactagagttgattttgggaacttggagtggattgattgctttgattgtgtcttggagtgttggactttgctcttgcaatgaacgaaaacttcagaatgcttgggtggctttgaatgaggtggttggcgggtatttatagcccccaaccacttcctagtcgttggcaaagtctgctggcgatgggcgcatcggacaatcattgttcactattcggtgcgcgccacgtcagcgcgttcgttagggtttggagctattgaccgtcggagcggtttgtctttttgctgcaccggacagtctggtgacctctgacttctgcgctctgacttctatcgcggcactgttcatcactattcgtctgagcagtcgaccgttggcgcgcagggagccattgctccgctggctcaccggactgtccagtggcacaccggacagtccggtgaattatagtggaccgcgcctagaagaaacccgagagtggctagttcactgactgctggcctggcgtccggtgcacaccatttttcagcacactctatgtcttttgctctaattttgattgtgtccctaactaaatttctttgttggtttgtgttgaaccttatgcacctgagataaatgatatctagacaaactagttagtccacatggtttgtgttggacgtcaaccaccaaaatcgattataggaaatgattaggtccatttccatttcaatctccccctttttggtgattgatgccaacactaaccaaagcaaatatgaagtatagaaatgtaactagtttgtaattgatatagatgtgcataggttacttagagttataccaatgaaagacttcatatatatgaatggattgcttttctcttatttagcattttggaccacatttgcaccacttatttgtttttgcaaatcctttggaaaaatcctttcaaaatcttttgcaaatagtcaaagatataggaatatgattgcaagaagcatttttaagatttgaaattcctccccctatttcaaatgcttttcctttgactaaataaaagctccccctgaatgaattctccccttagctttcaagagggtttttgaaatgacaaaaaccaattgaaaatttttcatataaatgagataccaattgaaaattgactttaagaataccaattgaaaattagataccacttgaaaattcattttgaggctaactcaagtactaattgaaataaacattagtgaaaaccaattgaaataaacattagtgaaaattttgaaatggtggtgtggtcgcggtccttttgctttgggcttaatactttctccccctttgacattaatcgccaaaaactaagaacttgagagccctttttggtttttctccccctttggggcctaatattttctcccaaatggtagaacaagtatgagtgaagggtcatacctttgagagttacatgagtaatggcaaaggataaatgatatcgtcagagttagagtggaagccttgtctttgtcgaatactccatttccctttcaatctaagattaagtatagaaatacacttgaaagcacattagtcttagccttggcacaagaagaataagaaatatgcatttgtaccaaatgaaagagacatggtcaaacgtataagaattagctatgtgtgcaacatttcaatcaaaattccgagagtcaagtatatttagctcattcctaagtttgctaaaagtcttttcatctagtggcttggtaaagatatcggctaattagttgtgggtgctcacataagctatttcgatacccccttttgttggtgatctctcaaaaagtgatatcggatgtctatgtgcttagtgcggctgtgttcaacaggattatccgccatgcggattgcactctcattatcacataggagagggactttgctcaatttgtagccatagtccctaagtgtttgcctcatccaaagtaattgctcacaacaatggcctgcggcaatgtactcggcttcggcggtggaaagagctaccgaattttgtttctttgaagcccaagacaccagggatcttcctagaaattgacaagtccataatgtgctctttcaatcaattttacatccggcataatcggtatctgaatacccaattaaatcaaaggtagatcccttggggtaccaaagcccaaacttaggagtgtatactaaatatctcatgattcttttcacggccctaaggtgaacttcctttggatttgcctggaaccttgcacacatgctgtaacaccccagggtccaccaacaccccggaatgctactaaacaacacttctaacatttatatataaaatttcggcagcatcccccttgcaaaattgcataaatgagggggcaacagtgtataaacatatatcatgacaaaagcatactaagtattattaatcggctagcaaagagaagttaaacatacgacatgaagtgaatttactagtgcgcacgactagttaaaaaaacaaacttcctttgacaataagtttctaattaaatcatggctgcgcctgggcagcgttattgtgagagtgaaagtggacgtgctgctactcccctcattcccaatatgtatcaagtacctgcattgagtaatgcaagagtgagatgacacatctcagcaagtaaaataatatcaaactgtttaaccacataagaacattgttttaccaccacttgattccacaaccttcttattacgaaggtgcagcacgtatacaacgtacaacacacctagtcaccacacctcgcaggtagaaaccacaatagtaacatagtaatgtcacacttcatatatacctcatgagtgcaaatgtctgcaaatgcaaggatgacttct

SEQ ID NO: 38785 - DNA, 881 bp, Zea Mays
gccgtgcgcctcacatcttccctccgccagtccgttgacaccccccccccccccccccccctcggccatccaccggagatgggcgccgccggcaagcctcctcccctcgtctgcttcaaatggccgtggggccctaatcctatcccatcggcgagctccagccccagcccctgcggcgacctcgagctcccctggctcttcaagtccatccgcaccctcgcgcagggcctcctcatcgccggcgacatcccctcccccgcctcttctcccagcggaggagtaaggggcgttcagaggcgcacgggtgccgcggtggtggaggtggaccgcggggacgctgaacagcgcgccctggcggcatcgctcgcgagcgggaggcccgccacggtgctggagttctactccccgcgctgccgcctgtgcgcctctttgcagggcctcgttcgcgagctccaagacggtgccagtggctccgccagtttcgtgctcgctgacgccgaggacgaccggtggctccccgagatacgtcccttgcttcgtgctcctggacaagcacggtagagctctagcgaagactggagtaccaaccagccggcagcacgttgtcgccggtctccatcacctcctgaggatgcagcagccatccggactggaaggaaaccagaatgcgcctccgtcatgaagcccaaatacctgagcaaggcctgtattgacaaagaaaaattttcagaatgtgccttttgtttttgcaagcatgaacaatgggcaaacattgatgcgttaattctttagctggtaagtacagattgaagttggtgcaaaagcaaaaggcaggtggtattttttttatgatatccgccttgaaataaccttggaatttg

SEQ ID NO: 38786 - DNA, 2088 bp, Zea Mays
tgccacgtcatgtcgcgccaaagcttgtcaaatacagcggtcccacatcagtacgtcaccaatcgaactgaatggaccagtcgacgtcatcgcctccctcgcctatccgctcggccgttggcgctcaccaaaaccacccagaagcctccgcttgaccgcttcactcgctttccgcccgccgcgccatgagcgccgccgcctgcctgttcgctgccgccgtctccctatcattcccgtcgacctccgcaccctcttccgcaagacgccgccgcctccggagccccaccaccctcctccgctgctccccgactcgccgccgtgggccggtccggcggacactcgacgagcggctgctcgaggccgcgccggcggagaccgaagacgtccaaaccgctgttgatgtagaggatggaggagggatcgctgagggcgatgaagtgggaacagaggagatggaggagctggagcagcgaccgccgacgagggctttcgtgaagagcaggcggcagcggcaggaagaggaggaagccgcggcggggcaagaccggttcaagctcatcaatggcaaagagatatttcaagagaaggcttatctggttggtgttgagtgcaaacggacaggagggaacctgttcggcatagaggagtcccttaaggagctggagcagttggctgatacggcgggccttctggtagtcggctcaacctatcagaagctttctaccccaaatccaaggacttacattggttcaggaaaggtttctgaaatcaggactgcaatccaagcacttgatgttgagactgtaattttagacgatgagttatcccctggacaactacgtaacttggaaaagtcatttggtgggagtgtccgagtctgtgatcgaactgctcttattcttgatatttttaatcaaagggcagcaacacatgaagcttctttacaggttactttggcacagatggaatatcaacttcctaggttgacgaaaatgtggagtcacctggaacggcaggctggaggtcaagttaagggtatgggtgagaagcaaattgaagttgacaagcgcatcttgagaactcaaataagtgccttgaggaaagaattggaatctgtacggaaacaccgaaagttgtaccgcaaccgtcgccaatcagttcctattcctgttgtttctctggtaggatatacaaatgctggaaaaagtacactcctgaaccgcttaactggagctgatgtgcttgcagaggataagttatttgccacattagatccaactactagaagggttttgatgaagaatgggactgagttccttctaactgataccgtcggattcattcagaaattacccactatgctggtagcagcatttagagcaacactagaagagatatcggaatcatcagttatagttcatcttgtggacattagccatcctttagctcaacaacagatagatgctgttgaaagagtactgaaggagttggatgtcgagtcaatccccaaattagtcgtgtggaataagattgacaatacggatgaaccattgagtgtaaaagaggaggctcagaaacaaggaataatctgcatatcagcgatgaatggtgatggtttggaagatttatgtaatgcagttcaagcaaagttgaaagactcgatggttcctatagaagcttttgtcccatatgacaaaggagatctcctgaatgacatacataaggttggaatggttgaaaaaatggagtacaaggaaagtgggacatttgtaaaagctcatgtgcctctacctctggcaaggcttctcacacctctacggcagcaggtggcagccactgtgtgatgtgcatgtccccgatcccttgatgccattggcactcacaaaattaccacatcttgtagattcacaaaaggaatagctttgctgtagaaaacttagattatcttcattgtgtttctacggttctaccagagtaccgtatcaacaggtgcacaggactagatagctgtatgtacgcacaacagaaatgtaaatgttctcagcagaatttaagccccgtttggtttgggtaaaaacaaagaaaaaa

SEQ ID NO: 38787 - DNA, 1352 bp, Zea Mays
accaatcgaactgaatggaccagtcgacgtcatcgcctccctcgcctatccgctcggccgttggcgctcaccaaaaccacccagaagcctccgcttgaccgcttcactcgctttccgcccgccgcgccatgagcgccgccgcctgcctgttcgctgccgccgtctccctatcattcccgtcgacctccgcaccctcttccgcaagacgccgccgcctccggagccccaccaccctcctccgctgctccccgactcgccgccgtgggccggtccggcggacactcgacgagcggctgctcgaggccgcgccggcggagaccgaagacgtccaaaccgctgttgatgtagaggatggaggagggatcgctgagggcgatgaagtgggaacagaggagatggaggagctggagcagcgaccgccgacgagggctttcgtgaagagcaggcggcagcggcaggaagaggaggaagccgcggcggggcaagaccggttcaagctcatcaatggcaaagagatatttcaagagaaggcttatctggttggtgttgagtgcaaacggacaggagggaacctgttcggcatagaggagtcccttaaggagctggagcagttggctgatacggcgggccttctggtagtcggctcaacctatcagaagtaagcttctgtttgacgggaacatctcgactgagcctgcactgtgctctactagcaatcgtggttacacgttctcaccatagataagatgggacaccacggaaaaactgagatgcctggtcaatctaattcgtggtccacagaaacttcacgggcaacttggatagatgaaatgatactgttagttcagattttcaaaatgtactctgcagctgttagggcctaagaaggcccacggaggactgcagcagcagcaacgatgggccctcgaaggggattagataaggatagttagaaataagattagaagtttggttgagattatttagaagattagttgagattatctaggaaggtttcttggatagatgaaatgctactgttagttcagtttttcaaaatgtactctgcagctgttagggcctaaggaggcccacggaggggctgcggcagcagcaaccatgggccctccaaggggattagataaagatagttagagataagattagaagtttggttaagattatttaggagattagttgagattatctaggaagtttatcagttagtagtttgttgagagtttttagaagagttttaaggagatagaatctctagctagataggggcggctagccggcctatttatgtaatcaatgaatgagaaataaaacagacaagaattagaagggag

SEQ ID NO: 38788 - DNA, 1937 bp, Zea Mays
accaatcgaactgaatggaccagtcgacgtcatcgcctccctcgcctatccgctcggccgttggcgctcaccaaaaccacccagaagcctccgcttgaccgcttcactcgctttccgcccgccgcgccatgagcgccgccgcctgcctgttcgctgccgccgtctccctatcattcccgtcgacctccgcaccctcttccgcaagacgccgccgcctccggagccccaccaccctcctccgctgctccccgactcgccgccgtgggccggtccggcggacactcgacgagcggctgctcgaggccgcgccggcggagaccgaagacgtccaaaccgctgttgatgtagaggatggaggagggatcgctgagggcgatgaagtgggaacagaggagatggaggagctggagcagcgaccgccgacgagggctttcgtgaagagcaggcggcagcggcaggaagaggaggaagccgcggcggggcaagaccggttcaagctcatcaatggcaaagaggctttctaccccaaatccaaggacttacattggttcaggaaaggtttctgaaatcaggactgcaatccaagcacttgatgttgagactgtaattttagacgatgagttatcccctggacaactacgtaacttggaaaagtcatttggtgggagtgtccgagtctgtgatcgaactgctcttattcttgatatttttaatcaaagggcagcaacacatgaagcttctttacaggttactttggcacagatggaatatcaacttcctaggttgacgaaaatgtggagtcacctggaacggcaggctggaggtcaagttaagggtatgggtgagaagcaaattgaagttgacaagcgcatcttgagaactcaaataagtgccttgaggaaagaattggaatctgtacggaaacaccgaaagttgtaccgcaaccgtcgccaatcagttcctattcctgttgtttctctggtaggatatacaaatgctggaaaaagtacactcctgaaccgcttaactggagctgatgtgcttgcagaggataagttatttgccacattagatccaactactagaagggttttgatgaagaatgggactgagttccttctaactgataccgtcggattcattcagaaattacccactatgctgcatttagagcaacactagaagagatatcggaatcatcagttatagttcatcttgtggacattagccatcctttagctcaacaacagatagatgctgttgaaagagtactgaaggagttggatgtcgagtcaatccccaaattagtcgtgtggaataagattgacaatacggatgaaccattgagtgtaaaagaggaggctcagaaacaaggaataatctgcatatcagcgatgaatggtgatggtttggaagatttatgtaatgcagttcaagcaaagttgaaagactcgatggttcctatagaagcttttgtcccatatgacaaaggagatctcctgaatgacatacataaggttggaatggttgaaaaaatggagtacaaggaaagtgggacatttgtaaaagctcatgtgcctctacctctggcaaggcttctcacacctctacggcagcaggtggcagccactgtgtgatgtgcatgtccccgatcccttgatgccattggcactcacaaaattaccacatcttgtagattcacaaaaggaatagctttgctgtagaaaacttagattatcttcattgtgtttctacggttctaccagagtaccgtatcaacaggtgcacaggactagatagctgtatgtacgcacaacagaaatgtaaatgttctcagcagaatttaagccccgtttggtttgggtagtcacttttagtccctaaaaatataaacatggtgactaaaatagggtaactaaatttaagttctttagtca

SEQ ID NO: 38789 - DNA, 1888 bp, Zea Mays
accaatcgaactgaatggaccagtcgacgtcatcgcctccctcgcctatccgctcggccgttggcgctcaccaaaaccacccagaagcctccgcttgaccgcttcactcgctttccgcccgccgcgccatgagcgccgccgcctgcctgttcgctgccgccgtctccctatcattcccgtcgacctccgcaccctcttccgcaagacgccgccgcctccggagccccaccaccctcctccgctgctccccgactcgccgccgtgggccggtccggcggacactcgacgagcggctgctcgaggccgcgccggcggagaccgaagacgtccaaaccgctgttgatgtagaggatggaggagggatcgctgagggcgatgaagtgggaacagaggagatggaggagctggagcagcgaccgccgacgagggctttcgtgaagagcaggcggcagcggcaggaagaggaggaagccgcggcggggcaagaccggttcaagctcatcaatggcaaagaggctttctaccccaaatccaaggacttacattggttcaggaaaggtttctgaaatcaggactgcaatccaagcacttgatgttgagactgtaattttagacgatgagttatcccctggacaactacgtaacttggaaaagtcatttggtgggagtgtccgagtctgtgatcgaactgctcttattcttgatatttttaatcaaagggcagcaacacatgaagcttctttacaggttactttggcacagatggaatatcaacttcctaggttgacgaaaatgtggagtcacctggaacggcaggctggaggtcaagttaagggtatgggtgagaagcaaattgaagttgacaagcgcatcttgagaactcaaataagtgccttgaggaaagaattggaatctgtacggaaacaccgaaagttgtaccgcaaccgtcgccaatcagttcctattcctgttgtttctctggtaggatatacaaatgctggaaaaagtacactcctgaaccgcttaactggagctgatgtgcttgcagaggataagttatttgccacattagatccaactactagaagggttttgatgaagaatgggactgagttccttctaactgataccgtcggattcattcagaaattacccactatgctggtagcagcatttagagcaacactagaagagatatcggaatcatcagttatagttcatcttgtggacattagccatcctttagctcaacaacagatagatgctgttgaaagagtactgaaggagttggatgtcgagtcaatccccaaattagtcgtgtggaataagattgacaatacggatgaaccattgagtgtaaaagaggaggctcagaaacaaggaataatctgcatatcagcgatgaatggtgatggtttggaagatttatgtaatgcagttcaagcaaagttgaaagactcgatggttcctatagaagcttttgtcccatatgacaaaggagatctcctgaatgacatacataaggttggaatggttgaaaaaatggagtacaaggaaagtgggacatttgtaaaagctcatgtgcctctacctctggcaaggcttctcacacctctacggcagcaggtggcagccactgtgtgatgtgcatgtccccgatcccttgatgccattggcactcacaaaattaccacatcttgtagattcacaaaaggaatagctttgctgtagaaaacttagattatcttcattgtgtttctacggttctaccagagtaccgtatcaacaggtgcacaggactagatagctgtatgtacgcacaacagaaatgtaaatgttctcagcagaatttaagccccgtttggtttgggtaaaaacaaagaaaaaa

SEQ ID NO: 38790 - DNA, 1981 bp, Zea Mays
accaatcgaactgaatggaccagtcgacgtcatcgcctccctcgcctatccgctcggccgttggcgctcaccaaaaccacccagaagcctccgcttgaccgcttcactcgctttccgcccgccgcgccatgagcgccgccgcctgcctgttcgctgccgccgtctccctatcattcccgtcgacctccgcaccctcttccgcaagacgccgccgcctccggagccccaccaccctcctccgctgctccccgactcgccgccgtgggccggtccggcggacactcgacgagcggctgctcgaggccgcgccggcggagaccgaagacgtccaaaccgctgttgatgtagaggatggaggagggatcgctgagggcgatgaagtgggaacagaggagatggaggagctggagcagcgaccgccgacgagggctttcgtgaagagcaggcggcagcggcaggaagaggaggaagccgcggcggggcaagaccggttcaagctcatcaatggcaaagagatatttcaagagaaggcttatctggttggtgttgagtgcaaacggacaggagggaacctgttcggcatagaggagtcccttaaggagctggagcagttggctgatacggcgggccttctggtagtcggctcaacctatcagaagctttctaccccaaatccaaggacttacattggttcaggaaaggtttctgaaatcaggactgcaatccaagcacttgatgttgagactgtaattttagacgatgagttatcccctggacaactacgtaacttggaaaagtcatttggtgggagtgtccgagtctgtgatcgaactgctcttattcttgatatttttaatcaaagggcagcaacacatgaagcttctttacaggttactttggcacagatggaatatcaacttcctaggttgacgaaaatgtggagtcacctggaacggcaggctggaggtcaagttaaggataagtgccttgaggaaagaattggaatctgtacggaaacaccgaaagttgtaccgcaaccgtcgccaatcagttcctattcctgttgtttctctggtaggatatacaaatgctggaaaaagtacactcctgaaccgcttaactggagctgatgtgcttgcagaggataagttatttgccacattagatccaactactagaagggttttgatgaagaatgggactgagttccttctaactgataccgtcggattcattcagaaattacccactatgctggtagcagcatttagagcaacactagaagagatatcggaatcatcagttatagttcatcttgtggacattagccatcctttagctcaacaacagatagatgctgttgaaagagtactgaaggagttggatgtcgagtcaatccccaaattagtcgtgtggaataagattgacaatacggatgaaccattgagtgtaaaagaggaggctcagaaacaaggaataatctgcatatcagcgatgaatggtgatggtttggaagatttatgtaatgcagttcaagcaaagttgaaagactcgatggttcctatagaagcttttgtcccatatgacaaaggagatctcctgaatgacatacataaggttggaatggttgaaaaaatggagtacaaggaaagtgggacatttgtaaaagctcatgtgcctctacctctggcaaggcttctcacacctctacggcagcaggtggcagccactgtgtgatgtgcatgtccccgatcccttgatgccattggcactcacaaaattaccacatcttgtagattcacaaaaggaatagctttgctgtagaaaacttagattatcttcattgtgtttctacggttctaccagagtaccgtatcaacaggtgcacaggactagatagctgtatgtacgcacaacagaaatgtaaatgttctcagcagaatttaagccccgtttggtttgggtaaaaacaaagaaaaaa

SEQ ID NO: 38791 - DNA, 1503 bp, Zea Mays
gtagtttgttttcctgaaaaatattaatggcgctcaacaaggagtacacgtacgcggagctggagaaggagccgtactggccgttcgagaagctgcgggtctccatcaccggggccggcgggttcatcgcctcccacatcgcgcgccgcctcaagggcgagggccactacgtcgtcgcctccgactggaagaggaacgagcacatgcccgaggacatgttctgccacgagttccacctcgtggacctgagggtcatggacaactgcctcaaggtcaccacgggggttgaccacgtgttcaacctcgcggctgacatgggtgggatggggttcatccagtccaaccactccgtcatcatgtacaacaacaccatgatcagctttaacatgcttgaggctgctagaattaacggcgtcaagaggttcttctatgcatcaagtgcctgcatctaccctgagttcaagcagctggaaactgtagttagcttgaaggagtccgatgcttggcctgccgagcctcaagatgcctatggcctggaaaaactcgcgactgaggagctgtgcaagcactatacaaaggattttggcatcgagtgccggattggtcgctttcacaacatatatggtcccttcggcacatggaaaggtggaagggagaaggcgcctgctgctttctgcaggaaggctctgacctccacagggcgctttgagatgtggggtgatggcctgcaaaccagatccttcacatttattgatgaatgtgttgaaggtgtccttaggttaacaaagtccgatttccgtgagcctgtaaacattggaagcgacgaaatggtgagcatgaacgagatggcggaaatggtcctgagctttgagaacaagcagctgcccatccaccacatccccgggccggagggcgtgcgtgggcgcaactcagacaacacgctcatcaaggagaagcttggctgggctccgactatgaggctgaaggacgggctgaggatcacgtactcctggatcaaggagcagcttgagaaggagaaggccgagggcatggatctgtcggtctacggatcatccaaggtcgtgcagacacaggccccggttcagctcggctccctccgcgccgctgatggcaaggagtgaactttggctgcgccggtcagttgcagggcatgatataccagtaatacacagttgtttcagtttccatgatttgtagtcaccatttcttgattcacatttgactccacaagagaagaccatttggacgatggatattttgtcagaagttacgggatttagttcaaatttgaactgaatacaaaatatcctgacacgatatctgtcgtccaaacacttataataatttccacgctgttttttttcctcttgtgtgcctgtacaatagaatatttcagacttacaacacacatgtaaactggtgtcactttatttcacagaaatagcaatgaataaaataaggttaagcagtcttgaaatcata

SEQ ID NO: 38792 - DNA, 1373 bp, Zea Mays
aaatgaatttcgaaataaataaataaaaagaaaaccctccataaccctaaggcccactaggggcccatctacctaaccctatcagtcgcgcgtccctggcttctctcccagccgcagccgccgccgccgcctctctctcccttccctcttctctctgccctcacctctctcccccttccatcgcctcgctagtaacaggtcaccgtgtgtgtgcgcgccatggggattcatctgtcgccgcctgccctcgccttctgcctctcggcgcccactcggttccagtggccgcttcgaggaggcgctcgcgcgcatcgaggagctccgggagcgcgacactggcgccgacgacagcagcacagcctcgtcgttcttgagcgacggagaggcggcgtcgcggctagcaggcaagcagcagtcgcactccgcagatttcttgagcgacggagaggcggcgtccggtggcattcagagacgtgcgtgacggtcggaggtcgtcgagcgcgtcatccaagacaaatagcgttgttggcgatctgaggcagctggtaggcagtctaggcttgggcgcacgcgagccagagagggagggctgggagcacgtcatctccaagagcagcgacgacgtctcctacaaggcctggtgcgacaagcccacgttttcggcgatgcgatgagggttttcggcgatccgtgcttgctagttgcgctctacgatcaggcggagggggtttgagatgtgaatattccactttttcattctagaacatcaaacctgagttgctctacgatcaggcggaggttgttttgtagttgccaattgcgtacatgcattgcaacagatctgggctctagaagctgctaacttggtagcagaaagattgaggcattgcatagcaaaccactggatcaaagagtttagtgaatggccacagtgcatgttcttgagttggcatcaaagttccttccatataataataacaaaatatttgacataatgaatctgttggaggatagacttcaacatgcaaatggagccattgttttggcaacaattaaagtttttctccattcccatgactgttgttcatcaacagcaagagaagaaggaagacaagtcagacaaaacagaagacgagaagaactgatgtatccatgttcatgcttccactgttgaaatgcatattcaacatagcttgctcagctcctatctgttgtttcaacgttgatttaaaagaagagctggtagttgtgggcttttgaacaatagctggaatgatctagctagctatatgtaaatgatctagttgtgaatgatattataactgtgatgcttttgtgaatatataattgtggtgcttttgtgtttatgtgat

SEQ ID NO: 38793 - DNA, 1227 bp, Zea Mays
aaatgaatttcgaaataaataaataaaaagaaaaccctccataaccctaaggcccactaggggcccatctacctaaccctatcagtcgcgcgtccctggcttctctcccagccgcagccgccgccgccgcctctctctcccttccctcttctctctgccctcacctctctcccccttccatcgcctcgctagtaacaggtcaccgtgtgtgtgcgcgccatggggattcatctgtcgccgcctgccctcgccttctgcctctcggcgcccactcggttccagtggccgcttcgaggaggcgctcgcgcgcatcgaggagctccgggagcgcgacactggcgccgacgacagcagcacagcctcgtcgttcttgagcgacggagaggcggcgtcgcggctagcaggcaagcagcagtcgcactccgcagatttcttgagcgacggagaggcggcgtccggtggcattcagagacgtgcgtgacggtcggaggtcgtcgagcgcgtctagatagcatccaagacaaatagcgttgttggcgatctgaggcagctggtaggcagtctaggcttgggcgcacgcgagccagagagggagggctgggagcacgtcatctccaagagcagcgacgacgtctcctacaaggcctggtgcgacaagcccacgttgccaattgcgtacatgcattgcaacagatctgggctctagaagctgctaacttggtagcagaaagattgaggcattgcatagcaaaccactggatcaaagagtttagtgaatggccacagtgcatgttcttgagttggcatcaaagttccttccatataataataacaaaatatttgacataatgaatctgttggaggatagacttcaacatgcaaatggagccattgttttggcaacaattaaagtttttctccattcccatgactgttgttcatcaacagcaagagaagaaggaagacaagtcagacaaaacagaagacgagaagaactgatgtatccatgttcatgcttccactgttgaaatgcatattcaacatagcttgctcagctcctatctgttgtttcaacgttgatttaaaagaagagctggtagttgtgggcttttgaacaatagctggaatgatctagctagctatatgtaaatgatctagttgtgaatgatattataactgtgatgcttttgtgaatatataattgtggtgcttttgtgtttatgtgat

SEQ ID NO: 38794 - DNA, 1377 bp, Zea Mays
aaatgaatttcgaaataaataaataaaaagaaaaccctccataaccctaaggcccactaggggcccatctacctaaccctatcagtcgcgcgtccctggcttctctcccagccgcagccgccgccgccgcctctctctcccttccctcttctctctgccctcacctctctcccccttccatcgcctcgctagtaacaggtcaccgtgtgtgtgcgcgccatggggattcatctgtcgccgcctgccctcgccttctgcctctcggcgcccactcggttccagtggccgcttcgaggaggcgctcgcgcgcatcgaggagctccgggagcgcgacactggcgccgacgacagcagcacagcctcgtcgttcttgagcgacggagaggcggcgtcgcggctagcaggcaagcagcagtcgcactccgcagatttcttgagcgacggagaggcggcgtccggtggcattcagagacgtgcgtgacggtcggaggtcgtcgagcgcgtatagcatccaagacaaatagcgttgttggcgatctgaggcagctggtaggcagtctaggcttgggcgcacgcgagccagagagggagggctgggagcacgtcatctccaagagcagcgacgacgtctcctacaaggcctggtgcgacaagcccacgttttcggcgatgcgatgagggttttcggcgatccgtgcttgctagttgcgctctacgatcaggcggagggggtttgagatgtgaatattccactttttcattctagaacatcaaacctgagttgctctacgatcaggcggaggttgttttgtagttgccaattgcgtacatgcattgcaacagatctgggctctagaagctgctaacttggtagcagaaagattgaggcattgcatagcaaaccactggatcaaagagtttagtgaatggccacagtgcatgttcttgagttggcatcaaagttccttccatataataataacaaaatatttgacataatgaatctgttggaggatagacttcaacatgcaaatggagccattgttttggcaacaattaaagtttttctccattcccatgactgttgttcatcaacagcaagagaagaaggaagacaagtcagacaaaacagaagacgagaagaactgatgtatccatgttcatgcttccactgttgaaatgcatattcaacatagcttgctcagctcctatctgttgtttcaacgttgatttaaaagaagagctggtagttgtgggcttttgaacaatagctggaatgatctagctagctatatgtaaatgatctagttgtgaatgatattataactgtgatgcttttgtgaatatataattgtggtgcttttgtgtttatgtgat

SEQ ID NO: 38795 - DNA, 912 bp, Zea Mays
attttcagcatgtgtaaattggcggttagatttcgttcaagaaatagcatccaagacaaatagcgttgttggcgatctgaggcagctggtaggcagtctaggcttgggcgcacgcgagccagagagggagggctgggagcacgtcatctccaagagcagcgacgacgtctcctacaaggcctggtgcgacaagcccacgttttcggcgatgcgatgagggttttcggcgatccgtgcttgctagttgcgctctacgatcaggcggagggggtttgagatgtgaatattccactttttcattctagaacatcaaacctgagttgctctacgatcaggcggaggttgttttgtagttgccaattgcgtacatgcattgcaacagatctgggctctagaagctgctaacttggtagcagaaagattgaggcattgcatagcaaaccactggatcaaagagtttagtgaatggccacagtgcatgttcttgagttggcatcaaagttccttccatataataataacaaaatatttgacataatgaatctgttggaggatagacttcaacatgcaaatggagccattgttttggcaacaattaaagtttttctccattcccatgactgttgttcatcaacagagaagaaggaagacaagtcagacaaaacagaagacgagaagaactgatgtatccatgttcatgcttccactgttgaaatgcatattcaacatagcttgctcagctcctatctgttgtttcaacgttgatttaaaagaagagctggtagttgtgggcttttgaacaatagctggaatgatctagctagctatatgtaaatgatctagttgtgaatgatattataactgtgatgcttttgtgaatatataattgtggtgcttttgtgtttatgtgat

SEQ ID NO: 38796 - DNA, 3000 bp, Zea Mays
agaagcgcaaaatttcttgctgcatttgaattatgaacttcgtttctcccctgcgctattttggttccacatgactgtgtgccttctctgctctgtactacggtgtgattctgtttgcagacactctttttttttctttctaatttcccttctttttccgccttgtttttaagttcatatgctctgagagtcttctcgctgcaaatctgagttgcttccgttttcgggcactcatagtttcctatatctccaaaggaaactgatatcggggagcaagcaaggcaaggtttctctcggaagaagcattacagtgccccacttcggcctttctgatttatttgctttgctagtcctcgttaaagttctgaccattttggtggcttggaagtgataaagtttaccaattcactaagccaattgagaaaggatagtgctaactgagctccaatggcttggcaccttgatatccttgtcatggtcactacttgtttgatttttttctcaataagcgagcaatcttcacagagcgagctgctgcagcagctcaggaagcagctggagtaccctaggcagctggaggcttggggcagcccaagcagcgatccctgctacactcaacccactgcagtgcttgcggtcacgtgtgaggaaaatgccatcagagagcttaagataatcggtgacaggatcaccaaaccgccaaagttcagtggcttttctgttcctaatgtcaccctctcagaagcctttgttttggattcgtttgttactacgctggcaaggctaactaccctaagagttgtcatcctggtgtctttgggcctatggggtcccctcccagataagatccaccgtttatcttcactggaagtgcttgatttgagctccaattttctctatggatcgatccctcccaagctgtcagtcatgtcgaagctccatactgtgacactggatggtaactacttcaatggaagtgtgccagactggcttgactcattctcgaacctcactgttcttcggttgcagagtaaccagctgaaggggtccataccggcatcgattggcaaagctgccatgcttacggagctcgcgcttgccggcaatagcatctcgggggatgttccaaatttagtcaacctaaataagcttgagatgctggatttaagggacaacaagttggatggagagcttcctgagatgcctacatcagtggtaacaatcttacttagtaaaaattcactaaagggtgaaattcctgagcagtttggtcagttgaaccggcttcagcaccttgatgtctcgttcaacttccttgtggggagtcctcccgcagagctgtttgctctccctaacatcagttatctgaatttggcggcaaatatgcttagtggttcattgttaagtagtttaacatgcagcagcaccctgggatttgtggatttgtccactaaccgactcacaggcgatctgcccagctgtctgaacggtaatttgaataacaaggtcgttaagtttgatgggaattgctttagagttgaccctgcccaccagcatgaagataaatattgccaacaatctcataatgggagaggatcaaaaaaggatgttggacttgtagtcactgttgttggcatattgtttgttattcttgtgctttctctgttgttaatggcttccaacaaaagaagctgtcagaaagttctggccgaacaacagatccagcaaaagcatacacaagataatttgttgtcaggaatgtcgtctgaactgctggtgaatgcaaggtgcatatctcaagctgtcaagttaggaacacaaatacaaccgtcatatcacatattttctttagaagaactcaaggaagcaacaaagagctttgaaaggtcagcatttttaggcgagggagcaattggaaagctgtacaagggaaggttagagaatgcaaccctgattgccataagatgtttgccattgcaccagcgatattcaattaggaatctaaagcttcgtttagatctccttgcaaagcttcgtcatccaaatttggtttgcttattggggcactgcattgatagtgcggttgatgaatcaactgtgaagagggttttccttgtgtatgaatatgtgcctggtggaactctttcttcttatctttctggaataattcctggttccttatccaatcggctaaaatcttccagtattttggttgacgaacaccatacggcaaagttgagtgactatggattatctataatcacagaggagatatacagacatgaggtaataggacaaaaggaaaaatacttgcaaaatgatgctacagaaatggaaaatttggaggatgatgtatgctcttttggttatattctactggaagtacttatgggcccaaaattacatgagaaaggtggccctttcattttgaaagatctggttgtgtcaatgtctactttggaagagcgcgatcaagttgtggatcctgtcatcattggcacttgttcacaggattcgttatccatcgtggtttcaattatgataaaatgcctgtccatcgaatgctcggctcgaccttccatggaagaagttctctggaacctgcaatatgctgcccaggtccagacaatggcggacagcgaccaacgatcagaagtttcctcacaagcttgttagcatggaaactggaaatagctcgaaactgtaatctagatcggatcaaagatgataggaagcaagaatcatgtttatatgatcttgatttgagaacaggggatgaccggatgagtgagctcggctaactgttgcttcatggctatcctgaatttgatctctccattgcaactgtttgctgctacatccaaatcaggttccttgtaaaataaatagtccaattcccacaattgatcatatcattaacaaacctaccctgaatatgaaatgtaagtataaaaaaaagcacgctaatccttttcaatggaagaaagtcctggctttatc

SEQ ID NO: 38797 - DNA, 1328 bp, Zea Mays
agagttttcaatcatttattgtgttaaggtgcatatctcaagctgtcaagttaggaacacaaatacaaccgtcatatcacatattttctttagaagaactcaaggaagcaacaaagagctttgaaaggtcagcatttttaggcgagggagcaattggaaagctgtacaagggaaggttagagaatgcaaccctgattgccataagatgtttgccattgcaccagcgatattcaattaggaatctaaagcttcgtttagatctccttgcaaagcttcgtcatccaaatttggtttgcttattggggcactgcattgatagtgcggttgatgaatcaactgtgaagagggttttccttgtgtatgaatatgtgcctggtggaactctttcttcttatctttctgcctgcagtccagacaagactctgaaatggtgtgataggctgcaagtgctgattgccattgctaaggctgttcatttcctacatacaggaataattcctggttccttatccaatcggctaaaatcttccagtattttggttgacgaacaccatacggcaaagttgagtgactatggattatctataatcacagaggagatatacagacatgaggtaataggacaaaaggaaaaatacttgcaaaatgatgctacagaaatggaaaatttggaggatgatgtatgctcttttggttatattctactggaagtacttatgggcccaaaattacatgagaaaggtggccctttcattttgaaagatctggttgtgtcaatgtctactttggaagagcgcgatcaagttgtggatcctgtcatcattggcacttgttcacaggattcgttatccatcgtggtttcaattatgataaaatgcctgtccatcgaatgctcggctcgaccttccatggaagaagttctctggaacctgcaatatgctgcccaggtccagacaatggcggacagcgaccaacgatcagaagtttcctcacaagcttgttagcatggaaactggaaatagctcgaaactgtaatctagatcggatcaaagatgataggaagcaagaatcatgtttatatgatcttgatttgagaacaggggatgaccggatgagtgagctcggctaactgttgcttcatggctatcctgaatttgatctctccattgcaactgtttgctgctacatccaaatcaggttccttgtaaaataaatagtccaattcccacaattgatcatatcattaacaaacctaccctgaatatgaaatgtaagtataaaaaaaagcacgctaatccttttcaatggaagaaagtcctggctttatc

SEQ ID NO: 38798 - DNA, 1278 bp, Zea Mays
gcaagcgtttgctctgcccacacacagttgtgtaagggtgtcagatgaagaagactcaccgggcgcgaggtagccatgcgttccggcgaagcagctgaactcggagtcggaggaatcctcggcgaccttggcaatgccgaagtcggcgatcttggcctcgtagtcctcgtcgagcaggatgttggtggacttgatgtcgcggtggatgatggccggcgtgcagtcgtggtggaggtacatgatccccttggccgcgccgagagcgatcttgctccgccgccgccagtccagctccgggcgcccgctgcccttggcctcccgccggagcgcctggtgcaggttgccgcgcggcatgtactcgtacacgataaagttgagctcgccgcgcgacagacacgcgtgaagcttgaggatgttccggtgccggaccttgccgaggatggccatctcggcggccatcactcgcgccgcgttgcccttccacagccgcttcacggccaccacgccgccgctgccgccgccacggcccttgagctccagccggtacacgcgccccgtgccgcccgacccgatcaggttctcctccccgacggcgcagatctcgtcagcatccaggtccagcgggtggaacgactccagcttccactgcccgcacccgtcgccgtgctccaggtctctcttcttgagctcctcgagcttgaagctccggtagctgataaacaggatgccggccacgagcagcagcatcgccgagacaagggccggcacgagcacaagctgcgacttcctggcgaggctgtccttgtggccgccgtccacgttgcagacgccgaggttggacctgccgtcaatgcagaggccggggttccgggcaaacgcctgggtgccgccgctgagcaccagaagccccggcggcacgttcccggtgagctggttcgaggagaagtcgatggagctgagcttgagcgcctggaggctcgtcgggatcggcccgctgagctcgttgcaggaaaggttcagcgagttgagcgacgacagcagcgacagcgaggccggaatcggcccggacagtgcgttctgggagacgtcgatctcgacgagcctcaagcagccgccgatgtcgtccggcaaggcgccgctgaacgcgttgtcctccaggtgcagcgccgtcagctgcgacaggctgccgatctccgacggtatggagccagagaaggtgttgttggataggtagagcttctgcacctgcccaagccggccgatttccggcggtattgc

SEQ ID NO: 38799 - DNA, 3743 bp, Zea Mays
cgaacatattcccctagattgctctcctgacactatcatcttccacctcccagcttcactctcaagcctccactccatcttcttgtgaagcttctcaagattctcgcatgcctttactcctcctctcactcactctcgccagcttgcttgctaaacaacctccaacgccgacgccaatgccgacagctcaactcctctaactagcctcccgccgcaattcacaagcgcccggagaaagaaaaaagaaagaaacattggaggcaccccccgatgaggccttcgccacctctgctcctgctcgtgctcctgcatttcgcgctcctgtccaccaacgccaatgggaacggcgacctgcgcggcgacgcgatggcgctgctggccctcaaggccgcgctcagctgccgcccgggcgcgctgcggtcgtggtcggtggccaatgccgggtccgtgtgcgcgtgggcgggcgtccgctgcgcggccgggcgcgtggtcgccgtcgacatcgccaacatgaacgtgtcggacggcacgcccgtgtcggcccgggtgacggggctcggcgcgctcgagaccatctcgctggccgggaacggcatcgtgggcgccgtcgccgcgtcggcgctcccggcgctgcgccacgtcaacgtgtccgggaaccagctgggcggcggcctcgacgacggctgggacttcgcgtcgctgcccggcctcgaggtgctggacgcctacgacaacaacttctcggccccgctcccgctcggcgtcgccgcgctcccgaggctccggtacctggacctcggcggcaactacttcaccggcgagatccccgcggcgtacggcgcgatgcccgcggtggagtacctgtccctcaacggcaacaacctgcaggggcgcatcccgccggagctcggcaacctcaccaccctccgggagctctacctcggctactacaacgtgttcgacggcggcatcccgccggcgctcggccggctgcgcagcctcaccgtgctggacgcctccaactgcggcctcacggggcgcgtcccggcggagctcggcgcgctcgcctccctcggcacgctcttcctccacaccaaccagctctctgggcccatcccgccggagctcggcaacctcacgtcgctcgccgcgctggacctctccaacaatgcgctcacgggcgaggtccctcgctcgctggcgtccctcacctcgctcaagctgctcaacctgttcctgaaccggctccgcggcccggtgcccgacttcatcgccgcgctgccgcgtctggagacggtgcagctgttcatgaacaacctcaccggccgcgtccccgcggggctcggcgccagcgccgcgctccggctcgtcgacctgtcctcgaaccgcctcaccggcttcatcccggagacgctctgcgcgtccggccagctccacacggccatcctcatgaacaatttcctcttcgggcccatccccggctcgctcggcacgtgcacgagcctcacgcgggtccggctcggccagaactacctcaacggcagcatccccgccgggctgctgtacctgccgcggctcagcctgctggagctccacaacaacctgctctccggcgccgtgccgtcgaacccgaacccgagcccgagcgcgtccagtttgcagctggcgcagctgaacctgtccaacaacctgctgtccggcccgttgccgagcacgctggccaacctcaccgcgctgcagacgctgcttgcgagcaacaaccggatcggtggcgccgtgccggcggagctcggggagctccggcggctcgtgaagctggacctcagcggcaacgtgctgtcggggcctatccctggggcggtggggcggtgcggcgagctgacgtatctcgatctcagcaggaacaacctgtctggggtgatccccgaggcgatcgcgagcatccgggtgctgaactacctgaacctgtcgcggaacgcgctggaggacgcggtcccggcggcgatcggggccatgagcagccttacggcggcggacttgtcgtacaacgacctgtcggggcagctcccggacacggggcagctggggtacctgaacgcgacggcgttcgcgggcaacccgaggctgtgcggcgcggtggtgggccggccgtgcaactacaccggcgggggcctgggcgtgacggcccggcgcggtggcggggccggggccggggagctgaagctggtgctggcgctggggctcctcgcctgctccgtggggttcgcggcggcggccgtgctccgcgcgcggtcgttccgccgcgtggacgggagcggcggcggcgggggcaggtggcggttcgcggcgttccacaaggtggacttcggcgtggcggaggtgatggagtgcatgaaggacggcaacgtggtagggcgcggcggcgccggggtggtgtacgcggggcgcacccggtcgggcggcgcgatcgcggtgaagcggctgcaggcgcggcggcagggcgacgacgacgacgaccgcgggttccgcgcggaggtgcggacgctgggcagcatccggcaccggaacatcgtgcggctgctggccttgtgcacgaaccgggaggcgaacgtgctggtgtacgagtacatgggcggcggcagcctcggggaggtgctgcacggcaagggcggcgcgttcctggcgtgggagcggcggtacacgatcgcgctggaggcggcgcgcgggctgtgctacctccaccacgactgcacgcccatgatcgtgcaccgggacgtcaagtccaacaacatcctcctcggcgacaacctggaggcccgcgtcgccgacttcgggctcgccaagttcctccgctccggcgccacctccgagtgcatgtccgccgtcgctggatcctacggctacatcgcccctgagtacgcgtacacgctgcgggtggacgagaagagcgacgtgtacagctacggcgtggtcctgctggagctcatcacggggcggcgccccgtggggggggacttcggggaaggggtggacatcgtgcagtgggccaagcgggccacggccggccgccgggaggccgtgccggggatcgcggaccggcggctcggcgccgcgcccaaagacgaggtggcgcacctcttcttcgtctccatgctctgcgtccaggagaacagcgtcgagcgccccaccatgcgggaggtggtgcagatgctcgccgacgagtccccgcgccgccgcgcgtcgtcgtcgtcgccgcacacgtcgccctccaccacctcctcgtcgccgtcgccgtcgccgtcgccgccgggcgtggaggagagcggcggccccgacggcggcggcaaggagccgccggccaccagctacaagctgttccccgacctgctggcctgatgaagcgcagacggacgaacggcacctgttttgccatgccactgttaattacaccccaaaaaaacacacacacgacgactcatcatcgtgcaggactgaagttacagcatgtagcgcagcagactggagctagaggttcttcaggttggtcggccgacattggagatggtgtacagggtctgatcatatgctaccgccctatagagctagctaggggattgtgggtgtggtgtccgatgcaatagcgtctcctccatcatcatagctttcgcactttgtaatctccccggtgatctttagccaccatccattgtccactagctacgactctatgtacgttactagct

SEQ ID NO: 38800 - DNA, 1432 bp, Zea Mays
ctcatatgtgcgtcaaagaagaacatcacatataatgaccaagtgtatagagataaatgtcacaatcattataacatagcggacgggtcttacaaaattaaatgataacaaataaacgaactaataattatcctttggcgccataaagttgaccgggagacgccacctagataagcttgtactcctcgtagtagacctcctcctgggctacctgttcttctcctgtggggggtatatatcgcaagggtgagctcacaaaatatcatagctcaacaagttgtgggaaataatgtgtatgaactcaccaatggtgggagttcatgtgaagtgtcaggctgataaaaagtaatggttaaagctaagcaatgcttttattaagttggtcaaattatattagcagttactgagtataagtaaataccaacccaaataatgagagattacaactagtaaataaaccacaatgcgatgcaaatgaccaattaaatttaattccataagttactcatgtgaggttctaagccgctcatgaccgtgagcacggctgatataccagttttacactctgcagaggctgcgcatctttacccacaagtcatgttacccatcagccacggggttgtacgagccccatacacctctaccaagaaagcgaagcagagtaacactacgaggcctttacaaagttccactagcttcagaaaccccgctacagtttctagagagcacaatatatgaatcccccgtctgaaaagccatcgcagcaaaatcaacccgagaacctccctataccgacaactcccctactgcccttgcccctttcgggtaaggtagtcctccactatcttttctaattagtcagccaaggctgtcccatatcacccttgtggtagcactgttttccgggtggttcttcatattctaattaacataatgatcttgtcatgaacggtaaataactcatttatgataaaagcatgatcatgaatgatgtgtatcttaacacccaaaaccacataaagcaatagcaaattctacacaaaagttcagtggtaaacaaggtataaagataaccaaactatggtgatgtattggatcccagcaaaattaacctatgcagatcataatgattaacatgaacattattggataaatggaagtgatcaagggcacaacttgccttcaacgagctactgctcagtattttccacctgttgagcacctaggtcctcaattgattgcccgtctactcgcaacaatacaaacaaatatggtatagtagaaattaacatcacaccaaacataagaacatactgtatgataatattctacgcatctaaacaagatcataggttcgagaaccactaaattcggagctacgattagatagttatgattttccgaagtttccggtgctagacatagaacatgc

SEQ ID NO: 38801 - DNA, 496 bp, Zea Mays
ctaaaactaaaacgactattattttgaaatagaggaaatataatttaatatgtatactatgtgcaccaaaagattcatgtacacttataccataagccccttccaaaaaaaataaaagtaaccgaaaacaaaaacatgtatcttttttatataaagtttgcagtcattcgctgtgaaattttaactgtccgtccaaaataaccccagcagagtgtggaaccaacagctggaatgtcggagcagatcatgtatcataatcccggactctcaaatagccttgaggatgtcgaccgccgcctggtactcggcgagggtgaggatattcggggagtccatggagacgacgtcctctgccagaaacccgtcttggtcgcggcgcagctcctcgctgccgtggcaaactagctccggcaggaccagcgttctgtgcaggccagggagcagccgttcgcggtcggtgtcgcccttgtcgcccacgagcacggccaccttggac

SEQ ID NO: 38802 - DNA, 1228 bp, Zea Mays
aaaaaaactcagacgcccaataaacccaatcgacgcctcgtaacccctccctctcctgcgctccaatgtctgacaagaaggacgtcgaggccggcacctcgccgccggcggcgcccagggttgcggcggcggctccaaagccatccacctacgtgcccatgttcgctctgcgtggcgaggaatgcgctaacctccttgcgctggtctccgccgtctcgcgcccgctcgaggacgccgtcgtggatttcctcgcacgcgtgcccccagagcgccgcttccggtttggctccgccattagcttcgtcctcgaggacaaaatgatgcttcaacctgctgagcgtttagttgcatttgcaattctgcatcaaggttattcctcacagtcggcaaatccatttcttcctctcttaataaatgttgcatgtgatgaaacttctgaggcagcagaccaggcgtttctccaacttctgttaagttcgagtaatggggacaatagtgaggttctgaagcagtctgctgttgattacttgaatggatctgattatgcatctcaggttcttttgccaagagaacatctagagaaacaatgttcttatgatgctgcacgacctctgcccttctctagtaatttcagagatgccactgtcagaagtgttattcctgacccatatgtttttcaaagcttcggtagttcatcggaggtgtcctcaataataccaaatagagatgacatggttgctactttacttcaacaaacatcacttggactgcctcctcaatggatacgaccgtctccaccaagacttgaaatttttgaaggggagttacagtggctgaacatagacaacaaccatgagctactatgggacggtaccatgtgtgcagacactagccgaggtgctgtgattcgagatttgtttgaacaagcttgtaaaggtcccctttcaatggcccagcgagagtgtaattgttggccaccggaagcattgagtatcatgtgttgctgagtgttaattgtgattgtgcattgtccaagggaagcaccttgtggaatatgttagcgtgtgatgactaagatgacacgtgatggtgtgcaaaggcttagtgtcagctaggcaacttgggtccccagtgcttaacgcaacaaaggactggccagtgcaagtagtctcaatctgaggcgacttgtggtgatacgaggggcaactagagaagtccatgggacatg

SEQ ID NO: 38803 - DNA, 923 bp, Zea Mays
aaaaaaactcagacgcccaataaacccaatcgacgcctcgtaacccctccctctcctgcgctccaatgtctgacaagaaggacgtcgaggccggcacctcgccgccggcggcgcccagggttgcggcggcggctccaaagccatccacctacgtgcccatgttcgctctgcgtggcgaggaatgcgctaacctccttgcgctggtctccgccgtctcgcgcccgctcgaggacgccgtcgtggatttcctcgcacgcgtgcccccagagcgccgcttccggtttggctccgccattagcttcgtcctcgaggttgcatgtgatgaaacttctgaggcagcagaccaggcgtttctccaacttctgttaagttcgagtaatggggacaatagtgaggttctgaagcagtctgctgttgattacttgaatggatctgattatgcatctcaggttcttttgccaagagaacatctagagaaacaatgttcttatgatgctgcacgacctctgcccttctctagtaatttcagagatgccactgtcagaagtgttattcctgacccatatgtttttcaaagcttcggtagttcatcggaggtgtcctcaataataccaaatagagatgacatggttgctactttacttcaacaaacatcacttggactgcctcctcaatggatacgaccgtctccaccaagacttgaaatttttgaaggggagttacagtggctgaacatagacaacaaccatgagctactatgggacggtaccatgtgtgcagacactagccgaggtgctgtgattcgagatttgtttgaacaagcttgtaaaggtcccctttcaatggcccagcgagagaaatgcatagttatgcctcctatggatgcattcctcggcaaggtctacaacagcgcaatcgaaaac

SEQ ID NO: 38804 - DNA, 2237 bp, Zea Mays
aaaaaaactcagacgcccaataaacccaatcgacgcctcgtaacccctccctctcctgcgctccaatgtctgacaagaaggacgtcgaggccggcacctcgccgccggcggcgcccagggttgcggcggcggctccaaagccatccacctacgtgcccatgttcgctctgcgtggcgaggaatgcgctaacctccttgcgctggtctccgccgtctcgcgcccgctcgaggacgccgtcgtggatttcctcgcacgcgtgcccccagagcgccgcttccggtttggctccgccattagcttcgtcctcgaggacaaaatgatgcttcaacctgctgagcgtttagttgcatttgcaattctgcatcaaggttattcctcacagtcggcaaatccatttcttcctctcttaataaatgttgcatgtgatgaaacttctgaggcagcagaccaggcgtttctccaacttctgttctgaagcagtctgctgttgattacttgaatggatctgattatgcatctcaggttcttttgccaagagaacatctagagaaacaatgttcttatgatgctgcacgacctctgcccttctctagtaatttcagagatgccactgtcagaagtgttattcctgacccatatgtttttcaaagcttcggtagttcatcggaggtgtcctcaataataccaaatagagatgacatggttgctactttacttcaacaaacatcacttggactgcctcctcaatggatacgaccgtctccaccaagacttgaaatttttgaaggggagttacagtggctgaacatagacaacaaccatgagctactatgggacggtaccatgtgtgcagacactagccgaggtgctgtgattcgagatttgtttgaacaagcttgtaaaggtcccctttcaatggcccagcgagagaaaattatcgaatatctgaggaaggatgggaagctacttaatcattgtggaatgacaccacagaagctccctgtatgtgcaagatgttgaataggttgcttgctttgctattggtttgactgtctgaccattttatgtctttaggaccttgttgaacataatccacttatagctgtcgatgttctttcaaagctaatcaactctccggacgtggatgcgtacacatactagccttttcatctgttttatctttatccttgtaattattgtgcttttttctgcatgccagatttcacacttgccttattgttcaacagatactttgatgctattgtccatatggatatgagcttgcattcaatggaagtagtaaacaggctcactactgcagtagttttaccaccaggatttgttcacgactatatctcaaactgcattcgatcatgtgaagacattaaggacaagtatatgcaaaatagactagtgagactagtatgtgtctttctacagagcctcattcggaacaagataatagatgtgcaagatctcttcatcgaggtgcaagcattttgcatcgccttctcgcgaataagggaggcagtggggttgttcaggctcctgaaatctgtagaatgaagagcgctctgcgatctgttggctgctggattctataaatagaaacttccattgtgtacattcatggctctgcttttgtttttccagcgtccaagagttgaaaagatgtggtggccttggtccagggttgggtgtaaatggtatggatattttccgatgatattcgatatcaaatccaattaggcctagtttgttttcgcctgaacagcccgttctgggcctctttctgggtggaaccaatcagcctggtttggtttagtctgatatagtttgctggagctgttcgtttgtcttgggccacaaagccgcctgtttttaactcctctgcctcaaatccttagcccaaaatgaacccaggtgagcaaccattcggattgattcctgtgctggaagttggctgccgaccaggaatgagtgacagcttatgatccactcaatcctgggctggtttggttcctggcttgcttcaatcctggcctgccaaacaggacgagttctctagagtttggatattcaacttatctgaatactcaaattgctatcgtatatttatgatatcgatatccagttgtatcctatccgatatagttgacactatccaaatttgaacatgattcgaatggcaaacaaatataaacaatatttgatccgtttgcatcactactttggg

SEQ ID NO: 38805 - DNA, 1951 bp, Zea Mays
aaaaaaactcagacgcccaataaacccaatcgacgcctcgtaacccctccctctcctgcgctccaatgtctgacaagaaggacgtcgaggccggcacctcgccgccggcggcgcccagggttgcggcggcggctccaaagccatccacctacgtgcccatgttcgctctgcgtggcgaggaatgcgctaacctccttgcgctggtctccgccgtctcgcgcccgctcgaggacgccgtcgtggatttcctcgcacgcgtgcccccagagcgccgcttccggtttggctccgccattagcttcgtcctcgaggacaaaatgatgcttcaacctgctgagcgtttagttgcatttgcaattctgcatcaaggttattcctcacagtcggcaaatccatttcttcctctcttaataaatgttgcatgtgatgaaacttctgaggcagcagaccaggcgtttctccaacttctgttaagttcgagtaatggggacaatagtgaggttctgaagcagtctgctgttgattacttgaatggatctgattatgcatctcagggtgtcctcaataataccaaatagagatgacatggttgctactttacttcaacaaacatcacttggactgcctcctcaatggatacgaccgtctccaccaagacttgaaatttttgaaggggagttacagtggctgaacatagacaacaaccatgagctactatgggacggtaccatgtgtgcagacactagccgaggtgctgtgattcgagatttgtttgaacaagcttgtaaaggtcccctttcaatggcccagcgagagaaaattatcgaatatctgaggaaggatgggaagctacttaatcattgtggaatgacaccacagaagctccctgaccttgttgaacataatccacttatagctgtcgatgttctttcaaagctaatcaactctccggacgtggatgcatactttgatgctattgtccatatggatatgagcttgcattcaatggaagtagtaaacaggctcactactgcagtagttttaccaccaggatttgttcacgactatatctcaaactgcattcgatcatgtgaagacattaaggacaagtatatgcaaaatagactagtgagactagtatgtgtctttctacagagcctcattcggaacaagataatagatgtgcaagatctcttcatcgaggtgcaagcattttgcatcgccttctcgcgaataagggaggcagtggggttgttcaggctcctgaaatctgtagaatgaagagcgctctgcgatctgttggctgctggattctataaatagaaacttccattgtgtacattcatggctctgcttttgtttttccagcgtccaagagttgaaaagatgtggtggccttggtccagggttgggtgtaaatggtatggatattttccgatgatattcgatatcaaatccaattaggcctagtttgttttcgcctgaacagcccgttctgggcctctttctgggtggaaccaatcagcctggtttggtttagtctgatatagtttgctggagctgttcgtttgtcttgggccacaaagccgcctgtttttaactcctctgcctcaaatccttagcccaaaatgaacccaggtgagcaaccattcggattgattcctgtgctggaagttggctgccgaccaggaatgagtgacagcttatgatccactcaatcctgggctggtttggttcctggcttgcttcaatcctggcctgccaaacaggacgagttctctagagtttggatattcaacttatctgaatactcaaattgctatcgtatatttatgatatcgatatccagttgtatcctatccgatatagttgacactatccaaatttgaacatgattcgaatggcaaacaaatataaacaatatttgatccgtttgcatcactactttggg

SEQ ID NO: 38806 - DNA, 629 bp, Zea Mays
ggagtccagggtggtgagactacctcgaaatatatgtttgggatttaagtgttctagcatgtgaagattagggggttctgaagcagtctgctgttgattacttgaatggatctgattatgcatctcaggttcttttgccaagagaacatctagagaaacaatgttcttatgatgctgcacgacctctgcccttctctagtaatttcagagatgccactgtcagaagtgttattcctgacccatatgtttttcaaagcttcggtagttcatcggaggtgtcctcaataataccaaatagagatgacatggttgctactttacttcaacaaacatcacttggactgcctcctcaatggatacgaccgtctccaccaagacttgaaatttttgaaggggagttacagtggctgaacatagacaacaaccatgagctactatgggacggtaccatgtgtgcagacactagccgaggtgctgtgattcgagatttgtttgaacaagcttgtaaaggtcccctttcaatggcccagcgagagagcagtagatgagattaaagtccccagccaccatccaaggaccatcacatgcatttctgatgtctctaagttcctggaggaactgaatttttt

SEQ ID NO: 38807 - DNA, 1421 bp, Zea Mays
gtccactcctggctctagcaatcatagttgttaaggcgtcgcttaagcggtaaggcgaggtttaggggcaaggcgtccgccattatggccctttattttccctctactttaatatatgggtgcgcagtcctcctgcgctctttcgaaaaaaaaaaaaaaaaaggcgtccgcctcgccttgtggccgtgactaaggcgtccgccttagacaataaggcgttgccttagcaccttgagtgtcgccttagcgacgctttgcggacgccttggatggctgtcctccctcaaaaattatcgaatatctgaggaaggatgggaagctacttaatcattgtggaatgacaccacagaagctccctgaccttgttgaacataatccacttatagctgtcgatgttctttcaaagctaatcaactctccggacgtggatgcatactttgatgctattgtccatatggatatgagcttgcattcaatggaagtagtaaacaggctcactactgcagtagttttaccaccaggatttgttcacgactatatctcaaactgcattcgatcatgtgaagacattaaggacaagtatatgcaaaatagactagtgagactagtatgtgtctttctacagagcctcattcggaacaagataatagatgtgcaagatctcttcatcgaggtgcaagcattttgcatcgccttctcgcgaataagggaggcagtggggttgttcaggctcctgaaatctgtagaatgaagagcgctctgcgatctgttggctgctggattctataaatagaaacttccattgtgtacattcatggctctgcttttgtttttccagcgtccaagagttgaaaagatgtggtggccttggtccagggttgggtgtaaatggtatggatattttccgatgatattcgatatcaaatccaattaggcctagtttgttttcgcctgaacagcccgttctgggcctctttctgggtggaaccaatcagcctggtttggtttagtctgatatagtttgctggagctgttcgtttgtcttgggccacaaagccgcctgtttttaactcctctgcctcaaatccttagcccaaaatgaacccaggtgagcaaccattcggattgattcctgtgctggaagttggctgccgaccaggaatgagtgacagcttatgatccactcaatcctgggctggtttggttcctggcttgcttcaatcctggcctgccaaacaggacgagttctctagagtttggatattcaacttatctgaatactcaaattgctatcgtatatttatgatatcgatatccagttgtatcctatccgatatagttgacactatccaaatttgaacatgattcgaatggcaaacaaatataaacaatatttgatccgtttgcatcactactttggg

SEQ ID NO: 38808 - DNA, 1159 bp, Zea Mays
ctcttccctctctgctctcccccaaaaattatcgaatatctgaggaaggatgggaagctacttaatcattgtggaatgacaccacagaagctccctgaccttgttgaacataatccacttatagctgtcgatgttctttcaaagctaatcaactctccggacgtggatgcatactttgatgctattgtccatatggatatgagcttgcattcaatggaagtagtaaacaggctcactactgcagtagttttaccaccaggatttgttcacgactatatctcaaactgcattcgatcatgtgaagacattaaggacaagtatatgcaaaatagactagtgagactagtatgtgtctttctacagagcctcattcggaacaagataatagatgtgcaagatctcttcatcgaggtgcaagcattttgcatcgccttctcgcgaataagggaggcagtggggttgttcaggctcctgaaatctgtagaatgaagagcgctctgcgatctgttggctgctggattctataaatagaaacttccattgtgtacattcatggctctgcttttgtttttccagcgtccaagagttgaaaagatgtggtggccttggtccagggttgggtgtaaatggtatggatattttccgatgatattcgatatcaaatccaattaggcctagtttgttttcgcctgaacagcccgttctgggcctctttctgggtggaaccaatcagcctggtttggtttagtctgatatagtttgctggagctgttcgtttgtcttgggccacaaagccgcctgtttttaactcctctgcctcaaatccttagcccaaaatgaacccaggtgagcaaccattcggattgattcctgtgctggaagttggctgccgaccaggaatgagtgacagcttatgatccactcaatcctgggctggtttggttcctggcttgcttcaatcctggcctgccaaacaggacgagttctctagagtttggatattcaacttatctgaatactcaaattgctatcgtatatttatgatatcgatatccagttgtatcctatccgatatagttgacactatccaaatttgaacatgattcgaatggcaaacaaatataaacaatatttgatccgtttgcatcactactttggg

SEQ ID NO: 38809 - DNA, 3435 bp, Zea Mays
atcactgtccccgtcccatcagacatacggtaaaaaacagtcggtattttgctaaagtaaagtcccttccaccttacacgtgcgcagtgcgtccactgtcgtgggccctagaagacgaatcgctcctgtcacgctgtctgctcccacaggcaacagccacgtcttccgcgccgcagtgtccgatcgatcgatcccttctaggggaggggaattcaggacaggaggaggccaggttctcgccccgcaataggacgccgatcgattccggatcttagctcgagagcccggtgcccccttctcggtgctcgttgcaggattttcggggtagtccaaagaaataagaaacatgccagagacttatgttgatgagcaaccaaagggtgtgtctcggaatcgtccacctgcacatatgaatggtgatgaagaaaaggtttatcctggccaactcccagtgttgacctgggaacataagctaacccatgttagacatgatttgccgccattcagacttacatggagagagataatgcagctggctggtattggtttacgtcttagtcgacatatccttgaggaaacttcaaaagggcgaattgctgttattgatcctatgaaaaagcgggctgcaagatctggtcagggtgtcccacttggtggtattggtgcaggaagtattggaagaagctacaaaggcgatttccaacgttggcaattgtttccaggatcttgtgaagataatgctgtattggcaaatcaattttctgccttcatttcccgccaagatggtaaaaaatattccacagtgttgcatcctgggaaaccagatttgccgaaaggaagtgacatttcaggaattggatcctgggactggaatatgagtggacaacaatctacttaccatgccctttaccctagggcttggacagtatatgatggagaacctgatcctgagctcaatatagtgtgccgtcagatatctccaattattccacacaattatcaacagagcagctatccagttgcagtgttcacttttaccgtaacaaactcaggacatacagctgctgatgtgactttgctttttacatgggctaactctgttggtggaaaatctgaactcaccggatatcattccaactccagtatgatagaaaaggatggtgttcatggcatactattacatcacagaacagcagatggtcaaccacatgtaacttttgtgatagcagcacaggagaaagaggatatccttatatctgaatgtccttactttgtgatatctgggagctccgcatctgatgaattcacagctaaagatatgtggaattctgtgaaagagcatggatcttttgatcatcttgatcccatcaagacatcgatgtgctccagaccaggatcatcaataggggcagctatcgctgcttcagttaagctggctcccaaggcaacccaggatatttcattttcacttgcatgggcttgtcctgaagtgaagttctctagtgggaaaacctatcataggcgttacaccaaattttatggcacagacggtgatgcagcagcagcccttgctcacgatgccattcttgagcatgcttcctgggagagacaaattgaggagtggcaggatcctattttgcaagatgagaggtttcctgcttggtatccagttacacttttcaatgaactatactatcttaatgctggaggaactatatggacagatggattaccaccaattcaaagcttgacagcagttggctggaaaaagttttctcttgacatgttaaatggtgaatctgatgatttcaatgagatggttcgacagaataatactgcttctgatattcttcatcgaatggcatcagtatttgagaggatgcatgcatctattgcatcaaattctgctataggaacaactttgcttcagggtgaagagaacattggccagtttctatacctcgagggcatcgagtattatatgtggaacacatatgatgttcatttttatgcatcattttcactgatcatgttgtttccaaagcttcaactcagcgtccagagagactttgctgctgctgttatgatgcatgatcctgaaaagctgaggatcttgcatgatggaaaatgggctgcaagaaaagttctcggtgctgttcctcatgatcttggattatatgacccatggttcaaggtcaatgcgtacactctctataatacagatcggtggaaagatttgaatccgaagtttgtgctgcaagtttatagagatgtggtggccacaggcgacaaatcctttgctcgagctgtttggccatcagtttatatagcaatggcatatatggagcaatttgataaggataaagatgggatgatagaaaatgaggatttcccagatcaaacatatgacgtgtggtcaatggctggtataagtgcatactgtggtggtctttgggtggctgctcttcaggcagcatcggccttggcacgtgaggttggtgacaaagcttctgaaaagcttttttgggacaaatatgagaaggccaagtttgtctatagcaagctgtggaatggttcttacttcagttatgatgatggcgacaacaaaatgagcacatctatccaagcagatcaattggctggacaatggtatgccaaagcctgtggtctcttcccaattgttgacaaagacaaggcacaaagtgcgctagagaaggtatattctttcaatgtgatgaagttcaagggtggtacaaggggagccatgaatgggatgtggccagatggcactgtggacatgtctgcaatgcaatctagggagatatggccaggggtgacatatgcactagctgcaagcatgattcaggaaggcatggttgagcagggatttaaaacagctgaaggggtctatcatgctgcctggtcaccaggaggacttggatactcattccaaacccctgaagcctggaacaacgacgacgagtacaggtccctgtgctacatgcgcccgctcgccatatgggcaatgcaatgggcactgtcgaagccgaagctccacaacactccacaggcagatataccccaggactcattccccaagaaccagttcgcctacgcgcggatcacaaagctcctgcagctgcctgaagacgaatcgtccaaaagcttcgtccgggtggtgtacgagatcatccggaacaggtttaggtcctgatcgccgcctccgcacgcctgtgcgctgagtgtccgaattcttgatgatacaattcattagtcactgtcattgttgctgttggatcccgcggattcgtatatgaaactggtggtaataaacttgccaagtgcggtagttcgtatataaatgaatttattatatatgagctagctgttatatatgagtgacagtacgatggagtcacggagacatcttcgatt

SEQ ID NO: 38810 - DNA, 3515 bp, Zea Mays
atcagacatacggtaaaaaacagtcggtattttgctaaagtaaagtcccttccaccttacacgtgcgcagtgcgtccactgtcgtgggccctagaagacgaatcgctcctgtcacgctgtctgctcccacaggcaacagccacgtcttccgcgccgcagtgtccgatcgatcgatcccttctaggggaggggaattcaggacaggaggaggccaggttctcgccccgcaataggacgccgatcgattccggatcttagctcgagagcccggtgcccccttctcggtgctcgttgcaggattttcggccaggtatttaggaggaagacctgatttgtccttcagctaacagtcaacactgaaggttcacttgggcaagcaatataatttttccttctattctagggtagtccaaagaaataagaaacatgccagagacttatgttgatgagcaaccaaagggtgtgtctcggaatcgtccacctgcacatatgaatggtgatgaagaaaaggtttatcctggccaactcccagtgttgacctgggaacataagctaacccatgttagacatgatttgccgccattcagacttacatggagagagataatgcagctggctggtattggtttacgtcttagtcgacatatccttgaggaaacttcaaaagggcgaattgctgttattgatcctatgaaaaagcgggctgcaagatctggtcagggtgtcccacttggtggtattggtgcaggaagtattggaagaagctacaaaggcgatttccaacgttggcaattgtttccaggatcttgtgaagataatgctgtattggcaaatcaattttctgccttcatttcccgccaagatggtaaaaaatattccacagtgttgcatcctgggaaaccagatttgccgaaaggaagtgacatttcaggaattggatcctgggactggaatatgagtggacaacaatctacttaccatgccctttaccctagggcttggacagtatatgatggagaacctgatcctgagctcaatatagtgtgccgtcagatatctccaattattccacacaattatcaacagagcagctatccagttgcagtgttcacttttaccgtaacaaactcaggacatacagctgctgatgtgactttgctttttacatgggctaactctgttggtggaaaatctgaactcaccggatatcattccaactccagtatgatagaaaaggatggtgttcatggcatactattacatcacagaacagcagatggtcaaccacatgtaacttttgtgatagcagcacaggagaaagaggatatccttatatctgaatgtccttactttgtgatatctgggagctccgcatctgatgaattcacagctaaagatatgtggaattctgtgaaagagcatggatcttttgatcatcttgatcccatcaagacatcgatgtgctccagaccaggatcatcaataggggcagctatcgctgcttcagttaagctggctcccaaggcaacccaggatatttcattttcacttgcatgggcttgtcctgaagtgaagttctctagtgggaaaacctatcataggcgttacaccaaattttatggcacagacggtgatgcagcagcagcccttgctcacgatgccattcttgagcatgcttcctgggagagacaaattgaggagtggcaggatcctattttgcaagatgagaggtttcctgcttggtatccagttacacttttcaatgaactatactatcttaatgctggaggaactatatggacagatggattaccaccaattcaaagcttgacagcagttggctggaaaaagttttctcttgacatgttaaatggtgaatctgatgatttcaatgagatggttcgacagaataatactgcttctgatattcttcatcgaatggcatcagtatttgagaggatgcatgcatctattgcatcaaattctgctataggaacaactttgcttcagggtgaagagaacattggccagtttctatacctcgagggcatcgagtattatatgtggaacacatatgatgttcatttttatgcatcattttcactgatcatgttgtttccaaagcttcaactcagcgtccagagagactttgctgctgctgttatgatgcatgatcctgaaaagctgaggatcttgcatgatggaaaatgggctgcaagaaaagttctcggtgctgttcctcatgatcttggattatatgacccatggttcaaggtcaatgcgtacactctctataatacagatcggtggaaagatttgaatccgaagtttgtgctgcaagtttatagagatgtggtggccacaggcgacaaatcctttgctcgagctgtttggccatcagtttatatagcaatggcatatatggagcaatttgataaggataaagatgggatgatagaaaatgaggatttcccagatcaaacatatgacgtgtggtcaatggctggtataagtgcatactgtggtggtctttgggtggctgctcttcaggcagcatcggccttggcacgtgaggttggtgacaaagcttctgaaaagcttttttgggacaaatatgagaaggccaagtttgtctatagcaagctgtggaatggttcttacttcagttatgatgatggcgacaacaaaatgagcacatctatccaagcagatcaattggctggacaatggtatgccaaagcctgtggtctcttcccaattgttgacaaagacaaggcacaaagtgcgctagagaaggtatattctttcaatgtgatgaagttcaagggtggtacaaggggagccatgaatgggatgtggccagatggcactgtggacatgtctgcaatgcaatctagggagatatggccaggggtgacatatgcactagctgcaagcatgattcaggaaggcatggttgagcagggatttaaaacagctgaaggggtctatcatgctgcctggtcaccaggaggacttggatactcattccaaacccctgaagcctggaacaacgacgacgagtacaggtccctgtgctacatgcgcccgctcgccatatgggcaatgcaatgggcactgtcgaagccgaagctccacaacactccacaggcagatataccccaggactcattccccaagaaccagttcgcctacgcgcggatcacaaagctcctgcagctgcctgaagacgaatcgtccaaaagcttcgtccgggtggtgtacgagatcatccggaacaggtttaggtcctgatcgccgcctccgcacgcctgtgcgctgagtgtccgaattcttgatgatacaattcattagtcactgtcattgttgctgttggatcccgcggattcgtatatgaaactggtggtaataaacttgccaagtgcggtagttcgtatataaatgaatttattatatatgagctagctgttatatatgagtgacagtacgatggagtcacggagacatcttcgatt

SEQ ID NO: 38811 - DNA, 3516 bp, Zea Mays
atcagacatacggtaaaaaacagtcggtattttgctaaagtaaagtcccttccaccttacacgtgcgcagtgcgtccactgtcgtgggccctagaagacgaatcgctcctgtcacgctgtctgctcccacaggcaacagccacgtcttccgcgccgcagtgtccgatcgatcgatcccttctaggggaggggaattcaggacaggaggaggccaggttctcgccccgcaataggacgccgatcgattccggatcttagctcgagagcccggtgcccccttctcggtgctcgttgcaggattttcggccaggtatttaggaggaagacctgatttgtccttcagctaacagtcaacactgaaggttcacttgggcaagcaatataatttttccttctattctagggtagtccaaagaaataagaaacatgccagagacttatgttgatgagcaaccaaagggtgtgtctcggaatcgtccacctgcacatatgaatggtgatgaagaaaaggtttatcctggccaactcccagtgttgacctgggaacataagctaacccatgttagacatgatttgccgccattcagacttacatggagagagataatgcagctggctggtattggtttacgtcttagtcgacatatccttgaggaaacttcaaaagggcgaattgctgttattgatcctatgaaaaagcgggctgcaagatctggtcagggtgtcccacttggtggtattgggtgcaggaagtattggaagaagctacaaaggcgatttccaacgttggcaattgtttccaggatcttgtgaagataatgctgtattggcaaatcaattttctgccttcatttcccgccaagatggtaaaaaatattccacagtgttgcatcctgggaaaccagatttgccgaaaggaagtgacatttcaggaattggatcctgggactggaatatgagtggacaacaatctacttaccatgccctttaccctagggcttggacagtatatgatggagaacctgatcctgagctcaatatagtgtgccgtcagatatctccaattattccacacaattatcaacagagcagctatccagttgcagtgttcacttttaccgtaacaaactcaggacatacagctgctgatgtgactttgctttttacatgggctaactctgttggtggaaaatctgaactcaccggatatcattccaactccagtatgatagaaaaggatggtgttcatggcatactattacatcacagaacagcagatggtcaaccacatgtaacttttgtgatagcagcacaggagaaagaggatatccttatatctgaatgtccttactttgtgatatctgggagctccgcatctgatgaattcacagctaaagatatgtggaattctgtgaaagagcatggatcttttgatcatcttgatcccatcaagacatcgatgtgctccagaccaggatcatcaataggggcagctatcgctgcttcagttaagctggctcccaaggcaacccaggatatttcattttcacttgcatgggcttgtcctgaagtgaagttctctagtgggaaaacctatcataggcgttacaccaaattttatggcacagacggtgatgcagcagcagcccttgctcacgatgccattcttgagcatgcttcctgggagagacaaattgaggagtggcaggatcctattttgcaagatgagaggtttcctgcttggtatccagttacacttttcaatgaactatactatcttaatgctggaggaactatatggacagatggattaccaccaattcaaagcttgacagcagttggctggaaaaagttttctcttgacatgttaaatggtgaatctgatgatttcaatgagatggttcgacagaataatactgcttctgatattcttcatcgaatggcatcagtatttgagaggatgcatgcatctattgcatcaaattctgctataggaacaactttgcttcagggtgaagagaacattggccagtttctatacctcgagggcatcgagtattatatgtggaacacatatgatgttcatttttatgcatcattttcactgatcatgttgtttccaaagcttcaactcagcgtccagagagactttgctgctgctgttatgatgcatgatcctgaaaagctgaggatcttgcatgatggaaaatgggctgcaagaaaagttctcggtgctgttcctcatgatcttggattatatgacccatggttcaaggtcaatgcgtacactctctataatacagatcggtggaaagatttgaatccgaagtttgtgctgcaagtttatagagatgtggtggccacaggcgacaaatcctttgctcgagctgtttggccatcagtttatatagcaatggcatatatggagcaatttgataaggataaagatgggatgatagaaaatgaggatttcccagatcaaacatatgacgtgtggtcaatggctggtataagtgcatactgtggtggtctttgggtggctgctcttcaggcagcatcggccttggcacgtgaggttggtgacaaagcttctgaaaagcttttttgggacaaatatgagaaggccaagtttgtctatagcaagctgtggaatggttcttacttcagttatgatgatggcgacaacaaaatgagcacatctatccaagcagatcaattggctggacaatggtatgccaaagcctgtggtctcttcccaattgttgacaaagacaaggcacaaagtgcgctagagaaggtatattctttcaatgtgatgaagttcaagggtggtacaaggggagccatgaatgggatgtggccagatggcactgtggacatgtctgcaatgcaatctagggagatatggccaggggtgacatatgcactagctgcaagcatgattcaggaaggcatggttgagcagggatttaaaacagctgaaggggtctatcatgctgcctggtcaccaggaggacttggatactcattccaaacccctgaagcctggaacaacgacgacgagtacaggtccctgtgctacatgcgcccgctcgccatatgggcaatgcaatgggcactgtcgaagccgaagctccacaacactccacaggcagatataccccaggactcattccccaagaaccagttcgcctacgcgcggatcacaaagctcctgcagctgcctgaagacgaatcgtccaaaagcttcgtccgggtggtgtacgagatcatccggaacaggtttaggtcctgatcgccgcctccgcacgcctgtgcgctgagtgtccgaattcttgatgatacaattcattagtcactgtcattgttgctgttggatcccgcggattcgtatatgaaactggtggtaataaacttgccaagtgcggtagttcgtatataaatgaatttattatatatgagctagctgttatatatgagtgacagtacgatggagtcacggagacatcttcgatt

SEQ ID NO: 38812 - DNA, 3461 bp, Zea Mays
aaaaaacagtcggtattttgctaaagtaaagtcccttccaccttacacgtgcgcagtgcgtccactgtcgtgggccctagaagacgaatcgctcctgtcacgctgtctgctcccacaggcaacagccacgtcttccgcgccgcagtgtccgatcgatcgatcccttctaggggaggggaattcaggacaggaggaggccaggttctcgccccgcaataggacgccgatcgattccggatcttagctcgagagcccggtgcccccttctcggtgctcgttgcaggattttcggccaggtatttaggaggaagacctgatttgtccttcagctaacagtcaacactgaaggggtagtccaaagaaataagaaacatgccagagacttatgttgatgagcaaccaaagggtgtgtctcggaatcgtccacctgcacatatgaatggtgatgaagaaaaggtttatcctggccaactcccagtgttgacctgggaacataagctaacccatgttagacatgatttgccgccattcagacttacatggagagagataatgcagctggctggtattggtttacgtcttagtcgacatatccttgaggaaacttcaaaagggcgaattgctgttattgatcctatgaaaaagcgggctgcaagatctggtcagggtgtcccacttggtggtattggtgcaggaagtattggaagaagctacaaaggcgatttccaacgttggcaattgtttccaggatcttgtgaagataatgctgtattggcaaatcaattttctgccttcatttcccgccaagatggtaaaaaatattccacagtgttgcatcctgggaaaccagatttgccgaaaggaagtgacatttcaggaattggatcctgggactggaatatgagtggacaacaatctacttaccatgccctttaccctagggcttggacagtatatgatggagaacctgatcctgagctcaatatagtgtgccgtcagatatctccaattattccacacaattatcaacagagcagctatccagttgcagtgttcacttttaccgtaacaaactcaggacatacagctgctgatgtgactttgctttttacatgggctaactctgttggtggaaaatctgaactcaccggatatcattccaactccagtatgatagaaaaggatggtgttcatggcatactattacatcacagaacagcagatggtcaaccacatgtaacttttgtgatagcagcacaggagaaagaggatatccttatatctgaatgtccttactttgtgatatctgggagctccgcatctgatgaattcacagctaaagatatgtggaattctgtgaaagagcatggatcttttgatcatcttgatcccatcaagacatcgatgtgctccagaccaggatcatcaataggggcagctatcgctgcttcagttaagctggctcccaaggcaacccaggatatttcattttcacttgcatgggcttgtcctgaagtgaagttctctagtgggaaaacctatcataggcgttacaccaaattttatggcacagacggtgatgcagcagcagcccttgctcacgatgccattcttgagcatgcttcctgggagagacaaattgaggagtggcaggatcctattttgcaagatgagaggtttcctgcttggtatccagttacacttttcaatgaactatactatcttaatgctggaggaactatatggacagatggattaccaccaattcaaagcttgacagcagttggctggaaaaagttttctcttgacatgttaaatggtgaatctgatgatttcaatgagatggttcgacagaataatactgcttctgatattcttcatcgaatggcatcagtatttgagaggatgcatgcatctattgcatcaaattctgctataggaacaactttgcttcagggtgaagagaacattggccagtttctatacctcgagggcatcgagtattatatgtggaacacatatgatgttcatttttatgcatcattttcactgatcatgttgtttccaaagcttcaactcagcgtccagagagactttgctgctgctgttatgatgcatgatcctgaaaagctgaggatcttgcatgatggaaaatgggctgcaagaaaagttctcggtgctgttcctcatgatcttggattatatgacccatggttcaaggtcaatgcgtacactctctataatacagatcggtggaaagatttgaatccgaagtttgtgctgcaagtttatagagatgtggtggccacaggcgacaaatcctttgctcgagctgtttggccatcagtttatatagcaatggcatatatggagcaatttgataaggataaagatgggatgatagaaaatgaggatttcccagatcaaacatatgacgtgtggtcaatggctggtataagtgcatactgtggtggtctttgggtggctgctcttcaggcagcatcggccttggcacgtgaggttggtgacaaagcttctgaaaagcttttttgggacaaatatgagaaggccaagtttgtctatagcaagctgtggaatggttcttacttcagttatgatgatggcgacaacaaaatgagcacatctatccaagcagatcaattggctggacaatggtatgccaaagcctgtggtctcttcccaattgttgacaaagacaaggcacaaagtgcgctagagaaggtatattctttcaatgtgatgaagttcaagggtggtacaaggggagccatgaatgggatgtggccagatggcactgtggacatgtctgcaatgcaatctagggagatatggccaggggtgacatatgcactagctgcaagcatgattcaggaaggcatggttgagcagggatttaaaacagctgaaggggtctatcatgctgcctggtcaccaggaggacttggatactcattccaaacccctgaagcctggaacaacgacgacgagtacaggtccctgtgctacatgcgcccgctcgccatatgggcaatgcaatgggcactgtcgaagccgaagctccacaacactccacaggcagatataccccaggactcattccccaagaaccagttcgcctacgcgcggatcacaaagctcctgcagctgcctgaagacgaatcgtccaaaagcttcgtccgggtggtgtacgagatcatccggaacaggtttaggtcctgatcgccgcctccgcacgcctgtgcgctgagtgtccgaattcttgatgatacaattcattagtcactgtcattgttgctgttggatcccgcggattcgtatatgaaactggtggtaataaacttgccaagtgcggtagttcgtatataaatgaatttattatatatgagctagctgttatatatgagtgacagtacgatggagtcacggagacatcttcgatt

SEQ ID NO: 38813 - DNA, 3350 bp, Zea Mays
gtaaagtcccttccaccttacacgtgcgcagtgcgtccactgtcgtgggccctagaagacgaatcgctcctgtcacgctgtctgctcccacaggcaacagccacgtcttccgcgccgcagtgtccgatcgatcgatcccttctaggggaggggaattcaggacaggaggaggccaggttctcgccccgcaataggacgccgatcgattccggatcttagctcgagagcccggtgcccccttctcggtgctcgttgcaggattttcggggtagtccaaagaaataagaaacatgccagagacttatgttgatgagcaaccaaagggtgtgtctcggaatcgtccacctgcacatatgaatggtgatgaagaaaaggtttatcctggccaactcccagtgttgacctgggaacataagctaacccatgttagacatgatttgccgccattcagacttacatggagagagataatgcagctggctggtattggtttacgtcttagtcgacatatccttgaggaaacttcaaaagggcgaattgctgttattgatcctatgaaaaagcgggctgcaagatctggtcagggtgtcccacttggtggaagtattggaagaagctacaaaggcgatttccaacgttggcaattgtttccaggatcttgtgaagataatgctgtattggcaaatcaattttctgccttcatttcccgccaagatggtaaaaaatattccacagtgttgcatcctgggaaaccagatttgccgaagaattggatcctgggactggaatatgagtggacaacaatctacttaccatgccctttaccctagggcttggacagtatatgatggagaacctgatcctgagctcaatatagtgtgccgtcagatatctccaattattccacacaattatcaacagagcagctatccagttgcagtgttcacttttaccgtaacaaactcaggacatacagctgctgatgtgactttgctttttacatgggctaactctgttggtggaaaatctgaactcaccggatatcattccaactccagtatgatagaaaaggatggtgttcatggcatactattacatcacagaacagcagatggtcaaccacatgtaacttttgtgatagcagcacaggagaaagaggatatccttatatctgaatgtccttactttgtgatatctgggagctccgcatctgatgaattcacagctaaagatatgtggaattctgtgaaagagcatggatcttttgatcatcttgatcccatcaagacatcgatgtgctccagaccaggatcatcaataggggcagctatcgctgcttcagttaagctggctcccaaggcaacccaggatatttcattttcacttgcatgggcttgtcctgaagtgaagttctctagtgggaaaacctatcataggcgttacaccaaattttatggcacagacggtgatgcagcagcagcccttgctcacgatgccattcttgagcatgcttcctgggagagacaaattgaggagtggcaggatcctattttgcaagatgagaggtttcctgcttggtatccagttacacttttcaatgaactatactatcttaatgctggaggaactatatggacagatggattaccaccaattcaaagcttgacagcagttggctggaaaaagttttctcttgacatgttaaatggtgaatctgatgatttcaatgagatggttcgacagaataatactgcttctgatattcttcatcgaatggcatcagtatttgagaggatgcatgcatctattgcatcaaattctgctataggaacaactttgcttcagggtgaagagaacattggccagtttctatacctcgagggcatcgagtattatatgtggaacacatatgatgttcatttttatgcatcattttcactgatcatgttgtttccaaagcttcaactcagcgtccagagagactttgctgctgctgttatgatgcatgatcctgaaaagctgaggatcttgcatgatggaaaatgggctgcaagaaaagttctcggtgctgttcctcatgatcttggattatatgacccatggttcaaggtcaatgcgtacactctctataatacagatcggtggaaagatttgaatccgaagtttgtgctgcaagtttatagagatgtggtggccacaggcgacaaatcctttgctcgagctgtttggccatcagtttatatagcaatggcatatatggagcaatttgataaggataaagatgggatgatagaaaatgaggatttcccagatcaaacatatgacgtgtggtcaatggctggtataagtgcatactgtggtggtctttgggtggctgctcttcaggcagcatcggccttggcacgtgaggttggtgacaaagcttctgaaaagcttttttgggacaaatatgagaaggccaagtttgtctatagcaagctgtggaatggttcttacttcagttatgatgatggcgacaacaaaatgagcacatctatccaagcagatcaattggctggacaatggtatgccaaagcctgtggtctcttcccaattgttgacaaagacaaggcacaaagtgcgctagagaaggtatattctttcaatgtgatgaagttcaagggtggtacaaggggagccatgaatgggatgtggccagatggcactgtggacatgtctgcaatgcaatctagggagatatggccaggggtgacatatgcactagctgcaagcatgattcaggaaggcatggttgagcagggatttaaaacagctgaaggggtctatcatgctgcctggtcaccaggaggacttggatactcattccaaacccctgaagcctggaacaacgacgacgagtacaggtccctgtgctacatgcgcccgctcgccatatgggcaatgcaatgggcactgtcgaagccgaagctccacaacactccacaggcagatataccccaggactcattccccaagaaccagttcgcctacgcgcggatcacaaagctcctgcagctgcctgaagacgaatcgtccaaaagcttcgtccgggtggtgtacgagatcatccggaacaggtttaggtcctgatcgccgcctccgcacgcctgtgcgctgagtgtccgaattcttgatgatacaattcattagtcactgtcattgttgctgttggatcccgcggattcgtatatgaaactggtggtaataaacttgccaagtgcggtagttcgtatataaatgaatttattatatatgagctagctgttatatatgagtgacagtacgatggagtcacggagacatcttcgatt

SEQ ID NO: 38814 - DNA, 3544 bp, Zea Mays
gtcccttccaccttacacgtgcgcagtgcgtccactgtcgtgggccctagaagacgaatcgctcctgtcacgctgtctgctcccacaggcaacagccacgtcttccgcgccgcagtgtccgatcgatcgatcccttctaggggaggggaattcaggacaggaggaggccaggttctcgccccgcaataggacgccgatcgattccggatcttagctcgagagcccggtgcccccttctcggtgctcgttgcaggattttcggccaggtatttaggaggaagacctgatttgtccttcagctaacagtcaacactgaaggttcacttgggcaagcaatataatttttccttctattctagggtagtccaaagaaataagaaacatgccagagacttatgttgatgagcaaccaaagggtgtgtctcggaatcgtccacctgcacatatgaatggaaaaggtttatcctggccaactcccagtgttgacctgggaacataagctaacccatgttagacatgatttgccgccattcagacttacatggagagagataatgcagctggctggtattggtttacgtcttagtcgacatatccttgaggaaacttcaaaagggcgaattgctgttattgatcctatgaaaaagcgggctgcaagatctggtcagggtgtcccacttggtggaagtattggaagaagctacaaaggcgatttccaacgttggcaattgtttccaggatcttgtgaagataatgctgtattggcaaatcaattttctgccttcatttcccgccaagatggtaaaaaatattccacagtgttgcatcctgggaaaccagatttgccgaaaggaagtgacatttcaggaattggatcctgggactggaatatgagtggacaacaatctacttaccatgccctttaccctagggcttggacagtatatgatggagaacctgatcctgagctcaatatagtgtgccgtcagatatctccaattattccacacaattatcaacagagcagctatccagttgcagtgttcacttttaccgtaatactacatacatgaaattccttcaatcttctattttacctgttcttaactttatgatatagctccacacctttagcaatcacgtaaaaaaatttcaggtaacaaactcaggacatacagctgctgatgtgactttgctttttacatgggctaactctgttggtggaaaatctgaactcaccggatatcattccaactccagtatgatagaaaaggatggtgttcatggcatactattacatcacagaacagcagatggtcaaccacatgtaacttttgtgatagcagcacaggagaaagaggatatccttatatctgaatgtccttactttgtgatatctgggagctccgcatctgatgaattcacagctaaagatatgtggaattctgtgaaagagcatggatcttttgatcatcttgatcccatcaagacatcgatgtgctccagaccaggatcatcaataggggcagctatcgctgcttcagttaagctggctcccaaggcaacccaggatatttcattttcacttgcatgggcttgtcctgaagtgaagttctctagtgggaaaacctatcataggcgttacaccaaattttatggcacagacggtgatgcagcagcagcccttgctcacgatgccattcttgagcatgcttcctgggagagacaaattgaggagtggcaggatcctattttgcaagatgagaggtttcctgcttgttacacttttcaatgaactatactatcttaatgctggaggaactatatggacagatggattaccaccaattcaaagcttgacagcagttggctggaaaaagttttctcttgacatgttaaatggtgaatctgatgatttcaatgagatggttcgacagaataatactgcttctgatattcttcatcgaatggcatcagtatttgagaggatgcatgcatctattgcatcaaattctgctataggaacaactttgcttcagggtgaagagaacattggccagtttctatacctcgagggcatcgagtattatatgtggaacacatatgatgttcatttttatgcatcattttcactgatcatgttgtttccaaagcttcaactcagcgtccagagagactttgctgctgctgttatgatgcatgatcctgaaaagctgaggatcttgcatgatggaaaatgggctgcaagaaaagttctcggtgctgttcctcatgatcttggattatatgacccatggttcaaggtcaatgcgtacactctctataatacagatcggtggaaagatttgaatccgaagtttgtgctgcaagtttatagagatgtggtggccacaggcgacaaatcctttgctcgagctgtttggccatcagtttatatagcaatggcatatatggagcaatttgataaggataaagatgggatgatagaaaatgaggatttcccagatcaaacatatgacgtgtggtcaatggctggtataagtgcatactgtggtggtctttgggtggctgctcttcaggcagcatcggccttggcacgtgaggttggtgacaaagcttctgaaaagcttttttgggacaaatatgagaaggccaagtttgtctatagcaagctgtggaatggttcttacttcagttatgatgatggcgacaacaaaatgagcacatctatccaagcagatcaattggctggacaatggtatgccaaagcctgtggtctcttcccaattgttgacaaagacaaggcacaaagtgcgctagagaaggtatattctttcaatgtgatgaagttcaagggtggtacaaggggagccatgaatgggatgtggccagatggcactgtggacatgtctgcaatgcaatctagggagatatggccaggggtgacatatgcactagctgcaagcatgattcaggaaggcatggttgagcagggatttaaaacagctgaaggggtctatcatgctgcctggtcaccaggaggacttggatactcattccaaacccctgaagcctggaacaacgacgacgagtacaggtccctgtgctacatgcgcccgctcgccatatgggcaatgcaatgggcactgtcgaagccgaagctccacaacactccacaggcagatataccccaggactcattccccaagaaccagttcgcctacgcgcggatcacaaagctcctgcagctgcctgaagacgaatcgtccaaaagcttcgtccgggtggtgtacgagatcatccggaacaggtttaggtcctgatcgccgcctccgcacgcctgtgcgctgagtgtccgaattcttgatgatacaattcattagtcactgtcattgttgctgttggatcccgcggattcgtatatgaaactggtggtaataaacttgccaagtgcggtagttcgtatataaatgaatttattatatatgagctagctgttatatatgagtgacagtacgatggagtcacggagacatcttcgatt

SEQ ID NO: 38815 - DNA, 3466 bp, Zea Mays
gtcccttccaccttacacgtgcgcagtgcgtccactgtcgtgggccctagaagacgaatcgctcctgtcacgctgtctgctcccacaggcaacagccacgtcttccgcgccgcagtgtccgatcgatcgatcccttctaggggaggggaattcaggacaggaggaggccaggttctcgccccgcaataggacgccgatcgattccggatcttagctcgagagcccggtgcccccttctcggtgctcgttgcaggattttcggccaggtatttaggaggaagacctgatttgtccttcagctaacagtcaacactgaaggttcacttgggcaagcaatataatttttccttctattctagggtagtccaaagaaataagaaacatgccagagacttatgttgatgagcaaccaaagggtgtgtctcggaatcgtccacctgcacatatgaatggtgatgaagaaaaggtttatcctggccaactcccagtgttgacctgggaacataagctaacccatgttagacatgatttgccgccattcagacttacatggagagagataatgcagctggctggtattggtttacgtcttagtcgacatatccttgaggaaacttcaaaagggcgaattgctgttattgatcctatgaaaaagcgggctgcaagatctggtcagggtgtcccacttggtggtattgggaagtattggaagaagctacaaaggcgatttccaacgttggcaattgtttccaggatcttgtgaagataatgctgtattggcaaatcaattttctgccttcatttcccgccaagatggtaaaaaatattccacagtgttgcatcctgggaaaccagatttgccgaaaggaagtgacatttcaggaattggatcctgggactggaatatgagtggacaacaatctacttaccatgccctttaccctagggcttggacagtatatgatggagaacctgatcctgagctcaatatagtgtgccgtcagatatctccaattattccacacaattatcaacagagcagctatccagttgcagtgttcacttttaccgtaacaaactcaggacatacagctgctgatgtgactttgctttttacatgggctaactctgttggtggaaaatctgaactcaccggatatcattccaactccagtatgatagaaaaggatggtgttcatggcatactattacatcacagaacagcagatggtcaaccacatgtaacttttgtgatagcagcacaggagaaagaggatatccttatatctgaatgtccttactttgtgatatctgggagctccgcatctgatgaattcacagctaaagatatgtggaattctgtgaaagagcatggatcttttgatcatcttgatcccatcaagacatcgatgtgctccagaccaggatcatcaataggggcagctatcgctgcttcagttaagctggctcccaaggcaacccaggatatttcattttcacttgcatgggcttgtcctgaagtgaagttctctagtgggaaaacctatcataggcgttacaccaaattttatggcacagacggtgatgcagcagcagcccttgctcacgatgccattcttgagcatgcttcctgggagagacaaattgaggagtggcaggatcctattttgcaagatgagaggtttcctgcttggtatccagttacacttttcaatgaactatactatcttaatgctggaggaactatatggacagatggattaccaccaattcaaagcttgacagcagttggctggaaaaagttttctcttgacatgttaaatggtgaatctgatgatttcaatgagatggttcgacagaataatactgcttctgatattcttcatcgaatggcatcagtatttgagaggatgcatgcatctattgcatcaaattctgctataggaacaactttgcttcagggtgaagagaacattggccagtttctatacctcgagggcatcgagtattatatgtggaacacatatgatgttcatttttatgcatcattttcactgatcatgttgtttccaaagcttcaactcagcgtccagagagactttgctgctgctgttatgatgcatgatcctgaaaagctgaggatcttgcatgatggaaaatgggctgcaagaaaagttctcggtgctgttcctcatgatcttggattatatgacccatggttcaaggtcaatgcgtacactctctataatacagatcggtggaaagatttgaatccgaagtttgtgctgcaagtttatagagatgtggtggccacaggcgacaaatcctttgctcgagctgtttggccatcagtttatatagcaatggcatatatggagcaatttgataaggataaagatgggatgatagaaaatgaggatttcccagatcaaacatatgacgtgtggtcaatggctggtataagtgcatactgtggtggtctttgggtggctgctcttcaggcagcatcggccttggcacgtgaggttggtgacaaagcttctgaaaagcttttttgggacaaatatgagaaggccaagtttgtctatagcaagctgtggaatggttcttacttcagttatgatgatggcgacaacaaaatgagcacatctatccaagcagatcaattggctggacaatggtatgccaaagcctgtggtctcttcccaattgttgacaaagacaaggcacaaagtgcgctagagaaggtatattctttcaatgtgatgaagttcaagggtggtacaaggggagccatgaatgggatgtggccagatggcactgtggacatgtctgcaatgcaatctagggagatatggccaggggtgacatatgcactagctgcaagcatgattcaggaaggcatggttgagcagggatttaaaacagctgaaggggtctatcatgctgcctggtcaccaggaggacttggatactcattccaaacccctgaagcctggaacaacgacgacgagtacaggtccctgtgctacatgcgcccgctcgccatatgggcaatgcaatgggcactgtcgaagccgaagctccacaacactccacaggcagatataccccaggactcattccccaagaaccagttcgcctacgcgcggatcacaaagctcctgcagctgcctgaagacgaatcgtccaaaagcttcgtccgggtggtgtacgagatcatccggaacaggtttaggtcctgatcgccgcctccgcacgcctgtgcgctgagtgtccgaattcttgatgatacaattcattagtcactgtcattgttgctgttggatcccgcggattcgtatatgaaactggtggtaataaacttgccaagtgcggtagttcgtatataaatgaatttattatatatgagctagctgttatatatgagtgacagtacgatggagtcacggagacatcttcgatt

SEQ ID NO: 38816 - DNA, 3358 bp, Zea Mays
cttacacgtgcgcagtgcgtccactgtcgtgggccctagaagacgaatcgctcctgtcacgctgtctgctcccacaggcaacagccacgtcttccgcgccgcagtgtccgatcgatcgatcccttctaggggaggggaattcaggacaggaggaggccaggttctcgccccgcaataggacgccgatcgattccggatcttagctcgagagcccggtgcccccttctcggtgctcgttgcaggattttcggggtagtccaaagaaataagaaacatgccagagacttatgttgatgagcaaccaaagggtgtgtctcggaatcgtccacctgcacatatgaatggtgatgaagaaaaggtttatcctggccaactcccagtgttgacctgggaacataagctaacccatgttagacatgatttgccgccattcagacttacatggagagagataatgcagctggctggtattggtttacgtcttagtcgacatatccttgaggaaacttcaaaagggcgaattgctgttattgatcctatgaaaaagcgggctgcaagatctggtcagggtgtcccacttggtggtattgggaagtattggaagaagctacaaaggcgatttccaacgttggcaattgtttccaggatcttgtgaagataatgctgtattggcaaatcaattttctgccttcatttcccgccaagatggtaaaaaatattccacagtgttgcatcctgggaaaccagatttgccgaaaggaagtgacatttcaggaattggatcctgggactggaatatgagtggacaacaatctacttaccatgccctttaccctagggcttggacagtatatgatggagaacctgatcctgagctcaatatagtgtgccgtcagatatctccaattattccacacaattatcaacagagcagctatccagttgcagtgttcacttttaccgtaacaaactcaggacatacagctgctgatgtgactttgctttttacatgggctaactctgttggtggaaaatctgaactcaccggatatcattccaactccagtatgatagaaaaggatggtgttcatggcatactattacatcacagaacagcagatggtcaaccacatgtaacttttgtgatagcagcacaggagaaagaggatatccttatatctgaatgtccttactttgtgatatctgggagctccgcatctgatgaattcacagctaaagatatgtggaattctgtgaaagagcatggatcttttgatcatcttgatcccatcaagacatcgatgtgctccagaccaggatcatcaataggggcagctatcgctgcttcagttaagctggctcccaaggcaacccaggatatttcattttcacttgcatgggcttgtcctgaagtgaagttctctagtgggaaaacctatcataggcgttacaccaaattttatggcacagacggtgatgcagcagcagcccttgctcacgatgccattcttgagcatgcttcctgggagagacaaattgaggagtggcaggatcctattttgcaagatgagaggtttcctgcttggtatccagttacacttttcaatgaactatactatcttaatgctggaggaactatatggacagatggattaccaccaattcaaagcttgacagcagttggctggaaaaagttttctcttgacatgttaaatggtgaatctgatgatttcaatgagatggttcgacagaataatactgcttctgatattcttcatcgaatggcatcagtatttgagaggatgcatgcatctattgcatcaaattctgctataggaacaactttgcttcagggtgaagagaacattggccagtttctatacctcgagggcatcgagtattatatgtggaacacatatgatgttcatttttatgcatcattttcactgatcatgttgtttccaaagcttcaactcagcgtccagagagactttgctgctgctgttatgatgcatgatcctgaaaagctgaggatcttgcatgatggaaaatgggctgcaagaaaagttctcggtgctgttcctcatgatcttggattatatgacccatggttcaaggtcaatgcgtacactctctataatacagatcggtggaaagatttgaatccgaagtttgtgctgcaagtttatagagatgtggtggccacaggcgacaaatcctttgctcgagctgtttggccatcagtttatatagcaatggcatatatggagcaatttgataaggataaagatgggatgatagaaaatgaggatttcccagatcaaacatatgacgtgtggtcaatggctggtataagtgcatactgtggtggtctttgggtggctgctcttcaggcagcatcggccttggcacgtgaggttggtgacaaagcttctgaaaagcttttttgggacaaatatgagaaggccaagtttgtctatagcaagctgtggaatggttcttacttcagttatgatgatggcgacaacaaaatgagcacatctatccaagcagatcaattggctggacaatggtatgccaaagcctgtggtctcttcccaattgttgacaaagacaaggcacaaagtgcgctagagaaggtatattctttcaatgtgatgaagttcaagggtggtacaaggggagccatgaatgggatgtggccagatggcactgtggacatgtctgcaatgcaatctagggagatatggccaggggtgacatatgcactagctgcaagcatgattcaggaaggcatggttgagcagggatttaaaacagctgaaggggtctatcatgctgcctggtcaccaggaggacttggatactcattccaaacccctgaagcctggaacaacgacgacgagtacaggtccctgtgctacatgcgcccgctcgccatatgggcaatgcaatgggcactgtcgaagccgaagctccacaacactccacaggcagatataccccaggactcattccccaagaaccagttcgcctacgcgcggatcacaaagctcctgcagctgcctgaagacgaatcgtccaaaagcttcgtccgggtggtgtacgagatcatccggaacaggtttaggtcctgatcgccgcctccgcacgcctgtgcgctgagtgtccgaattcttgatgatacaattcattagtcactgtcattgttgctgttggatcccgcggattcgtatatgaaactggtggtaataaacttgccaagtgcggtagttcgtatataaatgaatttattatatatgagctagctgttatatatgagtgacagtacgatggagtcacggagacatcttcgatt

SEQ ID NO: 38817 - DNA, 3226 bp, Zea Mays
gtccactgtcgtgggccctagaagacgaatcgctcctgtcacgctgtctgctcccacaggcaacagccacgtcttccgcgccgcagtgtccgatcgatcgatcccttctaggggaggggaattcaggacaggaggaggccaggttctcgccccgcaataggacgccgatcgattccggatcttagctcgagagcccggtgcccccttctcggtgctcgttgcaggattttcggggtagtccaaagaaataagaaacatgccagagacttatgttgatgagcaaccaaagggtgtgtctcggaatcgtccacctgcacatatgaatggtgatgaagaaaaggtttatcctggccaactcccagtgttgacctgggaacataagctaacccatgttagacatgatttgccgccattcagacttacatggagagagataatgcagctggctggtattggtttacgtcttagtcgacatatccttgaggaaacttcaaaagggcgaattgctgttattgatcctatgaaaaagcgggctgcaagatctggtcagggtgtcccacttggtggaagtattggaagaagctacaaaggcgatttccaacgttggcaattgtttccaggatcttgtgaagataatgctgtattggcaaatcaattttctgtaacaaactcaggacatacagctgctgatgtgactttgctttttacatgggctaactctgttggtggaaaatctgaactcaccggatatcattccaactccagtatgatagaaaaggatggtgttcatggcatactattacatcacagaacagcagatggtcaaccacatgtaacttttgtgatagcagcacaggagaaagaggatatccttatatctgaatgtccttactttgtgatatctgggagctccgcatctgatgaattcacagctaaagatatgtggaattctgtgaaagagcatggatcttttgatcatcttgatcccatcaagacatcgatgtgctccagaccaggatcatcaataggggcagctatcgctgcttcagttaagctggctcccaaggcaacccaggatatttcattttcacttgcatgggcttgtcctgaagtgaagttctctagtgggaaaacctatcataggcgttacaccaaattttatggcacagacggtgatgcagcagcagcccttgctcacgatgccattcttgagcatgcttcctgggagagacaaattgaggagtggcaggatcctattttgcaagatgagaggtttcctgcttggtttgttccaaccctaataattcatttacttggtacacaaaacctgaggctgctgaatgttgatttatagcgtgaactttattcgttaggtatccagttacacttttcaatgaactatactatcttaatgctggaggaactatatggacaggtatgcatccatagtttcttgttttccctctaaatgatgacaattacttttcctgagaattaactcagagatattatcagatggattaccaccaattcaaagcttgacagcagttggctggaaaaagttttctcttgacatgttaaatggtgaatctgatgatttcaatgagatggttcgacagaataatactgcttctgatattcttcatcgaatggcatcagtatttgagaggatgcatgcatctattgcatcaaattctgctataggaacaactttgcttcagggtgaagagaacattggccagtttctatacctcgagggcatcgagtattatatgtggaacacatatgatgttcatttttatgcatcattttcactgatcatgttgtttccaaagcttcaactcagcgtccagagagactttgctgctgctgttatgatgcatgatcctgaaaagctgaggatcttgcatgatggaaaatgggctgcaagaaaagttctcggtgctgttcctcatgatcttggattatatgacccatggttcaaggtcaatgcgtacactctctataatacagatcggtggaaagatttgaatccgaagtttgtgctgcaagtttatagagatgtggtggccacaggcgacaaatcctttgctcgagctgtttggccatcagtttatatagcaatggcatatatggagcaatttgataaggataaagatgggatgatagaaaatgaggatttcccagatcaaacatatgacgtgtggtcaatggctggtataagtgcatactgtggtggtctttgggtggctgctcttcaggcagcatcggccttggcacgtgaggttggtgacaaagcttctgaaaagcttttttgggacaaatatgagaaggccaagtttgtctatagcaagctgtggaatggttcttacttcagttatgatgatggcgacaacaaaatgagcacatctatccaagcagatcaattggctggacaatggtatgccaaagcctgtggtctcttcccaattgttgacaaagacaaggcacaaagtgcgctagagaaggtatattctttcaatgtgatgaagttcaagggtggtacaaggggagccatgaatgggatgtggccagatggcactgtggacatgtctgcaatgcaatctagggagatatggccaggggtgacatatgcactagctgcaagcatgattcaggaaggcatggttgagcagggatttaaaacagctgaaggggtctatcatgctgcctggtcaccaggaggacttggatactcattccaaacccctgaagcctggaacaacgacgacgagtacaggtccctgtgctacatgcgcccgctcgccatatgggcaatgcaatgggcactgtcgaagccgaagctccacaacactccacaggcagatataccccaggactcattccccaagaaccagttcgcctacgcgcggatcacaaagctcctgcagctgcctgaagacgaatcgtccaaaagcttcgtccgggtggtgtacgagatcatccggaacaggtttaggtcctgatcgccgcctccgcacgcctgtgcgctgagtgtccgaattcttgatgatacaattcattagtcactgtcattgttgctgttggatcccgcggattcgtatatgaaactggtggtaataaacttgccaagtgcggtagttcgtatataaatgaatttattatatatgagctagctgttatatatgagtgacagtacgatggagtcacggagacatcttcgatt

SEQ ID NO: 38818 - DNA, 3401 bp, Zea Mays
agaagacgaatcgctcctgtcacgctgtctgctcccacaggcaacagccacgtcttccgcgccgcagtgtccgatcgatcgatcccttctaggggaggggaattcaggacaggaggaggccaggttctcgccccgcaataggacgccgatcgattccggatcttagctcgagagcccggtgcccccttctcggtgctcgttgcaggattttcggccaggtatttaggaggaagacctgatttgtccttcagctaacagtcaacactgaaggttcacttgggcaagcaatataatttttccttctattctagggtagtccaaagaaataagaaacatgccagagacttatgttgatgagcaaccaaagggtgtgtctcggaatcgtccacctgcacatatgaatggtgatgaagaaaaggtttatcctggccaactcccagtgttgacctgggaacataagctaacccatgttagacatgatttgccgccattcagacttacatggagagagataatgcagctggctggtattggtttacgtcttagtcgacatatccttgaggaaacttcaaaagggcgaattgctgttattgatcctatgaaaaagcgggctgcaagatctggtcagggtgtcccacttggtggtattgggaagtattggaagaagctacaaaggcgatttccaacgttggcaattgtttccaggatcttgtgaagataatgctgtattggcaaatcaattttctgccttcatttcccgccaagatggtaaaaaatattccacagtgttgcatcctgggaaaccagatttgccgaagaattggatcctgggactggaatatgagtggacaacaatctacttaccatgccctttaccctagggcttggacagtatatgatggagaacctgatcctgagctcaatatagtgtgccgtcagatatctccaattattccacacaattatcaacagagcagctatccagttgcagtgttcacttttaccgtaacaaactcaggacatacagctgctgatgtgactttgctttttacatgggctaactctgttggtggaaaatctgaactcaccggatatcattccaactccagtatgatagaaaaggatggtgttcatggcatactattacatcacagaacagcagatggtcaaccacatgtaacttttgtgatagcagcacaggagaaagaggatatccttatatctgaatgtccttactttgtgatatctgggagctccgcatctgatgaattcacagctaaagatatgtggaattctgtgaaagagcatggatcttttgatcatcttgatcccatcaagacatcgatgtgctccagaccaggatcatcaataggggcagctatcgctgcttcagttaagctggctcccaaggcaacccaggatatttcattttcacttgcatgggcttgtcctgaagtgaagttctctagtgggaaaacctatcataggcgttacaccaaattttatggcacagacggtgatgcagcagcagcccttgctcacgatgccattcttgagcatgcttcctgggagagacaaattgaggagtggcaggatcctattttgcaagatgagaggtttcctgcttggtatccagttacacttttcaatgaactatactatcttaatgctggaggaactatatggacagatggattaccaccaattcaaagcttgacagcagttggctggaaaaagttttctcttgacatgttaaatggtgaatctgatgatttcaatgagatggttcgacagaataatactgcttctgatattcttcatcgaatggcatcagtatttgagaggatgcatgcatctattgcatcaaattctgctataggaacaactttgcttcagggtgaagagaacattggccagtttctatacctcgagggcatcgagtattatatgtggaacacatatgatgttcatttttatgcatcattttcactgatcatgttgtttccaaagcttcaactcagcgtccagagagactttgctgctgctgttatgatgcatgatcctgaaaagctgaggatcttgcatgatggaaaatgggctgcaagaaaagttctcggtgctgttcctcatgatcttggattatatgacccatggttcaaggtcaatgcgtacactctctataatacagatcggtggaaagatttgaatccgaagtttgtgctgcaagtttatagagatgtggtggccacaggcgacaaatcctttgctcgagctgtttggccatcagtttatatagcaatggcatatatggagcaatttgataaggataaagatgggatgatagaaaatgaggatttcccagatcaaacatatgacgtgtggtcaatggctggtataagtgcatactgtggtggtctttgggtggctgctcttcaggcagcatcggccttggcacgtgaggttggtgacaaagcttctgaaaagcttttttgggacaaatatgagaaggccaagtttgtctatagcaagctgtggaatggttcttacttcagttatgatgatggcgacaacaaaatgagcacatctatccaagcagatcaattggctggacaatggtatgccaaagcctgtggtctcttcccaattgttgacaaagacaaggcacaaagtgcgctagagaaggtatattctttcaatgtgatgaagttcaagggtggtacaaggggagccatgaatgggatgtggccagatggcactgtggacatgtctgcaatgcaatctagggagatatggccaggggtgacatatgcactagctgcaagcatgattcaggaaggcatggttgagcagggatttaaaacagctgaaggggtctatcatgctgcctggtcaccaggaggacttggatactcattccaaacccctgaagcctggaacaacgacgacgagtacaggtccctgtgctacatgcgcccgctcgccatatgggcaatgcaatgggcactgtcgaagccgaagctccacaacactccacaggcagatataccccaggactcattccccaagaaccagttcgcctacgcgcggatcacaaagctcctgcagctgcctgaagacgaatcgtccaaaagcttcgtccgggtggtgtacgagatcatccggaacaggtttaggtcctgatcgccgcctccgcacgcctgtgcgctgagtgtccgaattcttgatgatacaattcattagtcactgtcattgttgctgttggatcccgcggattcgtatatgaaactggtggtaataaacttgccaagtgcggtagttcgtatataaatgaatttattatatatgagctagctgttatatatgagtgacagtacgatggagtcacggagacatcttcgatt

SEQ ID NO: 38819 - DNA, 3333 bp, Zea Mays
agacgaatcgctcctgtcacgctgtctgctcccacaggcaacagccacgtcttccgcgccgcagtgtccgatcgatcgatcccttctaggggaggggaattcaggacaggaggaggccaggttctcgccccgcaataggacgccgatcgattccggatcttagctcgagagcccggtgcccccttctcggtgctcgttgcaggattttcggggtagtccaaagaaataagaaacatgccagagacttatgttgatgagcaaccaaagggtgtgtctcggaatcgtccacctgcacatatgaatggtgatgaagaaaaggtttatcctggccaactcccagtgttgacctgggaacataagctaacccatgttagacatgatttgccgccattcagacttacatggagagagataatgcagctggctggtattggtttacgtcttagtcgacatatccttgaggaaacttcaaaagggcgattttctacagattgctgttattgatcctatgaaaaagcgggctgcaagatctggtcagggtgtcccacttggtggtattggtgcaggaagtattggaagaagctacaaaggcgatttccaacgttggcaattgtttccaggatcttgtgaagataatgctgtattggcaaatcaattttctgccttcatttcccgccaagatggtaaaaaatattccacagtgttgcatcctgggaaaccagatttgccgaaaggaagtgacatttcaggaattggatcctgggactggaatatgagtggacaacaatctacttaccatgccctttaccctagggcttggacagtatatgatggagaacctgatcctgagctcaatatagtgtgccgtcagatatctccaattattccacacaattatcaacagagcagctatccagttgcagtgttcacttttaccgtaacaaactcaggacatacagctgctgatgtgactttgctttttacatgggctaactctgttggtggaaaatctgaactcaccggatatcattccaactccagtatgatagaaaaggatggtgttcatggcatactattacatcacagaacagcagatggtcaaccacatgtaacttttgtgatagcagcacaggagaaagaggatatccttatatctgaatgtccttactttgtgatatctgggagctccgcatctgatgaattcacagctaaagatatgtggaattctgtgaaagagcatggatcttttgatcatcttgatcccatcaagacatcgatgtgctccagaccaggatcatcaataggggcagctatcgctgcttcagttaagctggctcccaaggcaacccaggatatttcattttcacttgcatgggcttgtcctgaagtgaagttctctagtgggaaaacctatcataggcgttacaccaaattttatggcacagacggtgatgcagcagcagcccttgctcacgatgccattcttgagcatgcttcctgggagagacaaattgaggagtggcaggatcctattttgcaagatgagaggtttcctgcttggtatccagttacacttttcaatgaactatactatcttaatgctggaggaactatatggacagatggattaccaccaattcaaagcttgacagcagttggctggaaaaagttttctcttgacatgttaaatggtgaatctgatgatttcaatgagatggttcgacagaataatactgcttctgatattcttcatcgaatggcatcagtatttgagaggatgcatgcatctattgcatcaaattctgctataggaacaactttgcttcagggtgaagagaacattggccagtttctatacctcgagggcatcgagtattatatgtggaacacatatgatgttcatttttatgcatcattttcactgatcatgttgtttccaaagcttcaactcagcgtccagagagactttgctgctgctgttatgatgcatgatcctgaaaagctgaggatcttgcatgatggaaaatgggctgcaagaaaagttctcggtgctgttcctcatgatcttggattatatgacccatggttcaaggtcaatgcgtacactctctataatacagatcggtggaaagatttgaatccgaagtttgtgctgcaagtttatagagatgtggtggccacaggcgacaaatcctttgctcgagctgtttggccatcagtttatatagcaatggcatatatggagcaatttgataaggataaagatgggatgatagaaaatgaggatttcccagatcaaacatatgacgtgtggtcaatggctggtataagtgcatactgtggtggtctttgggtggctgctcttcaggcagcatcggccttggcacgtgaggttggtgacaaagcttctgaaaagcttttttgggacaaatatgagaaggccaagtttgtctatagcaagctgtggaatggttcttacttcagttatgatgatggcgacaacaaaatgagcacatctatccaagcagatcaattggctggacaatggtatgccaaagcctgtggtctcttcccaattgttgacaaagacaaggcacaaagtgcgctagagaaggtatattctttcaatgtgatgaagttcaagggtggtacaaggggagccatgaatgggatgtggccagatggcactgtggacatgtctgcaatgcaatctagggagatatggccaggggtgacatatgcactagctgcaagcatgattcaggaaggcatggttgagcagggatttaaaacagctgaaggggtctatcatgctgcctggtcaccaggaggacttggatactcattccaaacccctgaagcctggaacaacgacgacgagtacaggtccctgtgctacatgcgcccgctcgccatatgggcaatgcaatgggcactgtcgaagccgaagctccacaacactccacaggcagatataccccaggactcattccccaagaaccagttcgcctacgcgcggatcacaaagctcctgcagctgcctgaagacgaatcgtccaaaagcttcgtccgggtggtgtacgagatcatccggaacaggtttaggtcctgatcgccgcctccgcacgcctgtgcgctgagtgtccgaattcttgatgatacaattcattagtcactgtcattgttgctgttggatcccgcggattcgtatatgaaactggtggtaataaacttgccaagtgcggtagttcgtatataaatgaatttattatatatgagctagctgttatatatgagtgacagtacgatggagtcacggagacatcttcgatt

SEQ ID NO: 38820 - DNA, 3315 bp, Zea Mays
ctcctgtcacgctgtctgctcccacaggcaacagccacgtcttccgcgccgcagtgtccgatcgatcgatcccttctaggggaggggaattcaggacaggaggaggccaggttctcgccccgcaataggacgccgatcgattccggatcttagctcgagagcccggtgcccccttctcggtgctcgttgcaggattttcggggtagtccaaagaaataagaaacatgccagagacttatgttgatgagcaaccaaagggtgtgtctcggaatcgtccacctgcacatatgaatggaaaaggtttatcctggccaactcccagtgttgacctgggaacataagctaacccatgttagacatgatttgccgccattcagacttacatggagagagataatgcagctggctggtattggtttacgtcttagtcgacatatccttgaggaaacttcaaaagggcgattttctacagattgctgttattgatcctatgaaaaagcgggctgcaagatctggtcagggtgtcccacttggtggtattggtgcaggaagtattggaagaagctacaaaggcgatttccaacgttggcaattgtttccaggatcttgtgaagataatgctgtattggcaaatcaattttctgccttcatttcccgccaagatggtaaaaaatattccacagtgttgcatcctgggaaaccagatttgccgaaaggaagtgacatttcaggaattggatcctgggactggaatatgagtggacaacaatctacttaccatgccctttaccctagggcttggacagtatatgatggagaacctgatcctgagctcaatatagtgtgccgtcagatatctccaattattccacacaattatcaacagagcagctatccagttgcagtgttcacttttaccgtaacaaactcaggacatacagctgctgatgtgactttgctttttacatgggctaactctgttggtggaaaatctgaactcaccggatatcattccaactccagtatgatagaaaaggatggtgttcatggcatactattacatcacagaacagcagatggtcaaccacatgtaacttttgtgatagcagcacaggagaaagaggatatccttatatctgaatgtccttactttgtgatatctgggagctccgcatctgatgaattcacagctaaagatatgtggaattctgtgaaagagcatggatcttttgatcatcttgatcccatcaagacatcgatgtgctccagaccaggatcatcaataggggcagctatcgctgcttcagttaagctggctcccaaggcaacccaggatatttcattttcacttgcatgggcttgtcctgaagtgaagttctctagtgggaaaacctatcataggcgttacaccaaattttatggcacagacggtgatgcagcagcagcccttgctcacgatgccattcttgagcatgcttcctgggagagacaaattgaggagtggcaggatcctattttgcaagatgagaggtttcctgcttggtatccagttacacttttcaatgaactatactatcttaatgctggaggaactatatggacagatggattaccaccaattcaaagcttgacagcagttggctggaaaaagttttctcttgacatgttaaatggtgaatctgatgatttcaatgagatggttcgacagaataatactgcttctgatattcttcatcgaatggcatcagtatttgagaggatgcatgcatctattgcatcaaattctgctataggaacaactttgcttcagggtgaagagaacattggccagtttctatacctcgagggcatcgagtattatatgtggaacacatatgatgttcatttttatgcatcattttcactgatcatgttgtttccaaagcttcaactcagcgtccagagagactttgctgctgctgttatgatgcatgatcctgaaaagctgaggatcttgcatgatggaaaatgggctgcaagaaaagttctcggtgctgttcctcatgatcttggattatatgacccatggttcaaggtcaatgcgtacactctctataatacagatcggtggaaagatttgaatccgaagtttgtgctgcaagtttatagagatgtggtggccacaggcgacaaatcctttgctcgagctgtttggccatcagtttatatagcaatggcatatatggagcaatttgataaggataaagatgggatgatagaaaatgaggatttcccagatcaaacatatgacgtgtggtcaatggctggtataagtgcatactgtggtggtctttgggtggctgctcttcaggcagcatcggccttggcacgtgaggttggtgacaaagcttctgaaaagcttttttgggacaaatatgagaaggccaagtttgtctatagcaagctgtggaatggttcttacttcagttatgatgatggcgacaacaaaatgagcacatctatccaagcagatcaattggctggacaatggtatgccaaagcctgtggtctcttcccaattgttgacaaagacaaggcacaaagtgcgctagagaaggtatattctttcaatgtgatgaagttcaagggtggtacaaggggagccatgaatgggatgtggccagatggcactgtggacatgtctgcaatgcaatctagggagatatggccaggggtgacatatgcactagctgcaagcatgattcaggaaggcatggttgagcagggatttaaaacagctgaaggggtctatcatgctgcctggtcaccaggaggacttggatactcattccaaacccctgaagcctggaacaacgacgacgagtacaggtccctgtgctacatgcgcccgctcgccatatgggcaatgcaatgggcactgtcgaagccgaagctccacaacactccacaggcagatataccccaggactcattccccaagaaccagttcgcctacgcgcggatcacaaagctcctgcagctgcctgaagacgaatcgtccaaaagcttcgtccgggtggtgtacgagatcatccggaacaggtttaggtcctgatcgccgcctccgcacgcctgtgcgctgagtgtccgaattcttgatgatacaattcattagtcactgtcattgttgctgttggatcccgcggattcgtatatgaaactggtggtaataaacttgccaagtgcggtagttcgtatataaatgaatttattatatatgagctagctgttatatatgagtgacagtacgatggagtcacggagacatcttcgatt

SEQ ID NO: 38821 - DNA, 3378 bp, Zea Mays
cacgctgtctgctcccacaggcaacagccacgtcttccgcgccgcagtgtccgatcgatcgatcccttctaggggaggggaattcaggacaggaggaggccaggttctcgccccgcaataggacgccgatcgattccggatcttagctcgagagcccggtgcccccttctcggtgctcgttgcaggattttcggggtagtccaaagaaataagaaacatgccagagacttatgttgatgagcaaccaaagggtgtgtctcggaatcgtccacctgcacatatgaatggtgatgaagaaaaggtttatcctggccaactcccagtgttgacctgggaacataagctaacccatgttagacatgatttgccgccattcagacttacatggagagagataatgcagctggctggtattggtttacgtcttagtcgacatatccttgaggaaacttcaaaagggcgaattgctgttattgatcctatgaaaaagcgggctgcaagatctggtcagggtgtcccacttggtggtattggtgcaggaagtattggaagaagctacaaaggcgatttccaacgttggcaattgtttccaggatcttgtgaagataatgctgtattggcaaatcaattttctgccttcatttcccgccaagatggtaaaaaatattccacagtgttgcatcctgggaaaccagatttgccgaagaattggatcctgggactggaatatgagtggacaacaatctacttaccatgccctttaccctagggcttggacagtatatgatggagaacctgatcctgagctcaatatagtgtgccgtcagatatctccaattattccacacaattatcaacagagcagctatccagttgcagtgttcacttttaccgtaacaaactcaggacatacagctgctgatgtgactttgctttttacatgggctaactctgttggtggaaaatctgaactcaccggatatcattccaactccagtatgatagaaaaggatggtgttcatggcatactattacatcacagaacagcagatggtcaaccacatgtaacttttgtgatagcagcacaggagaaagaggatatccttatatctgaatgtccttactttgtgatatctgggagctccgcatctgatgaattcacagctaaagatatgtggaattctgtgaaagagcatggatcttttgatcatcttgatcccatcaagacatcgatgtgctccagaccaggatcatcaataggggcagctatcgctgcttcagttaagctggctcccaaggcaacccaggatatttcattttcacttgcatgggcttgtcctgaagtgaagttctctagtgggaaaacctatcataggcgttacaccaaattttatggcacagacggtgatgcagcagcagcccttgctcacgatgccattcttgagcatgcttcctgggagagacaaattgaggagtggcaggatcctattttgcaagatgagaggtttcctgcttggtttgttccaaccctaataattcatttacttggtacacaaaacctgaggctgctgaatgttgatttatagcgtgaactttattcgttaggtatccagttacacttttcaatgaactatactatcttaatgctggaggaactatatggacagatggattaccaccaattcaaagcttgacagcagttggctggaaaaagttttctcttgacatgttaaatggtgaatctgatgatttcaatgagatggttcgacagaataatactgcttctgatattcttcatcgaatggcatcagtatttgagaggatgcatgcatctattgcatcaaattctgctataggaacaactttgcttcagggtgaagagaacattggccagtttctatacctcgagggcatcgagtattatatgtggaacacatatgatgttcatttttatgcatcattttcactgatcatgttgtttccaaagcttcaactcagcgtccagagagactttgctgctgctgttatgatgcatgatcctgaaaagctgaggatcttgcatgatggaaaatgggctgcaagaaaagttctcggtgctgttcctcatgatcttggattatatgacccatggttcaaggtcaatgcgtacactctctataatacagatcggtggaaagatttgaatccgaagtttgtgctgcaagtttatagagatgtggtggccacaggcgacaaatcctttgctcgagctgtttggccatcagtttatatagcaatggcatatatggagcaatttgataaggataaagatgggatgatagaaaatgaggatttcccagatcaaacatatgacgtgtggtcaatggctggtataagtgcatactgtggtggtctttgggtggctgctcttcaggcagcatcggccttggcacgtgaggttggtgacaaagcttctgaaaagcttttttgggacaaatatgagaaggccaagtttgtctatagcaagctgtggaatggttcttacttcagttatgatgatggcgacaacaaaatgagcacatctatccaagcagatcaattggctggacaatggtatgccaaagcctgtggtctcttcccaattgttgacaaagacaaggcacaaagtgcgctagagaaggtatattctttcaatgtgatgaagttcaagggtggtacaaggggagccatgaatgggatgtggccagatggcactgtggacatgtctgcaatgcaatctagggagatatggccaggggtgacatatgcactagctgcaagcatgattcaggaaggcatggttgagcagggatttaaaacagctgaaggggtctatcatgctgcctggtcaccaggaggacttggatactcattccaaacccctgaagcctggaacaacgacgacgagtacaggtccctgtgctacatgcgcccgctcgccatatgggcaatgcaatgggcactgtcgaagccgaagctccacaacactccacaggcagatataccccaggactcattccccaagaaccagttcgcctacgcgcggatcacaaagctcctgcagctgcctgaagacgaatcgtccaaaagcttcgtccgggtggtgtacgagatcatccggaacaggtttaggtcctgatcgccgcctccgcacgcctgtgcgctgagtgtccgaattcttgatgatacaattcattagtcactgtcattgttgctgttggatcccgcggattcgtatatgaaactggtggtaataaacttgccaagtgcggtagttcgtatataaatgaatttattatatatgagctagctgttatatatgagtgacagtacgatggagtcacggagacatcttcgatt

SEQ ID NO: 38822 - DNA, 3349 bp, Zea Mays
cgctgtctgctcccacaggcaacagccacgtcttccgcgccgcagtgtccgatcgatcgatcccttctaggggaggggaattcaggacaggaggaggccaggttctcgccccgcaataggacgccgatcgattccggatcttagctcgagagcccggtgcccccttctcggtgctcgttgcaggattttcggccaggtatttaggaggaagacctgatttgtccttcagctaacagtcaacactgaaggggtagtccaaagaaataagaaacatgccagagacttatgttgatgagcaaccaaagggtgtgtctcggaatcgtccacctgcacatatgaatggtgatgaagaaaaggtttatcctggccaactcccagtgttgacctgggaacataagctaacccatgttagacatgatttgccgccattcagacttacatggagagagataatgcagctggctggtattggtttacgtcttagtcgacatatccttgaggaaacttcaaaagggcgaattgctgttattgatcctatgaaaaagcgggctgcaagatctggtcagggtgtcccacttggtggaagtattggaagaagctacaaaggcgatttccaacgttggcaattgtttccaggatcttgtgaagataatgctgtattggcaaatcaattttctgccttcatttcccgccaagatggtaaaaaatattccacagtgttgcatcctgggaaaccagatttgccgaaaggaagtgacatttcaggaattggatcctgggactggaatatgagtggacaacaatctacttaccatgccctttaccctagggcttggacagtatatgatggagaacctgatcctgagctcaatatagtgtgccgtcagatatctccaattattccacacaattatcaacagagcagctatccagttgcagtgttcacttttaccgtaacaaactcaggacatacagctgctgatgtgactttgctttttacatgggctaactctgttggtggaaaatctgaactcaccggatatcattccaactccagtatgatagaaaaggatggtgttcatggcatactattacatcacagaacagcagatggtcaaccacatgtaacttttgtgatagcagcacaggagaaagaggatatccttatatctgaatgtccttactttgtgatatctgggagctccgcatctgatgaattcacagctaaagatatgtggaattctgtgaaagagcatggatcttttgatcatcttgatcccatcaagacatcgatgtgctccagaccaggatcatcaataggggcagctatcgctgcttcagttaagctggctcccaaggcaacccaggatatttcattttcacttgcatgggcttgtcctgaagtgaagttctctagtgggaaaacctatcataggcgttacaccaaattttatggcacagacggtgatgcagcagcagcccttgctcacgatgccattcttgagcatgcttcctgggagagacaaattgaggagtggcaggatcctattttgcaagatgagaggtttcctgcttggtatccagttacacttttcaatgaactatactatcttaatgctggaggaactatatggacagatggattaccaccaattcaaagcttgacagcagttggctggaaaaagttttctcttgacatgttaaatggtgaatctgatgatttcaatgagatggttcgacagaataatactgcttctgatattcttcatcgaatggcatcagtatttgagaggatgcatgcatctattgcatcaaattctgctataggaacaactttgcttcagggtgaagagaacattggccagtttctatacctcgagggcatcgagtattatatgtggaacacatatgatgttcatttttatgcatcattttcactgatcatgttgtttccaaagcttcaactcagcgtccagagagactttgctgctgctgttatgatgcatgatcctgaaaagctgaggatcttgcatgatggaaaatgggctgcaagaaaagttctcggtgctgttcctcatgatcttggattatatgacccatggttcaaggtcaatgcgtacactctctataatacagatcggtggaaagatttgaatccgaagtttgtgctgcaagtttatagagatgtggtggccacaggcgacaaatcctttgctcgagctgtttggccatcagtttatatagcaatggcatatatggagcaatttgataaggataaagatgggatgatagaaaatgaggatttcccagatcaaacatatgacgtgtggtcaatggctggtataagtgcatactgtggtggtctttgggtggctgctcttcaggcagcatcggccttggcacgtgaggttggtgacaaagcttctgaaaagcttttttgggacaaatatgagaaggccaagtttgtctatagcaagctgtggaatggttcttacttcagttatgatgatggcgacaacaaaatgagcacatctatccaagcagatcaattggctggacaatggtatgccaaagcctgtggtctcttcccaattgttgacaaagacaaggcacaaagtgcgctagagaaggtatattctttcaatgtgatgaagttcaagggtggtacaaggggagccatgaatgggatgtggccagatggcactgtggacatgtctgcaatgcaatctagggagatatggccaggggtgacatatgcactagctgcaagcatgattcaggaaggcatggttgagcagggatttaaaacagctgaaggggtctatcatgctgcctggtcaccaggaggacttggatactcattccaaacccctgaagcctggaacaacgacgacgagtacaggtccctgtgctacatgcgcccgctcgccatatgggcaatgcaatgggcactgtcgaagccgaagctccacaacactccacaggcagatataccccaggactcattccccaagaaccagttcgcctacgcgcggatcacaaagctcctgcagctgcctgaagacgaatcgtccaaaagcttcgtccgggtggtgtacgagatcatccggaacaggtttaggtcctgatcgccgcctccgcacgcctgtgcgctgagtgtccgaattcttgatgatacaattcattagtcactgtcattgttgctgttggatcccgcggattcgtatatgaaactggtggtaataaacttgccaagtgcggtagttcgtatataaatgaatttattatatatgagctagctgttatatatgagtgacagtacgatggagtcacggagacatcttcgatt

SEQ ID NO: 38823 - DNA, 3407 bp, Zea Mays
gtctgctcccacaggcaacagccacgtcttccgcgccgcagtgtccgatcgatcgatcccttctaggggaggggaattcaggacaggaggaggccaggttctcgccccgcaataggacgccgatcgattccggatcttagctcgagagcccggtgcccccttctcggtgctcgttgcaggattttcggccaggtatttaggaggaagacctgatttgtccttcagctaacagtcaacactgaaggttcacttgggcaagcaatataatttttccttctattctagggtagtccaaagaaataagaaacatgccagagacttatgttgatgagcaaccaaagggtgtgtctcggaatcgtccacctgcacatatgaatggtgatgaagaaaaggtttatcctggccaactcccagtgttgacctgggaacataagctaacccatgttagacatgatttgccgccattcagacttacatggagagagataatgcagctggctggtattggtttacgtcttagtcgacatatccttgaggaaacttcaaaagggcgattttctacagattgctgttattgatcctatgaaaaagcgggctgcaagatctggtcagggtgtcccacttggtggtattggtgcaggaagtattggaagaagctacaaaggcgatttccaacgttggcaattgtttccaggatcttgtgaagataatgctgtattggcaaatcaattttctgccttcatttcccgccaagatggtaaaaaatattccacagtgttgcatcctgggaaaccagatttgccgaaaggaagtgacatttcaggaattggatcctgggactggaatatgagtggacaacaatctacttaccatgccctttaccctagggcttggacagtatatgatggagaacctgatcctgagctcaatatagtgtgccgtcagatatctccaattattccacacaattatcaacagagcagctatccagttgcagtgttcacttttaccgtaacaaactcaggacatacagctgctgatgtgactttgctttttacatgggctaactctgttggtggaaaatctgaactcaccggatatcattccaactccagtatgatagaaaaggatggtgttcatggcatactattacatcacagaacagcagatggtcaaccacatgtaacttttgtgatagcagcacaggagaaagaggatatccttatatctgaatgtccttactttgtgatatctgggagctccgcatctgatgaattcacagctaaagatatgtggaattctgtgaaagagcatggatcttttgatcatcttgatcccatcaagacatcgatgtgctccagaccaggatcatcaataggggcagctatcgctgcttcagttaagctggctcccaaggcaacccaggatatttcattttcacttgcatgggcttgtcctgaagtgaagttctctagtgggaaaacctatcataggcgttacaccaaattttatggcacagacggtgatgcagcagcagcccttgctcacgatgccattcttgagcatgcttcctgggagagacaaattgaggagtggcaggatcctattttgcaagatgagaggtttcctgcttggtatccagttacacttttcaatgaactatactatcttaatgctggaggaactatatggacagatggattaccaccaattcaaagcttgacagcagttggctggaaaaagttttctcttgacatgttaaatggtgaatctgatgatttcaatgagatggttcgacagaataatactgcttctgatattcttcatcgaatggcatcagtatttgagaggatgcatgcatctattgcatcaaattctgctataggaacaactttgcttcagggtgaagagaacattggccagtttctatacctcgagggcatcgagtattatatgtggaacacatatgatgttcatttttatgcatcattttcactgatcatgttgtttccaaagcttcaactcagcgtccagagagactttgctgctgctgttatgatgcatgatcctgaaaagctgaggatcttgcatgatggaaaatgggctgcaagaaaagttctcggtgctgttcctcatgatcttggattatatgacccatggttcaaggtcaatgcgtacactctctataatacagatcggtggaaagatttgaatccgaagtttgtgctgcaagtttatagagatgtggtggccacaggcgacaaatcctttgctcgagctgtttggccatcagtttatatagcaatggcatatatggagcaatttgataaggataaagatgggatgatagaaaatgaggatttcccagatcaaacatatgacgtgtggtcaatggctggtataagtgcatactgtggtggtctttgggtggctgctcttcaggcagcatcggccttggcacgtgaggttggtgacaaagcttctgaaaagcttttttgggacaaatatgagaaggccaagtttgtctatagcaagctgtggaatggttcttacttcagttatgatgatggcgacaacaaaatgagcacatctatccaagcagatcaattggctggacaatggtatgccaaagcctgtggtctcttcccaattgttgacaaagacaaggcacaaagtgcgctagagaaggtatattctttcaatgtgatgaagttcaagggtggtacaaggggagccatgaatgggatgtggccagatggcactgtggacatgtctgcaatgcaatctagggagatatggccaggggtgacatatgcactagctgcaagcatgattcaggaaggcatggttgagcagggatttaaaacagctgaaggggtctatcatgctgcctggtcaccaggaggacttggatactcattccaaacccctgaagcctggaacaacgacgacgagtacaggtccctgtgctacatgcgcccgctcgccatatgggcaatgcaatgggcactgtcgaagccgaagctccacaacactccacaggcagatataccccaggactcattccccaagaaccagttcgcctacgcgcggatcacaaagctcctgcagctgcctgaagacgaatcgtccaaaagcttcgtccgggtggtgtacgagatcatccggaacaggtttaggtcctgatcgccgcctccgcacgcctgtgcgctgagtgtccgaattcttgatgatacaattcattagtcactgtcattgttgctgttggatcccgcggattcgtatatgaaactggtggtaataaacttgccaagtgcggtagttcgtatataaatgaatttattatatatgagctagctgttatatatgagtgacagtacgatggagtcacggagacatcttcgatt

SEQ ID NO: 38824 - DNA, 3347 bp, Zea Mays
ccacgtcttccgcgccgcagtgtccgatcgatcgatcccttctaggggaggggaattcaggacaggaggaggccaggttctcgccccgcaataggacgccgatcgattccggatcttagctcgagagcccggtgcccccttctcggtgctcgttgcaggattttcggccaggtatttaggaggaagacctgatttgtccttcagctaacagtcaacactgaaggttcacttgggcaagcaatataatttttccttctattctagggtagtccaaagaaataagaaacatgccagagacttatgttgatgagcaaccaaagggtgtgtctcggaatcgtccacctgcacatatgaatggtgatgaagaaaaggtttatcctggccaactcccagtgttgacctgggaacataagctaacccatgttagacatgatttgccgccattcagacttacatggagagagataatgcagctggctggtattggtttacgtcttagtcgacatatccttgaggaaacttcaaaagggcgaattgctgttattgatcctatgaaaaagcgggctgcaagatctggtcagggtgtcccacttggtggaagtattggaagaagctacaaaggcgatttccaacgttggcaattgtttccaggatcttgtgaagataatgctgtattggcaaatcaattttctgccttcatttcccgccaagatggtaaaaaatattccacagtgttgcatcctgggaaaccagatttgccgaagaattggatcctgggactggaatatgagtggacaacaatctacttaccatgccctttaccctagggcttggacagtatatgatggagaacctgatcctgagctcaatatagtgtgccgtcagatatctccaattattccacacaattatcaacagagcagctatccagttgcagtgttcacttttaccgtaacaaactcaggacatacagctgctgatgtgactttgctttttacatgggctaactctgttggtggaaaatctgaactcaccggatatcattccaactccagtatgatagaaaaggatggtgttcatggcatactattacatcacagaacagcagatggtcaaccacatgtaacttttgtgatagcagcacaggagaaagaggatatccttatatctgaatgtccttactttgtgatatctgggagctccgcatctgatgaattcacagctaaagatatgtggaattctgtgaaagagcatggatcttttgatcatcttgatcccatcaagacatcgatgtgctccagaccaggatcatcaataggggcagctatcgctgcttcagttaagctggctcccaaggcaacccaggatatttcattttcacttgcatgggcttgtcctgaagtgaagttctctagtgggaaaacctatcataggcgttacaccaaattttatggcacagacggtgatgcagcagcagcccttgctcacgatgccattcttgagcatgcttcctgggagagacaaattgaggagtggcaggatcctattttgcaagatgagaggtttcctgcttggtatccagttacacttttcaatgaactatactatcttaatgctggaggaactatatggacagatggattaccaccaattcaaagcttgacagcagttggctggaaaaagttttctcttgacatgttaaatggtgaatctgatgatttcaatgagatggttcgacagaataatactgcttctgatattcttcatcgaatggcatcagtatttgagaggatgcatgcatctattgcatcaaattctgctataggaacaactttgcttcagggtgaagagaacattggccagtttctatacctcgagggcatcgagtattatatgtggaacacatatgatgttcatttttatgcatcattttcactgatcatgttgtttccaaagcttcaactcagcgtccagagagactttgctgctgctgttatgatgcatgatcctgaaaagctgaggatcttgcatgatggaaaatgggctgcaagaaaagttctcggtgctgttcctcatgatcttggattatatgacccatggttcaaggtcaatgcgtacactctctataatacagatcggtggaaagatttgaatccgaagtttgtgctgcaagtttatagagatgtggtggccacaggcgacaaatcctttgctcgagctgtttggccatcagtttatatagcaatggcatatatggagcaatttgataaggataaagatgggatgatagaaaatgaggatttcccagatcaaacatatgacgtgtggtcaatggctggtataagtgcatactgtggtggtctttgggtggctgctcttcaggcagcatcggccttggcacgtgaggttggtgacaaagcttctgaaaagcttttttgggacaaatatgagaaggccaagtttgtctatagcaagctgtggaatggttcttacttcagttatgatgatggcgacaacaaaatgagcacatctatccaagcagatcaattggctggacaatggtatgccaaagcctgtggtctcttcccaattgttgacaaagacaaggcacaaagtgcgctagagaaggtatattctttcaatgtgatgaagttcaagggtggtacaaggggagccatgaatgggatgtggccagatggcactgtggacatgtctgcaatgcaatctagggagatatggccaggggtgacatatgcactagctgcaagcatgattcaggaaggcatggttgagcagggatttaaaacagctgaaggggtctatcatgctgcctggtcaccaggaggacttggatactcattccaaacccctgaagcctggaacaacgacgacgagtacaggtccctgtgctacatgcgcccgctcgccatatgggcaatgcaatgggcactgtcgaagccgaagctccacaacactccacaggcagatataccccaggactcattccccaagaaccagttcgcctacgcgcggatcacaaagctcctgcagctgcctgaagacgaatcgtccaaaagcttcgtccgggtggtgtacgagatcatccggaacaggtttaggtcctgatcgccgcctccgcacgcctgtgcgctgagtgtccgaattcttgatgatacaattcattagtcactgtcattgttgctgttggatcccgcggattcgtatatgaaactggtggtaataaacttgccaagtgcggtagttcgtatataaatgaatttattatatatgagctagctgttatatatgagtgacagtacgatggagtcacggagacatcttcgatt

SEQ ID NO: 38825 - DNA, 3249 bp, Zea Mays
cgcgccgcagtgtccgatcgatcgatcccttctaggggaggggaattcaggacaggaggaggccaggttctcgccccgcaataggacgccgatcgattccggatcttagctcgagagcccggtgcccccttctcggtgctcgttgcaggattttcggggtagtccaaagaaataagaaacatgccagagacttatgttgatgagcaaccaaagggtgtgtctcggaatcgtccacctgcacatatgaatggaaaaggtttatcctggccaactcccagtgttgacctgggaacataagctaacccatgttagacatgatttgccgccattcagacttacatggagagagataatgcagctggctggtattggtttacgtcttagtcgacatatccttgaggaaacttcaaaagggcgaattgctgttattgatcctatgaaaaagcgggctgcaagatctggtcagggtgtcccacttggtggaagtattggaagaagctacaaaggcgatttccaacgttggcaattgtttccaggatcttgtgaagataatgctgtattggcaaatcaattttctgccttcatttcccgccaagatggtaaaaaatattccacagtgttgcatcctgggaaaccagatttgccgaaaggaagtgacatttcaggaattggatcctgggactggaatatgagtggacaacaatctacttaccatgccctttaccctagggcttggacagtatatgatggagaacctgatcctgagctcaatatagtgtgccgtcagatatctccaattattccacacaattatcaacagagcagctatccagttgcagtgttcacttttaccgtaacaaactcaggacatacagctgctgatgtgactttgctttttacatgggctaactctgttggtggaaaatctgaactcaccggatatcattccaactccagtatgatagaaaaggatggtgttcatggcatactattacatcacagaacagcagatggtcaaccacatgtaacttttgtgatagcagcacaggagaaagaggatatccttatatctgaatgtccttactttgtgatatctgggagctccgcatctgatgaattcacagctaaagatatgtggaattctgtgaaagagcatggatcttttgatcatcttgatcccatcaagacatcgatgtgctccagaccaggatcatcaataggggcagctatcgctgcttcagttaagctggctcccaaggcaacccaggatatttcattttcacttgcatgggcttgtcctgaagtgaagttctctagtgggaaaacctatcataggcgttacaccaaattttatggcacagacggtgatgcagcagcagcccttgctcacgatgccattcttgagcatgcttcctgggagagacaaattgaggagtggcaggatcctattttgcaagatgagaggtttcctgcttggtatccagttacacttttcaatgaactatactatcttaatgctggaggaactatatggacagatggattaccaccaattcaaagcttgacagcagttggctggaaaaagttttctcttgacatgttaaatggtgaatctgatgatttcaatgagatggttcgacagaataatactgcttctgatattcttcatcgaatggcatcagtatttgagaggatgcatgcatctattgcatcaaattctgctataggaacaactttgcttcagggtgaagagaacattggccagtttctatacctcgagggcatcgagtattatatgtggaacacatatgatgttcatttttatgcatcattttcactgatcatgttgtttccaaagcttcaactcagcgtccagagagactttgctgctgctgttatgatgcatgatcctgaaaagctgaggatcttgcatgatggaaaatgggctgcaagaaaagttctcggtgctgttcctcatgatcttggattatatgacccatggttcaaggtcaatgcgtacactctctataatacagatcggtggaaagatttgaatccgaagtttgtgctgcaagtttatagagatgtggtggccacaggcgacaaatcctttgctcgagctgtttggccatcagtttatatagcaatggcatatatggagcaatttgataaggataaagatgggatgatagaaaatgaggatttcccagatcaaacatatgacgtgtggtcaatggctggtataagtgcatactgtggtggtctttgggtggctgctcttcaggcagcatcggccttggcacgtgaggttggtgacaaagcttctgaaaagcttttttgggacaaatatgagaaggccaagtttgtctatagcaagctgtggaatggttcttacttcagttatgatgatggcgacaacaaaatgagcacatctatccaagcagatcaattggctggacaatggtatgccaaagcctgtggtctcttcccaattgttgacaaagacaaggcacaaagtgcgctagagaaggtatattctttcaatgtgatgaagttcaagggtggtacaaggggagccatgaatgggatgtggccagatggcactgtggacatgtctgcaatgcaatctagggagatatggccaggggtgacatatgcactagctgcaagcatgattcaggaaggcatggttgagcagggatttaaaacagctgaaggggtctatcatgctgcctggtcaccaggaggacttggatactcattccaaacccctgaagcctggaacaacgacgacgagtacaggtccctgtgctacatgcgcccgctcgccatatgggcaatgcaatgggcactgtcgaagccgaagctccacaacactccacaggcagatataccccaggactcattccccaagaaccagttcgcctacgcgcggatcacaaagctcctgcagctgcctgaagacgaatcgtccaaaagcttcgtccgggtggtgtacgagatcatccggaacaggtttaggtcctgatcgccgcctccgcacgcctgtgcgctgagtgtccgaattcttgatgatacaattcattagtcactgtcattgttgctgttggatcccgcggattcgtatatgaaactggtggtaataaacttgccaagtgcggtagttcgtatataaatgaatttattatatatgagctagctgttatatatgagtgacagtacgatggagtcacggagacatcttcgatt

SEQ ID NO: 38826 - DNA, 2346 bp, Zea Mays
cgcgccgcagtgtccgatcgatcgatcccttctaggggaggggaattcaggacaggaggaggccaggttctcgccccgcaataggacgccgatcgattccggatcttagctcgagagcccggtgcccccttctcggtgctcgttgcaggattttcggggtagtccaaagaaataagaaacatgccagagacttatgttgatgagcaaccaaagggtgtgtctcggaatcgtccacctgcacatatgaatgcatggatcttttgatcatcttgatcccatcaagacatcgatgtgctccagaccaggatcatcaataggggcagctatcgctgcttcagttaagctggctcccaaggcaacccaggatatttcattttcacttgcatgggcttgtcctgaagtgaagttctctagtgggaaaacctatcataggcgttacaccaaattttatggcacagacggtgatgcagcagcagcccttgctcacgatgccattcttgagcatgcttcctgggagagacaaattgaggagtggcaggatcctattttgcaagatgagaggtttcctgcttggtatccagttacacttttcaatgaactatactatcttaatgctggaggaactatatggacagatggattaccaccaattcaaagcttgacagcagttggctggaaaaagttttctcttgacatgttaaatggtgaatctgatgatttcaatgagatggttcgacagaataatactgcttctgatattcttcatcgaatggcatcagtatttgagaggatgcatgcatctattgcatcaaattctgctataggaacaactttgcttcagggtgaagagaacattggccagtttctatacctcgagggcatcgagtattatatgtggaacacatatgatgttcatttttatgcatcattttcactgatcatgttgtttccaaagcttcaactcagcgtccagagagactttgctgctgctgttatgatgcatgatcctgaaaagctgaggatcttgcatgatggaaaatgggctgcaagaaaagttctcggtgctgttcctcatgatcttggattatatgacccatggttcaaggtcaatgcgtacactctctataatacagatcggtggaaagatttgaatccgaagtttgtgctgcaagtttatagagatgtggtggccacaggcgacaaatcctttgctcgagctgtttggccatcagtttatatagcaatggcatatatggagcaatttgataaggataaagatgggatgatagaaaatgaggatttcccagatcaaacatatgacgtgtggtcaatggctggtataagtgcatactgtggtggtctttgggtggctgctcttcaggcagcatcggccttggcacgtgaggttggtgacaaagcttctgaaaagcttttttgggacaaatatgagaaggccaagtttgtctatagcaagctgtggaatggttcttacttcagttatgatgatggcgacaacaaaatgagcacatctatccaagcagatcaattggctggacaatggtatgccaaagcctgtggtctcttcccaattgttgacaaagacaaggcacaaagtgcgctagagaaggtatattctttcaatgtgatgaagttcaagggtggtacaaggggagccatgaatgggatgtggccagatggcactgtggacatgtctgcaatgcaatctagggagatatggccaggggtgacatatgcactagctgcaagcatgattcaggaaggcatggttgagcagggatttaaaacagctgaaggggtctatcatgctgcctggtcaccaggaggacttggatactcattccaaacccctgaagcctggaacaacgacgacgagtacaggtccctgtgctacatgcgcccgctcgccatatgggcaatgcaatgggcactgtcgaagccgaagctccacaacactccacaggcagatataccccaggactcattccccaagaaccagttcgcctacgcgcggatcacaaagctcctgcagctgcctgaagacgaatcgtccaaaagcttcgtccgggtggtgtacgagatcatccggaacaggtttaggtcctgatcgccgcctccgcacgcctgtgcgctgagtgtccgaattcttgatgatacaattcattagtcactgtcattgttgctgttggatcccgcggattcgtatatgaaactggtggtaataaacttgccaagtgcggtagttcgtatataaatgaatttattatatatgagctagctgttatatatgagtgacagtacgatggagtcacggagacatcttcgatt

SEQ ID NO: 38827 - DNA, 3245 bp, Zea Mays
cgcgccgcagtgtccgatcgatcgatcccttctaggggaggggaattcaggacaggaggaggccaggttctcgccccgcaataggacgccgatcgattccggatcttagctcgagagcccggtgcccccttctcggtgctcgttgcaggattttcggggtagtccaaagaaataagaaacatgccagagacttatgttgatgagcaaccaaagggtgtgtctcggaatcgtccacctgcacatatgaatggtgatgaagaaaaggtttatcctggccaactcccagtgttgacctgggaacataagctaacccatgttagacatgatttgccgccattcagacttacatggagagagataatgcagctggctggtattggtttacgtcttagtcgacatatccttgaggaaacttcaaaagggcgaattgctgttattgatcctatgaaaaagcgggctgcaagatctggtcagggtgtcccacttggtggaagtattggaagaagctacaaaggcgatttccaacgttggcaattgtttccaggatcttgtgaagataatgctgtattggcaaatcaattttctgccttcatttcccgccaagatggtaaaaaatattccacagtgttgcatcctgggaaaccagatttgccgaaaggaagtgacatttcaggaattggatcctgggactggaatatgagtggacaacaatctacttaccatgccctttaccctagggcttggacagtatatgatggagaacctgatcctgagctcaatatagtgtgccgtcagatatctccaattattccacacaattatcaacagagcagctatccagttgcagtgttcacttttaccgtaacaaactcaggacatacagctgctgatgtgactttgctttttacatgggctaactctgttggtggaaaatctgaactcaccggatatcattccaactccagtatgatagaaaaggatggtgttcatggcatactattacatcacagaacagcagatggtcaaccacatgtaacttttgtgatagcagcacaggagaaagaggatatccttatatctgaatgtccttactttgtgatatctgggagctccgcatctgatgaattcacagctaaagatatgtggaattctgtgaaagagcatggatcttttgatcatcttgatcccatcaagacatcgatgtgctccagaccaggatcatcaataggggcagctatcgctgcttcagttaagctggctcccaaggcaacccaggatatttcattttcacttgcatgggcttgtcctgaagtgaagttctctagtgggaaaacctatcataggcgttacaccaaattttatggcacagacggtgatgcagcagcagcccttgctcacgatgccattcttgagcatgcttcctgggagagacaaattgaggagtggcaggatcctattttgcaagatgagaggtatccagttacacttttcaatgaactatactatcttaatgctggaggaactatatggacagatggattaccaccaattcaaagcttgacagcagttggctggaaaaagttttctcttgacatgttaaatggtgaatctgatgatttcaatgagatggttcgacagaataatactgcttctgatattcttcatcgaatggcatcagtatttgagaggatgcatgcatctattgcatcaaattctgctataggaacaactttgcttcagggtgaagagaacattggccagtttctatacctcgagggcatcgagtattatatgtggaacacatatgatgttcatttttatgcatcattttcactgatcatgttgtttccaaagcttcaactcagcgtccagagagactttgctgctgctgttatgatgcatgatcctgaaaagctgaggatcttgcatgatggaaaatgggctgcaagaaaagttctcggtgctgttcctcatgatcttggattatatgacccatggttcaaggtcaatgcgtacactctctataatacagatcggtggaaagatttgaatccgaagtttgtgctgcaagtttatagagatgtggtggccacaggcgacaaatcctttgctcgagctgtttggccatcagtttatatagcaatggcatatatggagcaatttgataaggataaagatgggatgatagaaaatgaggatttcccagatcaaacatatgacgtgtggtcaatggctggtataagtgcatactgtggtggtctttgggtggctgctcttcaggcagcatcggccttggcacgtgaggttggtgacaaagcttctgaaaagcttttttgggacaaatatgagaaggccaagtttgtctatagcaagctgtggaatggttcttacttcagttatgatgatggcgacaacaaaatgagcacatctatccaagcagatcaattggctggacaatggtatgccaaagcctgtggtctcttcccaattgttgacaaagacaaggcacaaagtgcgctagagaaggtatattctttcaatgtgatgaagttcaagggtggtacaaggggagccatgaatgggatgtggccagatggcactgtggacatgtctgcaatgcaatctagggagatatggccaggggtgacatatgcactagctgcaagcatgattcaggaaggcatggttgagcagggatttaaaacagctgaaggggtctatcatgctgcctggtcaccaggaggacttggatactcattccaaacccctgaagcctggaacaacgacgacgagtacaggtccctgtgctacatgcgcccgctcgccatatgggcaatgcaatgggcactgtcgaagccgaagctccacaacactccacaggcagatataccccaggactcattccccaagaaccagttcgcctacgcgcggatcacaaagctcctgcagctgcctgaagacgaatcgtccaaaagcttcgtccgggtggtgtacgagatcatccggaacaggtttaggtcctgatcgccgcctccgcacgcctgtgcgctgagtgtccgaattcttgatgatacaattcattagtcactgtcattgttgctgttggatcccgcggattcgtatatgaaactggtggtaataaacttgccaagtgcggtagttcgtatataaatgaatttattatatatgagctagctgttatatatgagtgacagtacgatggagtcacggagacatcttcgatt

SEQ ID NO: 38828 - DNA, 3829 bp, Zea Mays
atggctgccgatcgtgcatggatgtacaatggttggagtaggaatggacgtcattctgatgattgggtagccaagaccaaagaatttgtggaccacgtattcgccttgtccttaaccggcactgtcagatgcccttgtaggcatcacgaaaacagtatatttcttaataaggaaagagttagcctagatctttgtcagtttggatttatgcccggatatgaggtgtgggaacatcatggtgaggtagtacccaaccgtaatgtagaagaggaggagaacaatgattgggctggcgatgatgcgatgcatgagatgctagattcgctacgtccagaattcaacctaagctccgaggatcctgccacaccagaggaagaggaggacgacgaggaggaggtgcaacaccatgaggaggaggacgagcaggcccatgaggaggatgacgaggaggaggtgcaacaccatgaggaggaggacgagcaggcccatgagggcatagatgctgaggcggatgacgataccactgaggctcctgtcgttcgacgaaggggcactcggaagggccactttgtcctacctccgtcagcgcctgcacaatctgaagctcgagtactgatcatcccggttggtgatagccaatgggaagacacgtcatttgacggtcgaggtcaccatagacaggttaatcaagtcttaggaaagagacgctatcgtgtggaacctgaggctcaagagcatgcagaccgagtattagagaaaaatgcgaagaaggtgtgcagggatgcattttccaatgctcgtctacaggttgggaacgcgtacatgaaacgccgaggtcattctatcaacaactttcgacaatattcagatgtctacttgactgtagacgagtacatggaggtaactcttccatggatggaacaccggccgcaggcttacaaggctttgtgtgagatatgggcttcgcccgagtggattgagaagtcaaacagaaatcgacataggcagcgccatcagcaggacgaggacgatgatgaggtcgtagtcaaccatacctatggggctgatggacacattcggttggctaagcgaatggaggctcaaactggagttgtcccgagcccaatcgatgtttataggagagggcatcgagcgaaaaacaatgaaatctccgatgagctgtgtagtcaagcggtcgttgagcgtatggaaacatacgggcaggagatggttaagaagtatggagaagactacgattggcgaggagcgcctaccatcgacgctgaagttgtgcattcacttggaggcaaggcgcatggacgatattctatgtttaccggtgttatcgattcgacggagttgcgttctcgtggcggctcttcgtcgcaggcgggctgtggtagtagcagacatagtcgtcgctctgtatctagcatggaggaagctatgagggagcagcaagaaaagtttcgtgaagagctgcggcaacaacaaatggcatttctccaacagcaatcagagtacatggttgcttacaacgcacaggcgcaacaagcaatgaactcttggtttccacagcaggcacagcagcaaccatttgttttccctcaatttcagctgtcgatgcctcagtggggattacatgctccgacacctccacctccacatcagggatccagggtcataggccacaacacgccatcactggtcatatcagcaccaggaggagcttatgcaggggagggagcttatgcaggagaggatccaaacccgtcacacggcttcgtcaaccagtttttggcttctgaagccagcaaatgtctaggaggagcgtcaggtctgaattcaacccagatggtaaccctcaaggttgatgcctcgccaaagcttgctcgaaagatccccgatacattccttggggtgttctttgaggagatgggccacggaggagctggtgggatatgggcagaactggtcagcaacagaggtttcgaagcaggaggccccaatactccgtcgaacattgacccctggctcatcgttggggacgactcctccgtctatgtggagactgatcgttcctcatgtttcagtcgaaacattgttgctctaaggatggaggtcctctgcaatgactgcccggctggcggtgttggcatttacaaccctggattctggggcatgccctatgtttggaccagaagagggtctttgatcatccaggctctcttgaaatattggttctgcagagttgcaggggattccaagtggataaaggtggagaagaagttggttgctaaaggaactaacagaacctcgaggcttcaaataacatccaagaagaaaggaactgtttggttggaccaagtgtcactcatgcctgcagatacatacaagggacatggttttcgtaaaggacttgtgtccatgctgatggatctaaaaccacgattcctaagatttcctgggggttgctttgtggaaggtggttggctaagaaacgcattcagatggagacaatccattggtccatgggaagagaggccaggacacttcggagattgttggcagtactggaccgacgatggtcttggatattatgaatttcttctgctttctgaggacataggtgctgccccaatctgggtattcaacaatggaatcagctacaacgatgaagttaatactgctactattgccccctttgtgaagaatttgctagaggcagtgcgaattcgacatggggctctgttagagccaaaatggggcatccctaaaccatttccagtcaagtatgttgcaattggaaatgaagattgtgagagaaagttttatagaggtaattacctcaagttttacaacgctataagagaggtctatccagacattcaactgatttcgaactgtgatggctcgtccggaccacttgatcatcctgctgacatatacgatttccacgtctatgccgatgctaagactctgttttccatgaagagcacgtttgacaagtcaccccgcagtggacccaaggcttttgtcagcgagtatgcagtttggaaaactgacgccggtagaggaactctcctggctgcattggcagaagcggctttccttactggactggagaagaacagtgatgctgttgagatggcttgccatgctccactattcgtaaacgatgatatcgagaaaaagtggaacccagacgtcatcgtcttcaacacctggcagcattacgggactcctagctactggatgcagaagcttttccgcgagtccagtggcgccatggttcatccgacgacgacgatcagttctggcagctctgctgattctctagcagcgtctgcaattacctggaaggattcagagaataatgactcgttcctaagagtaaaggcaagactacgatctgtactcataccagaagctcttgtgcagattgtaaactttggatctgatgctattagagttgcaatctccacagctggacttcaagctaccatcgatgtgctgcgatcgaccgctactgttctcacatcaaccgctgtgatggacgaaaactctttcagtaacccaaacaaggtcatgccggtcaagagccagctattcgacgcaggagcgcagatgcaagtcacgctgtctcctcactcattaacatctttcgatcttgctctggctacgtcgaaacttgtcacgttgtctgatgcctgaactgtgatgcacatttgtctgtatttgaggagatgtcagtgtagtgtaaagagttgtgtgctgatgatgaactgaacaaaaatgacactgcgatccacgtttttatctgtttgga

SEQ ID NO: 38829 - DNA, 3498 bp, Zea Mays
caccatccttaccgttcgcgtgaagcggcctatcgcacccgcgacattcagtcgctgcactgccggtggcggtgatgaagatcatcgctgtcatcgcgtattagggacggccatagcagagaggattcttccacggagacttgcccgtaaagcgcgatggagctggtaacctcaagacctgacgccgatcatgtggaggggatggttttggattagaaaacgggaaaagctgcagaaatcttcaaacgggaaaacataccatggagcagttaactctaatccaacttctattttgcacattacttttcccacctttctctcccccgtttaaggatgataatgaagagaggggaagatggggagcattgttcaatttttgctgccaatgtatttccttgaaaggaaaagaagagaaagaaatcgagttctgaggtaaatcctaattgtctggttagggaattgccgttttttttttgttatcgctattagcacatttctctttctgatctctttagcttgggtaatgcttatggatatcgatttgttctattttttggttttctacaccttgtgttgcatgtttttggctgcattgacgagcttcaattgtattgattgatcatggtgaagaaaattatttcatcctttgtatagccccaacgatacctttgagcaaataaagggaatacatcaattatctgttccaggcacaggccctagaagttgaggtttccccctctgaaattccaataaaataccagtctggagactctatagaattacataaagacctcattcacaattgctagtttggaacttcgaataagaatttcgtgaagtctactgttggatcaagagtacctggcttcatgcactgaacttttatggtaatgaagatattcaccaagaatcatctgccaagtttaatagagatcagatgcattcagtcaagtggaagggcataaatgtgcttctgagccacctttgtcctaagtgttctaagaaacatgatgacacaacttcaggaagccaaaccactggatgcacatgttggcaatggttcttcacaccatctactagtaatgatactgcaaatgtagcaagtgccaatggtggaaatacttctcaggtagaagaaaaggttcttgctcctagttacaagttggacaatgcagagacttcagtttcagctgttggccaccatacgaaatcaagcatgcaccatagactgaaaatatggatcagcagcgggcataatggaataatgggaaaatatgggaataagttagaattgggtatgccccatgaagctaggccattattattagatgaacatgcaaaacctggatggccagattggctcataaatgtggcaccagaggcagtgcgaggttggtttcctcggcgccaagattcatttgagaaattagacaaggttggacaaggaacttatagcagtgtctacaaagcccgagatcttaaaactgacaagtttgtcgcactaaaaaaggtgcgttttgtcaatgtggatcctgagagcgtgcgctttatggctagagagattcttattctacggaaactcaatcatccaaacatcatcaagttggaagggatcgtaacatcttcggtttcacgaagcctgtatcttgtatttgagtacatggaacatgatcttgttggtcttgctgcgactcctggccttaagtttactgagccacaggtcaaatgtttatttcagcagttacttagtggcctcgatcattgccatagcaatggagtgctgcatcgggacctaaagtgttccaacctcttgattgataacaatggtgttctgaagattgcggactttggtctagcaacctcatttgatcctgacaatcagcaaccattgactagccgtgttgcaacactgtggtacagaccacctgaacttcttctcggtgccaccaagtatggcccttctgtggatttgtggagcacagggtgcatttttgcagaactgcttgctggcaaaccaatcttgcctggaagaactgaggtggagcaacttcacaaaattttcaagctctgtggatcacctcctgatgactattggagtaaactggaagtaccacaagcagggatgttcaagcccagccgacagtatagtgggtgcattgctgagacatttaaagattttccaaactcagttgttcttctagataacttgcttgcactacaaccatatgctcgtggaacagctgctgagactctccgaagtgattttttcaggcaaaaaccacttgcttgcagcccctcaagcttaccgaagtgtcctccaagtaaagagtatgatgctagacttcgaatggaagaagcaaggcggaaaagaaaggcagctgagagtgtaagtggatttggatccatcgagacagaagatgtaaatcctttagcaagcgggaatacaaaggttgctatgattagacctgaatctgctgatgcaaggaatgcaatacttggttctcagaacaacaatctgggtttgaagggcccagctgtgaacaagggcaagagcagaatatatcagcactcaggttcaatgattacagcaaaaggaaacgtggagcagatgctcaaggagcatgaaaagaatatccaagaagcagtgcgcaaagcgcgcctcagcaagcacagagagttgtgaagcaggttgctgaggataaagtgttgatcatactgtcatttgcgtgttttgactcatgctactccgaaaccagataaaaagattaagttgccgttgcattgattcaatcctgggaagatcaaccacctgttagattggcatggagttccacacttccactacaggttatgcccagcagtttctgaaacatcacccgctttgtagtgccctgtgttgcagcagctttcttcttacctgaagcttcgaagcagatatcagtggtagcctggtaggagaggctgatggtgtggtgctctcagctaggcttacaccaccaaggccccatcctctagatcatttgaaaatttggcacagaaaggccttcgacagccgctcttctgctggacagacagatccatagaaaccgatatgcagcagtcatatattaatgtaataaattattatgcctgccacagggcaagtgctgcttctagcatactccaggtgtttgtaatttggtccggttttccgaccttgcagtatgaacagcgtcttcgttattctagcaactgttcatgattttgggatccacaagaagcagagcttggagctaccatttcggttgcaaaattgaggttccatttgacacaaatgttttcgttttaaaaaatattacgaatcaaaccctaatctggtaacagatcaaatcaagaagcagtggtttcaagttcaaaatgttgagaagtttgttatgagatcacaagacattttctacagcattgctccaattaaactatttgtattaagagtaaacaaaagctgtcggcatatctgac

SEQ ID NO: 38830 - DNA, 3276 bp, Zea Mays
gtgaagcggcctatcgcacccgcgacattcagtcgctgcactgccggtggcggtgatgaagatcatcgctgtcatcgcgtattagggacggccatagcagagaggattcttccacggagacttgcccgtaaagcgcgatggagctggtaacctcaagacctgacgccgatcatgtggaggggatggttttggaaaacgggaaaagctgcagaaatcttcaaacgggaaaacataccatggagcagttaactctaatccaacttctattttgcacattacttttcccacctttctctcccccgtttaaggatgataatgaagagaggggaagatggggagcattgttcaatttttgctgccaatgtatttccttgaaaggaaaagaagagaaagaaatcgagttctgagaaaattatttcatcctttgtatagccccaacgatacctttgagcaaataaagggaatacatcaattatctgttccaggcacaggccctagaagttgaggtttccccctctgaaattccaataaaataccagtctggagactctatagaattacataaagacctcattcacaattgctagtttggaacttcgaataagaatttcgtgaagtctactgttggatcaagagtacctggcttcatgcactgaacttttatggtaatgaagatattcaccaagaatcatctgccaagtttaatagagatcagatgcattcagtcaagtggaagggcataaatgtgcttctgagccacctttgtcctaagtgttctaagaaacatgatgacacaacttcaggaagccaaaccactggatgcacatgttggcaatggttcttcacaccatctactagtaatgatactgcaaatgtagcaagtgccaatggtggaaatacttctcaggtagaagaaaaggttcttgctcctagttacaagttggacaatgcagagacttcagtttcagctgttggccaccatacgaaatcaagcatgcaccatagactgaaaatatggatcagcagcgggcataatggaataatgggaaaatatgggaataagttagaattgggtatgccccatgaagctaggccattattattagatgaacatgcaaaacctggatggccagattggctcataaatgtggcaccagaggcagtgcgaggttggtttcctcggcgccaagattcatttgagaaattagacaaggttggacaaggaacttatagcagtgtctacaaagcccgagatcttaaaactgacaagtttgtcgcactaaaaaaggtgcgttttgtcaatgtggatcctgagagcgtgcgctttatggctagagagattcttattctacggaaactcaatcatccaaacatcatcaagttggaagggatcgtaacatcttcggtttcacgaagcctgtatcttgtatttgagtacatggaacatgatcttgttggtcttgctgcgactcctggccttaagtttactgagccacaggtcaaatgtttatttcagcagttacttagtggcctcgatcattgccatagcaatggagtgctgcatcgggacctaaagtgttccaacctcttgattgataacaatggtgttctgaagattgcggactttggtctagcaacctcatttgatcctgacaatcagcaaccattgactagccgtgttgcaacactgtggtacagaccacctgaacttcttctcggtgccaccaagtatggcccttctgtggatttgtggagcacagggtgcatttttgcagaactgcttgctggcaaaccaatcttgcctggaagaactgaggtggagcaacttcacaaaattttcaagctctgtggatcacctcctgatgactattggagtaaactggaagtaccacaagcagggatgttcaagcccagccgacagtatagtgggtgcattgctgagacatttaaagattttccaaactcagttgttcttctagataacttgcttgcactacaaccatatgctcgtggaacagctgctgagactctccgaagtgattttttcaggcaaaaaccacttgcttgcagcccctcaagcttaccgaagtgtcctccaagtaaagagtatgatgctagacttcgaatggaagaagcaaggcggaaaagaaaggcagctgagagtgtaagtggatttggatccatcgagacagaagatgtaaatcctttagcaagcgggaatacaaaggttgctatgattagacctgaatctgctgatgcaaggaatgcaatacttggttctcagaacaacaatctgggtttgaagggcccagctgtgaacaagggcaagagcagaatatatcagcactcaggttcaatgattacagcaaaaggaaacgtggagcagatgctcaaggagcatgaaaagaatatccaagaagcagtgcgcaaagcgcgcctcagcaagcacagagagttgtgaagcaggttgctgaggataaagtgttgatcatactgtcatttgcgtgttttgactcatgctactccgaaaccagataaaaagattaagttgccgttgcattgattcaatcctgggaagatcaaccacctgttagattggcatggagttccacacttccactacaggttatgcccagcagtttctgaaacatcacccgctttgtagtgccctgtgttgcagcagctttcttcttacctgaagcttcgaagcagatatcagtggtagcctggtaggagaggctgatggtgtggtgctctcagctaggcttacaccaccaaggccccatcctctagatcatttgaaaatttggcacagaaaggccttcgacagccgctcttctgctggacagacagatccatagaaaccgatatgcagcagtcatatattaatgtaataaattattatgcctgccacagggcaagtgctgcttctagcatactccaggtgtttgtaatttggtccggttttccgaccttgcagtatgaacagcgtcttcgttattctagcaactgttcatgattttgggatccacaagaagcagagcttggagctaccatttcggttgcaaaattgaggttccatttgacacaaatgttttcgttttaaaaaatattacgaatcaaaccctaatctggtaacagatcaaatcaagaagcagtggtttcaagttcaaaatgttgagaagtttgttatgagatcacaagacattttctacagcattgctccaattaaactatttgtattaagagtaaacaaaagctgtcggcatatctgac

SEQ ID NO: 38831 - DNA, 3176 bp, Zea Mays
gaagcggcctatcgcacccgcgacattcagtcgctgcactgccggtggcggtgatgaagatcatcgctgtcatcgcgtattagggacggccatagcagagaggattcttccacggagacttgcccgtaaagcgcgatggagctggtaacctcaagacctgacgccgatcatgtggaggggatggttttggaaaacgggaaaagctgcagaaatcttcaaacgggaaaacataccatggagcagttaactctaatccaacttctattttgcacattacttttcccacctttctctcccccgtttaaggatgataatgaagagaggggaagatggggagcattgttcaatttttgctgccaatgtatttccttgaaaggaaaagaagagaaagaaatcgagttctgaggtttccccctctgaaattccaataaaataccagtctggagactctatagaattacataaagacctcattcacaattgctagtttggaacttcgaataagaatttcgtgaagtctactgttggatcaagagtacctggcttcatgcactgaacttttatggtaatgaagatattcaccaagaatcatctgccaagtttaatagagatcagatgcattcagtcaagtggaagggcataaatgtgcttctgagccacctttgtcctaagtgttctaagaaacatgatgacacaacttcaggaagccaaaccactggatgcacatgttggcaatggttcttcacaccatctactagtaatgatactgcaaatgtagcaagtgccaatggtggaaatacttctcaggtagaagaaaaggttcttgctcctagttacaagttggacaatgcagagacttcagtttcagctgttggccaccatacgaaatcaagcatgcaccatagactgaaaatatggatcagcagcgggcataatggaataatgggaaaatatgggaataagttagaattgggtatgccccatgaagctaggccattattattagatgaacatgcaaaacctggatggccagattggctcataaatgtggcaccagaggcagtgcgaggttggtttcctcggcgccaagattcatttgagaaattagacaaggttggacaaggaacttatagcagtgtctacaaagcccgagatcttaaaactgacaagtttgtcgcactaaaaaaggtgcgttttgtcaatgtggatcctgagagcgtgcgctttatggctagagagattcttattctacggaaactcaatcatccaaacatcatcaagttggaagggatcgtaacatcttcggtttcacgaagcctgtatcttgtatttgagtacatggaacatgatcttgttggtcttgctgcgactcctggccttaagtttactgagccacaggtcaaatgtttatttcagcagttacttagtggcctcgatcattgccatagcaatggagtgctgcatcgggacctaaagtgttccaacctcttgattgataacaatggtgttctgaagattgcggactttggtctagcaacctcatttgatcctgacaatcagcaaccattgactagccgtgttgcaacactgtggtacagaccacctgaacttcttctcggtgccaccaagtatggcccttctgtggatttgtggagcacagggtgcatttttgcagaactgcttgctggcaaaccaatcttgcctggaagaactgaggtggagcaacttcacaaaattttcaagctctgtggatcacctcctgatgactattggagtaaactggaagtaccacaagcagggatgttcaagcccagccgacagtatagtgggtgcattgctgagacatttaaagattttccaaactcagttgttcttctagataacttgcttgcactacaaccatatgctcgtggaacagctgctgagactctccgaagtgattttttcaggcaaaaaccacttgcttgcagcccctcaagcttaccgaagtgtcctccaagtaaagagtatgatgctagacttcgaatggaagaagcaaggcggaaaagaaaggcagctgagagtgtaagtggatttggatccatcgagacagaagatgtaaatcctttagcaagcgggaatacaaaggttgctatgattagacctgaatctgctgatgcaaggaatgcaatacttggttctcagaacaacaatctgggtttgaagggcccagctgtgaacaagggcaagagcagaatatatcagcactcaggttcaatgattacagcaaaaggaaacgtggagcagatgctcaaggagcatgaaaagaatatccaagaagcagtgcgcaaagcgcgcctcagcaagcacagagagttgtgaagcaggttgctgaggataaagtgttgatcatactgtcatttgcgtgttttgactcatgctactccgaaaccagataaaaagattaagttgccgttgcattgattcaatcctgggaagatcaaccacctgttagattggcatggagttccacacttccactacaggttatgcccagcagtttctgaaacatcacccgctttgtagtgccctgtgttgcagcagctttcttcttacctgaagcttcgaagcagatatcagtggtagcctggtaggagaggctgatggtgtggtgctctcagctaggcttacaccaccaaggccccatcctctagatcatttgaaaatttggcacagaaaggccttcgacagccgctcttctgctggacagacagatccatagaaaccgatatgcagcagtcatatattaatgtaataaattattatgcctgccacagggcaagtgctgcttctagcatactccaggtgtttgtaatttggtccggttttccgaccttgcagtatgaacagcgtcttcgttattctagcaactgttcatgattttgggatccacaagaagcagagcttggagctaccatttcggttgcaaaattgaggttccatttgacacaaatgttttcgttttaaaaaatattacgaatcaaaccctaatctggtaacagatcaaatcaagaagcagtggtttcaagttcaaaatgttgagaagtttgttatgagatcacaagacattttctacagcattgctccaattaaactatttgtattaagagtaaacaaaagctgtcggcatatctgac

SEQ ID NO: 38832 - DNA, 3162 bp, Zea Mays
gcgacattcagtcgctgcactgccggtggcggtgatgaagatcatcgctgtcatcgcgtattagggacggccatagcagagaggattcttccacggagacttgcccgtaaagcgcgatggagctggtaacctcaagacctgacgccgatcatgtggaggggatggttttggattagaaaacgggaaaagctgcagaaatcttcaaacgggaaaacataccatggagcagttaactctaatccaacttctattttgcacattacttttcccacctttctctcccccgtttaaggatgataatgaagagaggggaagatggggagcattgttcaatttttgctgccaatgtatttccttgaaaggaaaagaagagaaagaaatcgagttctgaggtttccccctctgaaattccaataaaataccagtctggagactctatagaattacataaagacctcattcacaattgctagtttggaacttcgaataagaatttcgtgaagtctactgttggatcaagagtacctggcttcatgcactgaacttttatggtaatgaagatattcaccaagaatcatctgccaagtttaatagagatcagatgcattcagtcaagtggaagggcataaatgtgcttctgagccacctttgtcctaagtgttctaagaaacatgatgacacaacttcaggaagccaaaccactggatgcacatgttggcaatggttcttcacaccatctactagtaatgatactgcaaatgtagcaagtgccaatggtggaaatacttctcaggtagaagaaaaggttcttgctcctagttacaagttggacaatgcagagacttcagtttcagctgttggccaccatacgaaatcaagcatgcaccatagactgaaaatatggatcagcagcgggcataatggaataatgggaaaatatgggaataagttagaattgggtatgccccatgaagctaggccattattattagatgaacatgcaaaacctggatggccagattggctcataaatgtggcaccagaggcagtgcgaggttggtttcctcggcgccaagattcatttgagaaattagacaaggttggacaaggaacttatagcagtgtctacaaagcccgagatcttaaaactgacaagtttgtcgcactaaaaaaggtgcgttttgtcaatgtggatcctgagagcgtgcgctttatggctagagagattcttattctacggaaactcaatcatccaaacatcatcaagttggaagggatcgtaacatcttcggtttcacgaagcctgtatcttgtatttgagtacatggaacatgatcttgttggtcttgctgcgactcctggccttaagtttactgagccacaggtcaaatgtttatttcagcagttacttagtggcctcgatcattgccatagcaatggagtgctgcatcgggacctaaagtgttccaacctcttgattgataacaatggtgttctgaagattgcggactttggtctagcaacctcatttgatcctgacaatcagcaaccattgactagccgtgttgcaacactgtggtacagaccacctgaacttcttctcggtgccaccaagtatggcccttctgtggatttgtggagcacagggtgcatttttgcagaactgcttgctggcaaaccaatcttgcctggaagaactgaggtggagcaacttcacaaaattttcaagctctgtggatcacctcctgatgactattggagtaaactggaagtaccacaagcagggatgttcaagcccagccgacagtatagtgggtgcattgctgagacatttaaagattttccaaactcagttgttcttctagataacttgcttgcactacaaccatatgctcgtggaacagctgctgagactctccgaagtgattttttcaggcaaaaaccacttgcttgcagcccctcaagcttaccgaagtgtcctccaagtaaagagtatgatgctagacttcgaatggaagaagcaaggcggaaaagaaaggcagctgagagtgtaagtggatttggatccatcgagacagaagatgtaaatcctttagcaagcgggaatacaaaggttgctatgattagacctgaatctgctgatgcaaggaatgcaatacttggttctcagaacaacaatctgggtttgaagggcccagctgtgaacaagggcaagagcagaatatatcagcactcaggttcaatgattacagcaaaaggaaacgtggagcagatgctcaaggagcatgaaaagaatatccaagaagcagtgcgcaaagcgcgcctcagcaagcacagagagttgtgaagcaggttgctgaggataaagtgttgatcatactgtcatttgcgtgttttgactcatgctactccgaaaccagataaaaagattaagttgccgttgcattgattcaatcctgggaagatcaaccacctgttagattggcatggagttccacacttccactacaggttatgcccagcagtttctgaaacatcacccgctttgtagtgccctgtgttgcagcagctttcttcttacctgaagcttcgaagcagatatcagtggtagcctggtaggagaggctgatggtgtggtgctctcagctaggcttacaccaccaaggccccatcctctagatcatttgaaaatttggcacagaaaggccttcgacagccgctcttctgctggacagacagatccatagaaaccgatatgcagcagtcatatattaatgtaataaattattatgcctgccacagggcaagtgctgcttctagcatactccaggtgtttgtaatttggtccggttttccgaccttgcagtatgaacagcgtcttcgttattctagcaactgttcatgattttgggatccacaagaagcagagcttggagctaccatttcggttgcaaaattgaggttccatttgacacaaatgttttcgttttaaaaaatattacgaatcaaaccctaatctggtaacagatcaaatcaagaagcagtggtttcaagttcaaaatgttgagaagtttgttatgagatcacaagacattttctacagcattgctccaattaaactatttgtattaagagtaaacaaaagctgtcggcatatctgac

SEQ ID NO: 38833 - DNA, 3294 bp, Zea Mays
atcgctgtcatcgcgtattagggacggccatagcagagaggattcttccacggagacttgcccgtaaagcgcgatggagctggtaacctcaagacctgacgccgatcatgtggaggggatggttttggattagaaaacgggaaaagctgcagaaatcttcaaacgggaaaacataccatggagcagttaactctaatccaacttctattttgcacattacttttcccacctttctctcccccgtttaaggatgataatgaagagaggggaagatggggagcattgttcaatttttgctgccaatgtatttccttgaaaggaaaagaagagaaagaaatcgagttctgagccccaacgatacctttgagcaaataaagggaatacatcaattatctgttccaggcacaggccctagaagttgaggtttccccctctgaaattccaataaaataccagtctggagactctatagaattacataaagacctcattcacaattgctagtttggaacttcgaataagaatttcgtgaagtctactgttggatcaagagtacctggcttcatgcactgaacttttatggtaatgaagatattcaccaagaatcatctgccaagtttaatagagatcagatgcattcagtcaagtggaagggcataaatgtgcttctgagccacctttgtcctaagtgttctaagaaacatgatgacacaacttcaggaagccaaaccactggatgcacatgttggcaatggttcttcacaccatctactagtaatgatactgcaaatgtagcaagtgccaatggtggaaatacttctcaggtagaagaaaaggttcttgctcctagttacaagttggacaatgcagagacttcagtttcagctgttggccaccatacgaaatcaagcatgcaccatagactgaaaatatggatcagcagcgggcataatggaataatgggaaaatatgggaataagttagaattgggtatgccccatgaagctaggccattattattagatgaacatgcaaaacctggatggccagattggctcataaatgtggcaccagaggcagtgcgaggttggtttcctcggcgccaagattcatttgagaaattagacaaggttggacaaggaacttatagcagtgtctacaaagcccgagatcttaaaactgacaagtttgtcgcactaaaaaaggtgcgttttgtcaatgtggatcctgagagcgtgcgctttatggctagagagattcttattctacggaaactcaatcatccaaacatcatcaagttggaagggatcgtaacatcttcggtttcacgaagcctgtatcttgtatttgagtacatggaacatgatcttgttggtcttgctgcgactcctggccttaagtttactgagccacaggtcaaatgtttatttcagcagttacttagtggcctcgatcattgccatagcaatggagtgctgcatcgggacctaaagtgttccaacctcttgattgataacaatggtgttctgaagattgcggactttggtctagcaacctcatttgatcctgacaatcagcaaccattgactagccgtgttgcaacactgtggtacagaccacctgaacttcttctcggtgccaccaagtatggcccttctgtggatttgtggagcacagggtgcatttttgcagaactgcttgctggcaaaccaatcttgcctggaagaactgaggtggagcaacttcacaaaattttcaagctctgtggatcacctcctgatgactattggagtaaactggaagtaccacaagcagggatgttcaagcccagccgacagtatagtgggtgcattgctgagacatttaaagattttccaaactcagttgttcttctagataacttgcttgcactacaaccatatgctcgtggaacagctgctgagactctccgaagtgattttttcaggcaaaaaccacttgcttgcagcccctcaagcttaccgaagtgtcctccaagtaaagagtatgatgctagacttcgaatggaagaagcaaggcggtaccatttttccaaatatttcttgtttgcttcaggtctgcgaggttgcaatcaagaagaattgttagttatgttgatgtactgtcttcttgtctcaataggaaaagaaaggcagctgagagtgtaagtggatttggatccatcgagacagaagatgtaaatcctttagcaagcgggaatacaaaggttgctatgattagacctgaatctgctgatgcaaggaatgcaatacttggttctcagaacaacaatctgggtttgaagggcccagctgtgaacaagggcaagagcagaatatatcagcactcaggttcaatgattacagcaaaaggaaacgtggagcagatgctcaaggagcatgaaaagaatatccaagaagcagtgcgcaaagcgcgcctcagcaagcacagagagttgtgaagcaggttgctgaggataaagtgttgatcatactgtcatttgcgtgttttgactcatgctactccgaaaccagataaaaagattaagttgccgttgcattgattcaatcctgggaagatcaaccacctgttagattggcatggagttccacacttccactacaggttatgcccagcagtttctgaaacatcacccgctttgtagtgccctgtgttgcagcagctttcttcttacctgaagcttcgaagcagatatcagtggtagcctggtaggagaggctgatggtgtggtgctctcagctaggcttacaccaccaaggccccatcctctagatcatttgaaaatttggcacagaaaggccttcgacagccgctcttctgctggacagacagatccatagaaaccgatatgcagcagtcatatattaatgtaataaattattatgcctgccacagggcaagtgctgcttctagcatactccaggtgtttgtaatttggtccggttttccgaccttgcagtatgaacagcgtcttcgttattctagcaactgttcatgattttgggatccacaagaagcagagcttggagctaccatttcggttgcaaaattgaggttccatttgacacaaatgttttcgttttaaaaaatattacgaatcaaaccctaatctggtaacagatcaaatcaagaagcagtggtttcaagttcaaaatgttgagaagtttgttatgagatcacaagacattttctacagcattgctccaattaaactatttgtattaagagtaaacaaaagctgtcggcatatctgac

SEQ ID NO: 38834 - DNA, 2335 bp, Zea Mays
gaaaagatgttgtccataacgacacctcaattcgtcttcatcccccaatttcgatcaacgatgaaatagagtaagaggtcagcagccaagaaaatgaatactaacacataacataaatggaggatagatactagtaggatatttagttttcttcaccatcaggaaaaaaaattggaaggaaatcagtccagtccagtcgaaatcagctactactatcatgcatgcttggttgcttgctcccctaccttgtgacaaagcaacgagcaccggaaaagggaaggaaaaaaaagagacgataataacctggactttgttcgttttgttgtttcaagaaaagttcatcacccacttctctccctgcttggacgacgacggtagatagatcacttgggaaggaatggactaatggaacagtgaaatagccatcgatgcggttgtcggtggtcactcgagcttgagcggcagcggggagccgggaccgccgcggtgacaggacgacccggcctgcggcggcggcggcggcggcggcatgactccagcgggcatctgcagaggcaagtgcagctgtgggggtggcggcggcggcggcggcgacgccatgcccgccatcgcctgctcctgcgccggcgaggcctcgaggcgcttggtggcgaggttgtgcttgttgttgtgcatccacaccttgagcacgcgccgcttcacgccgatctcctggcagaaggcctgcaccatgccgtcgtccagcttctggaggcgccaccccacgcgctccgcgaactccagcatgcgcgccttctgctccggggtgaacttggtgcggaaccgcttcctggacgacgacgacccgccgctgccgcgcgccgcgtccccgcagccgccgcggccgccctccatgtcgtcggactccgaggtgtgcatcatgttcagcggcatcacgtactggtggtggtggtgggcgtgccctggcggcggcggcagcgccggagggagcgcgcgcgccgacgcgtaggcggcgtaggggtcggccccggagatcaggagccccccgccgccgctcttgtggtgcgggtgcgccatggcgggggccaggaggcggcgggcggcacggtggccgtggccgtgcccgaggccgaggccgagaccgaggccgctgaagccttcggcggcgccgtacatgtcgtcgtcctcgtcgtccacctccttgcggtggaaattgcggtggcagccgcaggcggagcacttgagcgcctccaacgagccctcctcgccgcttggcatgaactcgccacacccgtcggtggcgttcccgccgatggccgccgcgtgattcttgaggcactcccggtacttcaccgtggagctgcccccgccgccgccggccccggctgccggaccgcgcttcttcgccgagctctccgtctcctccgccgcggcaggcggtggtggcagcggcggcgccggagactggccgttgttgctgccgtggtcacggtgcagctgcaggacatggccgccgacgccggctccgtagggcgacgcgacgttggcgtgcattgggatcgcgagctcgccctgcgtgccagatagatccatgcctcctggtcccgatccgtcgtcctcttctcggaggcgccgctccagagagaagatgcttcttgctggtgctgctgacgcttctgttctctgcagcggcacaatggaaaccatgatgagagagcgagcaagaaaaggccaatggcgcccagagagctcctagctcccctcactctcaagggtagatgcaacaaaattctcagtgcttcttgggactctcaacacaggcagaaggcactgaaggaaagagagagagactgtgagagagagagagagaggaggaggaggaggagggatcagagagaacaaaaagggtgctcctgcggtgaggtgcttggtgggggatcttgggaccttatcaacaagatactagttgcaattgcaaaccccaggagggaggttgtaagcaagctgctaaattttgaggccatagaataatgcatattgttatctgtgcttgctgccatgccctatactacatatctatcttgccagcttctttcttcttcttctgctactttcttgggctcttccccatgcaatgcaatgcaatgcgcacaagattacattacatacaagttggaagcaagggaggacggaaggaaggagaaagctactcggctatagtggaaggaagaaggatgaacagtgaggatgttgttcttaccaaaaggcagcaaggttactttgatgatctctcctggtcctggttactgctgggtccaagtatttactggttact

SEQ ID NO: 38835 - DNA, 1200 bp, Zea Mays
gttgggtgtgcataatgaactgttgggctctgggcaaccctaatttgttgggcctcggccaaccccacctgggctgggtgtatcacgtaatatccgatagtgtccgattcgatcacacccctaataggggagcactattgtctcttatactttaattatgctatttctttgtgatattaactctatttaatatttataacataataataatatgtattatcgtagtacaaatattttatgaattataaacttcaaaaactgataaaaatgttaaataactgagtttagtctataaaggagctagataaggggaatggtcagagatgtctcatatgtaaaatataatagagagtatagatatgaggacaaatatggaagaatgtttggagttagtcttaacgcagttggagagggggtagagactcttgtagctatgaagtcaggatgaatggctaaaggaggatgggaagtgagagtgagagagttggcgttgttcgtcaaagaaagaataaaagagtaggttgaaagaagaaggcaacctatgctccattagataaaaatagatggttaaaattggttgaccggacaatatgcccaaaacaacaatggtcataaaaatagcatcaaccaacttttaggataccattcatttgttgttttcaccattatatatatatatatatatgtatatatattgtgaattatgtcgaccaaatatgaacataactgggcacacataatatctttttcagacataatatatcaactattatatacccacaaaatgatataacactacacagaatacatagagtgatcttcaaaacaataataatgatatggataaattaaataacaattttatatttggtttgagggatgaggcaatttatcatgttggttttcatatttttgtttggttttaatcatatcattgtctcattactcatatctaaattattagtataaacatgagggatatagagtaatcccacatatatacattcatagaacaaactcctcaattaactaccgccacatataggatgaagtgattcctcaaactaagaaatttcttatataatgaatgttaaagtgacacaccaatagaagaaggtgaatcaaaacattatagaattacatattttaaggaagttgtggtccaaagaaccatgtgattgttaccttgaaacttaaaac

SEQ ID NO: 38836 - DNA, 1347 bp, Zea Mays
gattgctctggctagaatgggtcagtgactataaagcatggctctgcttctgcatggacaccgcttgtggcaccatagaccgcttacttttcaattcatccaccatacgaatggggaaaaggccaaactctagaacagcagttggctgcatggaatcgctccaaaaccccggttccaaatatctgtaacttagttaagcataagaacaaatcatgtggctagaatgggtcaggcaagagctacataacgatgcgtgctgcagggtagaataaatgacactactaggcttgaggaatctatcaccatgtgggttcaactccaagttgtacacctgcatcctgatgtgaaggactccatcacctataaatgggcttcgaatgtagaatacaccaccaagtcggtgtatcagattcaattcgatgggtcctacaataccttccgcaacaacatgatatggaaagcaaaggcagaaaataaatgcgagctcttcacttggaccttagaaaaagataaaattctaatcgctgataatctggaaaaaagaggatcgccacatcaaacatcttgcgtactatcccatggtcaacaggggagatttatgtctgctttgcacttttgaggctggcgtttggaggcagttgctagcttgggagcaattttctctgccttcacatttccaggttgctagttacacctccattgctaattagtgggaactgggaagttgttgttaatacagtgtcaaaatagaaaaaacaaatattcaatggcctgtgcattttcgtcatgtgggacttgtggaaagaaagaaaccagaggatattccaaaggaaagaaagaaaccagaggatattccaaagtgagaactcaacgcctctaacggtaacgttacacgtaaaagatgacatggaacaacagcagcagcaggttttcaatctatgtaaatggaggacctagatttgttggcttatatcctgttttagagctcttttgtttgcccctctagggaacgtcatgtaacaaaccaaagcaaaacatgctattttctttctactttaatgcaaggcagagctcctgccaccttttttcacaaaaaaaaaaaaaaaaaaaaacttccccaaccacattcctcttcattacaatgcatatttgattccagtaaccacagtaaaggctactaatagtactccatctagtacaaacaatttatgtccattgactgcacacatagaaatacattatgattgctaaattcattaattaaaatggtaaatgacgagcattttagactgttttagtaaaacatatagaagatactacctctgttagtaaatgtatgaaccaaac

SEQ ID NO: 38837 - DNA, 933 bp, Zea Mays
gcgccgtgtggcccacgccaggcttgcagtgggagtcggaccagctggtggagtcttcgtacatcagggagctcggcgacgacctgagcatcatccacctcaagttcggcgacgcctcctcctccaccaggaggcccgcccggcgccgtgacctggtcgtctatgagcggcgccaggccatggacgacggcacgctggtggtcgcggtggcctcgctgcccaaggagatcgccgcggggctgctaccgccgcccgcggccaccggcaagggcggcggaggctccgtcgtcggccgcagcctgctgctgcagtccggctgggtcgtcgaaaggctcgacggcgacgccggctcctgcgtcgtcacctacgtcgtgcagctggacccggccgccgggtggctgccgcggtgcatcgtcagccggctcaacagcaagctcgtcatgatcatcgccaagctcaggaggatcgcgcaggccaccgtgcctgccgccgccgcagaggtgtgacgtgcatagctaccagcaagtgatcgaaatcgaactagcagcatcgggtcagctgcacgtttagttgcattgtgtgtgtgcctaagtaaatagatatatacgtactatatgtcttctttttgtagggacagagggcatgcgtctatcttgggatgcacccgcatctgtatacgtactgctacaagactatgtcagtgagaattactatgtgtgcacgttttagtgttatagaattcgcctacacgactgttgatctttagcgaccttaatttatttctaactgttggtataaagctctactcaaacagtccagttagcctttacacaggtggtttcaagaaatatttgtagcacactgtctgtaatgtgatagacacacatcacatgtagttcgagtttagggttaattactgttggcttaattatt

SEQ ID NO: 38838 - DNA, 1021 bp, Zea Mays
atttggactcgcaatgttttgtgtactagcaacttctgctttccgcttgggaacgtggtactggacaccaaggcaaggctgggctgctgggccggtgtcgatctggcacgaaagcagtgggagtcggaccagctggtggagtcttcgtacatcagggagctcggcgacgacctgagcatcatccacctcaagttcggcgacgcctcctcctccaccaggaggcccgcccggcgccgtgacctggtcgtctatgagcggcgccaggccatggacgacggcacgctggtggtcgcggtggcctcgctgcccaaggagatcgccgcggggctgctaccgccgcccgcggccaccggcaagggcggcggaggctccgtcgtcggccgcagcctgctgctgcagtccggctgggtcgtcgaaaggctcgacggcgacgccggctcctgcgtcgtcacctacgtcgtgcagctggacccggccgccgggtggctgccgcggtgcatcgtcagccggctcaacagcaagctcgtcatgatcatcgccaagctcaggaggatcgcgcaggccaccgtgcctgccgccgccgcagaggtgtgacgtgcatagctaccagcaagtgatcgaaatcgaactagcagcatcgggtcagctgcacgtttagttgcattgtgtgtgtgcctaagtaaatagatatatacgtactatatgtcttctttttgtagggacagagggcatgcgtctatcttgggatgcacccgcatctgtatacgtactgctacaagactatgtcagtgagaattactatgtgtgcacgttttagtgttatagaattcgcctacacgactgttgatctttagcgaccttaatttatttctaactgttggtataaagctctactcaaacagtccagttagcctttacacaggtggtttcaagaaatatttgtagcacactgtctgtaatgtgatagacacacatcacatgtagttcgagtttagggttaattactgttggcttaattatt

SEQ ID NO: 38839 - DNA, 1995 bp, Zea Mays
gatggttggactgaattcgtgcaggtctgctggctcaactcggcttttgaaaggtccgcagcccgcaagaaaaccaaaagggttcccagtactgaataccttcacgtctgcatcggtttcacctgctaacaatggcgaccaaggttctgacggaagctctggtgatccaagatgctgcccagcgtgtctaggcaggaattcgattgccaaggcggcatctgcagttggtcctgctgttgtaaacatttcttctatgcatgatatgcatggatgggtaaacgagcagagcattggatctggaactataatagatccagatgggactatattgacatgtgcgcatgttgttgcagattttcaaagcacaaaagcaattgtgaggagaaaggttagtgtgactttacaagatggtcgtgaatttgaaggtgttgtccttaatgctgaccgcctgtctgacattgccgttgtgaagattaagtcgatgacccctttacctgctgccaggcttggatcatcatctcaacttcagccaggtgactgggttgttgctctgggctgtccactttctcttcagaacacagttacagctggtattgtcagctgtgttgaccggaaaagcagtgatctgggtcttggaggattacgaagggagtatcttcaaacagattgtgctattaatcagggaaattctggaggacctcttgttaaccttgatggtgagattattggagttaatgtgatgaaagttcgtaatgctgatggtttgagctttgcagtaccaattgactctgtcattaaaatagtagataactttaacaaaaatgggagagttgtaaggccatggcttggtttaaagatgcttgacctgaaccccatgatcattgcacagctcaaagaaaagtcaagtacttttccagacgtaagaaaaggggtgcttgttcctatggttacaccagcatctccagctgaacaagcagggtttcgtcctggggatgtggttgtcgaatttggtggcaaaccagttgagagcatcaaagagataattgatatcatgggggacaaggtcgggataccatttaaagttcttgttaaaagagcgaacaatgtgacagtgacattaactgtgataccggaggaggcagatgccagcagatagacctaaactatctgctgggaagctgatctaaagccaaaggggaggattttccatggaaactccaatttttctcaagatataatacaagatgccgtggacacctgtagacaaaattttatgttgagttctgtatgtggccaaaggatggttgacaggaccacccgaaaaaggggacgaagataaataggaaatatgtattattagctccatgctcagttaaggtacatgttggttttggttatctgcggcataatcaataacggtaggactgcattctacttcttcaaattggatgatgctgtcggttgaagaataccagctccttggttttctcgcaagaacgttttactatgttttgccattctatgcagtactgtgcttagttagtcgttgacacctggaagccagttgatttcatgtatagtaccaatcatatcttccttacccgtgcaaactccagtccagacggcatcgtaaagtgatcgatcgagcagcaaaccagtagataagatggcaactcgatttgcaagatgtaattttcaagtccactgtgtatgatgtcaaggttttgtggaatctatgaggtcatgaatcttgcactcgacactagcaaagacttcaacggcggaatgatcggcgtgtatgtctgtgctgtctgttcgggagcaatgctgtacggaagtaggtctgctaggattttcaggtcgatggatcattggagctgcgtgtgtgtgtgtgtgtgtagggcacactagtaagacggacagatccgctgtcttgtgcagcacccgaaaaccctaggtcaatttcccattggttgttggatgacaacatcatgg

SEQ ID NO: 38840 - DNA, 2166 bp, Zea Mays
ttccttcctcctacctcagctcagacgcttcgcgacggccctgctgctccgctctgcgttccccgttcctttcctcgtgtgctctcctttcctcgtgtgcggcacgccaaggcagcaagcgatccttccagaatgctcctccgcgtcggccgccgggccgcgctcctcctagccgcaaccgccgccttctcgcgcctccgcgatcccgacacagccgtctacgtttcggcctccccgccgcagccgccacgccaggccttttcctcctccgccgccgccgagggcctccgctccggcacctgcctcttctccccgtatctgctcccatatccgttccaagggttcccagtactgaataccttcacgtctgcatcggtttcacctgctaacaatggcgaccaaggttctgacggaagctctggtgatccaagatgctgcccagcgtgtctaggcaggaattcgattgccaaggcggcatctgcagttggtcctgctgttgtaaacatttcttctatgcatgatatgcatggatgggtaaacgagcagagcattggatctggaactataatagatccagatgggactatattgacatgtgcgcatgttgttgcagattttcaaagcacaaaagcaattgtgaggagaaaggttagtgtgactttacaagatggtcgtgaatttgaaggcttggatcatcatctcaacttcagccaggtgactgggttgttgctctgggctgtccactttctcttcagaacacagttacagctgctgtgttgaccggaaaagcagtgatctgggtcttggaggattacgaagggagtatcttcaaacagattgtgctattaatcagggaaattctggaggacctcttgttaaccttgatggtgagattattggagttaatgtgatgaaagttcgtaatgctgatggtttgagctttgcagtaccaattgactctgtcattaaaatagtagataactttaacaaaaatgggagagttgtaaggccatggcttggtttaaagatgcttgacctgaaccccatgatcattgcacagctcaaagaaaagtcaagtacttttccagacgtaagaaaaggggtgcttgttcctatggttacaccagcatctccagctgaacaagcagggtttcgtcctggggatgtggttgtcgaatttggtggcaaaccagttgagagcatcaaagagataattgatatcatgggggacaaggtcgggataccatttaaagttcttgttaaaagagcgaacaatgtgacagtgacattaactgtgataccggaggaggcagatgccagcagatagacctaaactatctgctgggaagctgatctaaagccaaaggggaggattttccatggaaactccaatttttctcaagatataatacaagatgccgtggacacctgtagacaaaattttatgttgagttctgtatgtggccaaaggatggttgacaggaccacccgaaaaaggggacgaagataaataggaaatatgtattattagctccatgctcagttaaggtacatgttggttttggttatctgcggcataatcaataacggtaggactgcattctacttcttcaaattggatgatgctgtcggttgaagaataccagctccttggttttctcgcaagaacgttttactatgttttgccattctatgcagtactgtgcttagttagtcgttgacacctggaagccagttgatttcatgtatagtaccaatcatatcttccttacccgtgcaaactccagtccagacggcatcgtaaagtgatcgatcgagcagcaaaccagtagataagatggcaactcgatttgcaagatgtaattttcaagtccactgtgtatgatgtcaaggttttgtggaatctatgaggtcatgaatcttgcactcgacactagcaaagacttcaacggcggaatgatcggcgtgtatgtctgtgctgtctgttcgggagcaatgctgtacggaagtaggtctgctaggattttcaggtcgatggatcattggagctgcgtgtgtgtgtgtgtgtgtagggcacactagtaagacggacagatccgctgtcttgtgcagcacccgaaaaccctaggtcaatttcccattggttgttggatgacaacatcatgg

SEQ ID NO: 38841 - DNA, 2510 bp, Zea Mays
cttcctcctacctcagctcagacgcttcgcgacggccctgctgctccgctctgcgttccccgttcctttcctcgtgtgctctcctttcctcgtgtgcggcacgccaaggcagcaagcgatccttccagaatgctcctccgcgtcggccgccgggccgcgctcctcctagccgcaaccgccgccttctcgcgcctccgcgatcccgacacagccgtctacgtttcggcctccccgccgcagccgccacgccaggccttttcctcctccgccgccgccgagggcctccgctccggcacctgcctcttctccccgtatctgctcccatatccgttccaagggttcccagtactgaataccttcacgtctgcatcggtttcacctgctaacaatggcgaccaaggttctgacggaagctctggtgatccaagatgctgcccagcgtgtctaggcaggaattcgattgccaaggcggcatctgcagttggtcctgctgttgtaaacatttcttctatgcatgatatgcatggatgggtaaacgagcagagcattggatctggaactataatagatccagatgggactatattgacatgtgcgcatgttgttgcagattttcaaagcacaaaagcaattgtgaggagaaaggttagtgtgactttacaagatggtcgtgaatttgaaggtgttgtccttaatgctgaccgcctgtctgacattgccgttgtgaagattaagtcgatgacccctttacctgctgccaggcttggatcatcatctcaacttcagccaggtgactgggttgttgctctgggctgtccactttctcttcagaacacagttacagctgctgtgttgaccggaaaagcagtgatctgggtcttggaggattacgaagggagtatcttcaaacagattgtgctattaatcagggaaattctggaggacctcttgttaaccttgatggtgagattattggagttaatgtgatgaaagttcgtaatgctgatggtttgagctttgcagtaccaattgactctgtcattaaaatagtagataactttaacaaaaatgggagagttgtaaggccatggcttggtttaaagatgcttgacctgaaccccatgatcattgcacagctcaaagaaaagtcaagtacttttccagacgtaagaaaaggggtgcttgttcctatggttacaccagcatctccagctgaacaagcagggtttcgtcctggggatgtggttgtcgaatttggtggcaaaccagttgagagcatcaaagaggtaactaaagacaactactagtgatgtgtgctatatgacttattattactataccggcagaattccttatcttttccctgttataatatcatatttgaatatcgccatgaaaaagtagctggttagaaccaattgcagtagtggactcgtccttttttgttttttctaatttcaatattccttttctttcaaacccacaattcaagaggaagatcgtattctttttccttttagttgcacaaacacgataataaagtgttggctgcagataattgatatcatgggggacaaggtcgggataccatttaaagttcttgttaaaagagcgaacaatgtgacagtgacattaactgtgataccggaggaggcagatgccagcagatagacctaaactatctgctgggaagctgatctaaagccaaaggggaggattttccatggaaactccaatttttctcaagatataatacaagatgccgtggacacctgtagacaaaattttatgttgagttctgtatgtggccaaaggatggttgacaggaccacccgaaaaaggggacgaagataaataggaaatatgtattattagctccatgctcagttaaggtacatgttggttttggttatctgcggcataatcaataacggtaggactgcattctacttcttcaaattggatgatgctgtcggttgaagaataccagctccttggttttctcgcaagaacgttttactatgttttgccattctatgcagtactgtgcttagttagtcgttgacacctggaagccagttgatttcatgtatagtaccaatcatatcttccttacccgtgcaaactccagtccagacggcatcgtaaagtgatcgatcgagcagcaaaccagtagataagatggcaactcgatttgcaagatgtaattttcaagtccactgtgtatgatgtcaaggttttgtggaatctatgaggtcatgaatcttgcactcgacactagcaaagacttcaacggcggaatgatcggcgtgtatgtctgtgctgtctgttcgggagcaatgctgtacggaagtaggtctgctaggattttcaggtcgatggatcattggagctgcgtgtgtgtgtgtgtgtgtagggcacactagtaagacggacagatccgctgtcttgtgcagcacccgaaaaccctaggtcaatttcccattggttgttggatgacaacatcatgg

SEQ ID NO: 38842 - DNA, 2173 bp, Zea Mays
cttcctcctacctcagctcagacgcttcgcgacggccctgctgctccgctctgcgttccccgttcctttcctcgtgtgctctcctttcctcgtgtgcggcacgccaaggcagcaagcgatccttccagaatgctcctccgcgtcggccgccgggccgcgctcctcctagccgcaaccgccgccttctcgcgcctccgcgatcccgacacagccgtctacgtttcggcctccccgccgcagccgccacgccaggccttttcctcctccgccgccgccgagggcctccgctccggcacctgcctcttctccccgtatctgctcccatatccgttccaagggttcccagtactgaataccttcacgtctgcatcggtttcacctgctaacaatggcgaccaaggttctgacggaagctctggtgatccaagatgctgcccagcgtgtctaggcaggaattcgattgccaaggcggcatctgcagttggtcctgctgttgtaaacatttcttctatgcatgatatgcatggatgggtaaacgagcagagcattggatctggaactataatagatccagatgggactatattgacatgtgcgcatgttgttgcagattttcaaagcacaaaagcaattgtgaggagaaaggttagtgtgactttacaagatggtcgtgaatttgaaggcttggatcatcatctcaacttcagccaggtgactgggttgttgctctgggctgtccactttctcttcagaacacagttacagctggtattgtcagctgtgttgaccggaaaagcagtgatctgggtcttggaggattacgaagggagtatcttcaaacagattgtgctattaatcagggaaattctggaggacctcttgttaaccttgatggtgagattattggagttaatgtgatgaaagttcgtaatgctgatggtttgagctttgcagtaccaattgactctgtcattaaaatagtagataactttaacaaaaatgggagagttgtaaggccatggcttggtttaaagatgcttgacctgaaccccatgatcattgcacagctcaaagaaaagtcaagtacttttccagacgtaagaaaaggggtgcttgttcctatggttacaccagcatctccagctgaacaagcagggtttcgtcctggggatgtggttgtcgaatttggtggcaaaccagttgagagcatcaaagagataattgatatcatgggggacaaggtcgggataccatttaaagttcttgttaaaagagcgaacaatgtgacagtgacattaactgtgataccggaggaggcagatgccagcagatagacctaaactatctgctgggaagctgatctaaagccaaaggggaggattttccatggaaactccaatttttctcaagatataatacaagatgccgtggacacctgtagacaaaattttatgttgagttctgtatgtggccaaaggatggttgacaggaccacccgaaaaaggggacgaagataaataggaaatatgtattattagctccatgctcagttaaggtacatgttggttttggttatctgcggcataatcaataacggtaggactgcattctacttcttcaaattggatgatgctgtcggttgaagaataccagctccttggttttctcgcaagaacgttttactatgttttgccattctatgcagtactgtgcttagttagtcgttgacacctggaagccagttgatttcatgtatagtaccaatcatatcttccttacccgtgcaaactccagtccagacggcatcgtaaagtgatcgatcgagcagcaaaccagtagataagatggcaactcgatttgcaagatgtaattttcaagtccactgtgtatgatgtcaaggttttgtggaatctatgaggtcatgaatcttgcactcgacactagcaaagacttcaacggcggaatgatcggcgtgtatgtctgtgctgtctgttcgggagcaatgctgtacggaagtaggtctgctaggattttcaggtcgatggatcattggagctgcgtgtgtgtgtgtgtgtgtagggcacactagtaagacggacagatccgctgtcttgtgcagcacccgaaaaccctaggtcaatttcccattggttgttggatgacaacatcatgg

SEQ ID NO: 38843 - DNA, 2168 bp, Zea Mays
cttcctcctacctcagctcagacgcttcgcgacggccctgctgctccgctctgcgttccccgttcctttcctcgtgtgctctcctttcctcgtgtgcggcacgccaaggcagcaagcgatccttccagaatgctcctccgcgtcggccgccgggccgcgctcctcctagccgcaaccgccgccttctcgcgcctccgcgatcccgacacagccgtctacgtttcggcctccccgccgcagccgccacgccaggccttttcctcctccgccgccgccgagggcctccgctccggcacctgcctcttctccccgtatctgctcccatatccgttccaagggttcccagtactgaataccttcacgtctgcatcggtttcacctgctaacaatggcgaccaaggttctgacggaagctctggtgatccaagatgctgcccagcgtgtctaggcaggaattcgattgccaaggcggcatctgcagttggtcctgctgttgtaaacatttcttctatgcatgatatgcatggatgggtaaacgagcagagcattggatctggaactataatagatccagatgggactatattgacatgtgcgcatgttgttgcagattttcaaagcacaaaagcaattgtgaggagaaagattaagtcgatgacccctttacctgctgccaggcttggatcatcatctcaacttcagccaggtgactgggttgttgctctgggctgtccactttctcttcagaacacagttacagctggtattgtcagctgtgttgaccggaaaagcagtgatctgggtcttggaggattacgaagggagtatcttcaaacagattgtgctattaatcagggaaattctggaggacctcttgttaaccttgatggtgagattattggagttaatgtgatgaaagttcgtaatgctgatggtttgagctttgcagtaccaattgactctgtcattaaaatagtagataactttaacaaaaatgggagagttgtaaggccatggcttggtttaaagatgcttgacctgaaccccatgatcattgcacagctcaaagaaaagtcaagtacttttccagacgtaagaaaaggggtgcttgttcctatggttacaccagcatctccagctgaacaagcagggtttcgtcctggggatgtggttgtcgaatttggtggcaaaccagttgagagcatcaaagagataattgatatcatgggggacaaggtcgggataccatttaaagttcttgttaaaagagcgaacaatgtgacagtgacattaactgtgataccggaggaggcagatgccagcagatagacctaaactatctgctgggaagctgatctaaagccaaaggggaggattttccatggaaactccaatttttctcaagatataatacaagatgccgtggacacctgtagacaaaattttatgttgagttctgtatgtggccaaaggatggttgacaggaccacccgaaaaaggggacgaagataaataggaaatatgtattattagctccatgctcagttaaggtacatgttggttttggttatctgcggcataatcaataacggtaggactgcattctacttcttcaaattggatgatgctgtcggttgaagaataccagctccttggttttctcgcaagaacgttttactatgttttgccattctatgcagtactgtgcttagttagtcgttgacacctggaagccagttgatttcatgtatagtaccaatcatatcttccttacccgtgcaaactccagtccagacggcatcgtaaagtgatcgatcgagcagcaaaccagtagataagatggcaactcgatttgcaagatgtaattttcaagtccactgtgtatgatgtcaaggttttgtggaatctatgaggtcatgaatcttgcactcgacactagcaaagacttcaacggcggaatgatcggcgtgtatgtctgtgctgtctgttcgggagcaatgctgtacggaagtaggtctgctaggattttcaggtcgatggatcattggagctgcgtgtgtgtgtgtgtgtgtagggcacactagtaagacggacagatccgctgtcttgtgcagcacccgaaaaccctaggtcaatttcccattggttgttggatgacaacatcatgg

SEQ ID NO: 38844 - DNA, 2407 bp, Zea Mays
ctcctacctcagctcagacgcttcgcgacggccctgctgctccgctctgcgttccccgttcctttcctcgtgtgctctcctttcctcgtgtgcggcacgccaaggcagcaagcgatccttccagaatgctcctccgcgtcggccgccgggccgcgctcctcctagccgcaaccgccgccttctcgcgcctccgcgatcccgacacagccgtctacgtttcggcctccccgccgcagccgccacgccaggccttttcctcctccgccgccgccgagggcctccgctccggcacctgcctcttctccccgtatctgctcccatatccgttccaagggttcccagtactgaataccttcacgtctgcatcggtttcacctgctaacaatggcgaccaaggttctgacggaagctctggtgatccaagatgctgcccagcgtgtctaggcaggaattcgattgccaaggcggcatctgcagttggtcctgctgttgtaaacatttcttctatgcatgatatgcatggatgggtaaacgagcagagcattggatctggaactataatagatccagatgggactatattgacatgtgcgcatgttgttgcagattttcaaagcacaaaagcaattgtgaggagaaaggttagtgtgactttacaagatggtcgtgaatttgaaggtgttgtccttaatgctgaccgcctgtctgacattgccgttgtgaagattaagtcgatgacccctttacctgctgccaggcttggatcatcatctcaacttcagccaggtgactgggttgttgctctgggctgtccactttctcttcagaacacagttacagctggtattgtcagctgtgttgaccggaaaagcagtgatctgggtcttggaggattacgaagggagtatcttcaaacagattgtgctattaatcagggaaattctggaggacctcttgttaaccttgatggagagttgtaaggccatggcttggtttaaagatgcttgacctgaaccccatgatcattgcacagctcaaagaaaagtcaagtacttttccagacgtaagaaaaggggtgcttgttcctatggttacaccagcatctccagctgaacaagcagggtttcgtcctggggatgtggttgtcgaatttggtggcaaaccagttgagagcatcaaagaggtaactaaagacaactactagtgatgtgtgctatatgacttattattactataccggcagaattccttatcttttccctgttataatatcatatttgaatatcgccatgaaaaagtagctggttagaaccaattgcagtagtggactcgtccttttttgttttttctaatttcaatattccttttctttcaaacccacaattcaagaggaagatcgtattctttttccttttagttgcacaaacacgataataaagtgttggctgcagataattgatatcatgggggacaaggtcgggataccatttaaagttcttgttaaaagagcgaacaatgtgacagtgacattaactgtgataccggaggaggcagatgccagcagatagacctaaactatctgctgggaagctgatctaaagccaaaggggaggattttccatggaaactccaatttttctcaagatataatacaagatgccgtggacacctgtagacaaaattttatgttgagttctgtatgtggccaaaggatggttgacaggaccacccgaaaaaggggacgaagataaataggaaatatgtattattagctccatgctcagttaaggtacatgttggttttggttatctgcggcataatcaataacggtaggactgcattctacttcttcaaattggatgatgctgtcggttgaagaataccagctccttggttttctcgcaagaacgttttactatgttttgccattctatgcagtactgtgcttagttagtcgttgacacctggaagccagttgatttcatgtatagtaccaatcatatcttccttacccgtgcaaactccagtccagacggcatcgtaaagtgatcgatcgagcagcaaaccagtagataagatggcaactcgatttgcaagatgtaattttcaagtccactgtgtatgatgtcaaggttttgtggaatctatgaggtcatgaatcttgcactcgacactagcaaagacttcaacggcggaatgatcggcgtgtatgtctgtgctgtctgttcgggagcaatgctgtacggaagtaggtctgctaggattttcaggtcgatggatcattggagctgcgtgtgtgtgtgtgtgtgtagggcacactagtaagacggacagatccgctgtcttgtgcagcacccgaaaaccctaggtcaatttcccattggttgttggatgacaacatcatgg

SEQ ID NO: 38845 - DNA, 2134 bp, Zea Mays
acctcagctcagacgcttcgcgacggccctgctgctccgctctgcgttccccgttcctttcctcgtgtgctctcctttcctcgtgtgcggcacgccaaggcagcaagcgatccttccagaatgctcctccgcgtcggccgccgggccgcgctcctcctagccgcaaccgccgccttctcgcgcctccgcgatcccgacacagccgtctacgtttcggcctccccgccgcagccgccacgccaggccttttcctcctccgccgccgccgagggcctccgctccggcacctgcctcttctccccgtatctgctcccatatccgttccaagggttcccagtactgaataccttcacgtctgcatcggtttcacctgctaacaatggcgaccaaggttctgacggaagctctggtgatccaagatgctgcccagcgtgtctaggcaggaattcgattgccaaggcggcatctgcagttggtcctgctgttgtaaacatttcttctatgcatgatatgcatggatgggtaaacgagcagagcattggatctggaactataatagatccagatgggactatattgacatgtgcgcatgttgttgcagattttcaaagcacaaaagcaattgtgaggagaaaggttagtgtgactttacaagatggtcgtgaatttgaaggtgttgtccttaatgctgaccgcctgtctgacattgccgttgtgaagattaagtcgatgacccctttacctgctgccaggcttggatcatcatctcaacttcagccaggtgactgggttgttgctctgggctgtccactttctcttcagaacacagttacagctggtattgtcagctgtgttgaccggaaaagcagtgatctgggtcttggaggattacgaagggagtatcttcaaacagattgtgctattaatcagggaaattctggaggacctcttgttaaccttgatggagagttgtaaggccatggcttggtttaaagatgcttgacctgaaccccatgatcattgcacagctcaaagaaaagtcaagtacttttccagacgtaagaaaaggggtgcttgttcctatggttacaccagcatctccagctgaacaagcagggtttcgtcctggggatgtggttgtcgaatttggtggcaaaccagttgagagcatcaaagagataattgatatcatgggggacaaggtcgggataccatttaaagttcttgttaaaagagcgaacaatgtgacagtgacattaactgtgataccggaggaggcagatgccagcagatagacctaaactatctgctgggaagctgatctaaagccaaaggggaggattttccatggaaactccaatttttctcaagatataatacaagatgccgtggacacctgtagacaaaattttatgttgagttctgtatgtggccaaaggatggttgacaggaccacccgaaaaaggggacgaagataaataggaaatatgtattattagctccatgctcagttaaggtacatgttggttttggttatctgcggcataatcaataacggtaggactgcattctacttcttcaaattggatgatgctgtcggttgaagaataccagctccttggttttctcgcaagaacgttttactatgttttgccattctatgcagtactgtgcttagttagtcgttgacacctggaagccagttgatttcatgtatagtaccaatcatatcttccttacccgtgcaaactccagtccagacggcatcgtaaagtgatcgatcgagcagcaaaccagtagataagatggcaactcgatttgcaagatgtaattttcaagtccactgtgtatgatgtcaaggttttgtggaatctatgaggtcatgaatcttgcactcgacactagcaaagacttcaacggcggaatgatcggcgtgtatgtctgtgctgtctgttcgggagcaatgctgtacggaagtaggtctgctaggattttcaggtcgatggatcattggagctgcgtgtgtgtgtgtgtgtgtagggcacactagtaagacggacagatccgctgtcttgtgcagcacccgaaaaccctaggtcaatttcccattggttgttggatgacaacatcatgg

SEQ ID NO: 38846 - DNA, 1850 bp, Zea Mays
ctttttgctgcgtggcggagtcgggagtggttgcctgtccaactgtccaagggttcccagtactgaataccttcacgtctgcatcggtttcacctgctaacaatggcgaccaaggttctgacggaagctctggtgatccaagatgctgcccagcgtgtctaggcaggaattcgattgccaaggcggcatctgcagttggtcctgctgttgtaaacatttcttctatgcatgatatgcatggatgggtaaacgagcagagcattggatctggaactataatagatccagatgggactatattgacatgtgcgcatgttgttgcagattttcaaagcacaaaagcaattgtgaggagaaaggcttggatcatcatctcaacttcagccaggtgactgggttgttgctctgggctgtccactttctcttcagaacacagttacagctggtattgtcagctgtgttgaccggaaaagcagtgatctgggtcttggaggattacgaagggagtatcttcaaacagattgtgctattaatcagggaaattctggaggacctcttgttaaccttgatggtgagattattggagttaatgtgatgaaagttcgtaatgctgatggtttgagctttgcagtaccaattgactctgtcattaaaatagtagataactttaacaaaaatgggagagttgtaaggccatggcttggtttaaagatgcttgacctgaaccccatgatcattgcacagctcaaagaaaagtcaagtacttttccagacgtaagaaaaggggtgcttgttcctatggttacaccagcatctccagctgaacaagcagggtttcgtcctggggatgtggttgtcgaatttggtggcaaaccagttgagagcatcaaagagataattgatatcatgggggacaaggtcgggataccatttaaagttcttgttaaaagagcgaacaatgtgacagtgacattaactgtgataccggaggaggcagatgccagcagatagacctaaactatctgctgggaagctgatctaaagccaaaggggaggattttccatggaaactccaatttttctcaagatataatacaagatgccgtggacacctgtagacaaaattttatgttgagttctgtatgtggccaaaggatggttgacaggaccacccgaaaaaggggacgaagataaataggaaatatgtattattagctccatgctcagttaaggtacatgttggttttggttatctgcggcataatcaataacggtaggactgcattctacttcttcaaattggatgatgctgtcggttgaagaataccagctccttggttttctcgcaagaacgttttactatgttttgccattctatgcagtactgtgcttagttagtcgttgacacctggaagccagttgatttcatgtatagtaccaatcatatcttccttacccgtgcaaactccagtccagacggcatcgtaaagtgatcgatcgagcagcaaaccagtagataagatggcaactcgatttgcaagatgtaattttcaagtccactgtgtatgatgtcaaggttttgtggaatctatgaggtcatgaatcttgcactcgacactagcaaagacttcaacggcggaatgatcggcgtgtatgtctgtgctgtctgttcgggagcaatgctgtacggaagtaggtctgctaggattttcaggtcgatggatcattggagctgcgtgtgtgtgtgtgtgtgtagggcacactagtaagacggacagatccgctgtcttgtgcagcacccgaaaaccctaggtcaatttcccattggttgttggatgacaacatcatgg

SEQ ID NO: 38847 - DNA, 2431 bp, Zea Mays
taaaaaaagctgaaagaaaagtcggagagagagagagagagagcgagcgagcgagcgagagtggtggtggtgtgtgcgcgagcgcaacagggagagggagagcgtatttcttcttcctcaccctcctcgaggaagagagagggcagctccggagccgcacgggcgcgagcgaggagccgctggcatcgtcggaggtggacatggatgagccagacgctcctgagagcggtgacatgattgttgatggcaacaatggcagctccagagagagccccttgcagcccatggattccaagaattccaagggctgtgcggtcaagaagccaacatcggtgagctcagacttcggtgaggagctggacttggaccttggtggggagaagagtgggacgcagcaggagaggaagctctcaaggcaggaccgggttgagctttgccggtcgttccagcttgcagtgagctcccatgattgggagagcgccgaggggctggtaggaatggctgacgcacaagggctcaacgatgtgctgtgtgtggcagtggatgcgatttggttcttgagtgatagggatgagctgcttgctattgtggggttgatcaaaagggttgtgtctgagggcgcaaaagattttacccgtgctgcgctccggacatcattcctcgcatcgtgtgtatcagcatgtagggggcggtcgactagccttgctgatgcagtgagcttcatgggccagaaattgcatgaacgacttcaagaatcccaaggtgatgaggtattgaaagcagaagcaagtgcaaaggtgcacaggtttacagaatgggctctaaagtgtatcgggctgcattcacgtgttcgagagaacaggggcaaaggaaaccacgacactgtaattgaggttcagcttcagttgtctgctttcaagatatttcttgatcttgctgataatgagcttaccgggaaggattttacggaggcttttgatgctgcatgcttccctcttacactcttttcaaccaccttcgaccaaggatgggcatcaggaatatcagcagctgcagtacaaggccttttagagttgttggtagagggtggcgcagacaatgtgaaccaatgctttcttgaagctgcacgctatggcagcactgagcttgtgcggatcttacttcaggttgctcaaagaaacagcttggacattgatgtggacctagcccttggctttgccgcacactatgggaagatcgaaaccatgggatgcttggttgaagaaggtaatgctattggctttcttggccctttgatgcgtgctgctgaacgtgggtgcctccaagttgtggaatggtttgtcaaccacgggtgtcgagaaatggagctttgcctagcccttactgctgccacctctaatagccagattgcagttgctgcttatcttcttcctcttgtcccgcaacatgttcttgcccccctcagcattgagattatcaaggctgctggtgagaggactacgggttccctgcagggtgtggattttcttctccgctcggatttcctcaatgacccagctgccacatatgccgtggcagacagtattgcaagatgcaccgatgaagctgtggacgcaaagcttaggtctttcatgaatgagcactggagcgaggcagctttttgtgcgggattcgaatctgcacagcagcactttgttaatttcatgaggataatggaaaggggtgaatcaccaatccgcttaggggatctcccacttgagctggtgattgccatggcctacctgccgctctataaggaatgcatgaattccaatgggcgacttttgcctcaaaggcttagaggtcagcttgtggaggctgcaagcaggctcgaggaccggcaagtggaaagggatagccaaagcagagaactcttggccatcttggagcaccacataccacgattcatgatccaaacttgaaggtaagcgcaggcatccactctgaaccactgctgtcaatgcaagcaaaaaacaacttacaagggcaatccacgccgtcttcagtgccgccaccatgttcctgcttggggggacatcaccaaatgatagcatcttgagttggctctcctgcaggcgatcttcggagagtatataattctggggaatggtgtgtgccttgtcgaggcatgtgtcggagtgttttactgggaccgtaatcttccatgaaaaaaatgatataagccttcggtatgtaatcctgagttttcggtgtaattcaaaacgctggtcttgtgacaacatgtcgctagttttggctagcgacttttttgatcatggcttcaaaaacaaaacgaagggagtatattcatactgtgtggagattgccttgatcgtgagatgtgacatggttctgatgaggtacaagtttgagcaactctgatagcttcgaa

SEQ ID NO: 38848 - DNA, 2688 bp, Zea Mays
aaaaagctgaaagaaaagtcggagagagagagagagagagcgagcgagcgagcgagagtggtggtggtgtgtgcgcgagcgcaacagggagagggagagcgtatttcttcttcctcaccctcctcgaggaagagagagggcagctccggagccgcacgggcgcgagcgagaagagaaaaaaaaagtccttgttgagttgttgtatcgggttctggtggtgactgttactggggtttccttgcccggttcttgatttgcgcaaggacagatttgccgtcctctcgggttccgccgtgcggtgctgaatcctccttccctgttcccttcccttaggtttggatcggggatagggatggaagtggacagaaagaagaatttgcagattggatccaaggggaaggaggttcagagcaagaatccgaggcgggaggagccgctggcatcgtcggaggtggacatggatgagccagacgctcctgagagcggtgacatgattgttgatggcaacaatggcagctccagagagagccccttgcagcccatggattccaagaattccaagggctgtgcggtcaagaagccaacatcggtgagctcagacttcggtgaggagctggacttggaccttggtggggagaagagtgggacgcagcaggagaggaagctctcaaggcaggaccgggttgagctttgccggtcgttccagcttgcagtgagctcccatgattgggagagcgccgaggggctggtaggaatggctgacgcacaagggctcaacgatgtgctgtgtgtggcagtggatgcgatttggttcttgagtgatagggatgagctgcttgctattgtggggttgatcaaaagggttgtgtctgagggcgcaaaagattttacccgtgctgcgctccggacatcattcctcgcatcgtgtgtatcagcatgtagggggcggtcgactagccttgctgatgcagtgagcttcatgggccagaaattgcatgaacgacttcaagaatcccaaggtgatgaggtattgaaagcagaagcaagtgcaaaggtgcacaggtttacagaatgggctctaaagtgtatcgggctgcattcacgtgttcgagagaacaggggcaaaggaaaccacgacactgtaattgaggttcagcttcagttgtctgctttcaagatatttcttgatcttgctgataatgagcttaccgggaaggattttacggaggcttttgatgctgcatgcttccctcttacactcttttcaaccaccttcgaccaaggatgggcatcaggaatatcagcagctgcagtacaaggccttttagagttgttggtagagggtggcgcagacaatgtgaaccaatgctttcttgaagctgcacgctatggcagcactgagcttgtgcggatcttacttcaggttgctcaaagaaacagcttggacattgatgtggacctagcccttggctttgccgcacactatgggaagatcgaaaccatgggatgcttggttgaagaaggtaatgctattggctttcttggccctttgatgcgtgctgctgaacgtgggtgcctccaagttgtggaatggtttgtcaaccacgggtgtcgagaaatggagctttgcctagcccttactgctgccacctctaatagccagattgcagttgctgcttatcttcttcctcttgtcccgcaacatgttcttgcccccctcagcattgagattatcaaggctgctggtgagaggactacgggttccctgcagggtgtggattttcttctccgctcggatttcctcaatgacccagctgccacatatgccgtggcagacagtattgcaagatgcaccgatgaagctgtggacgcaaagcttaggtctttcatgaatgagcactggagcgaggcagctttttgtgcgggattcgaatctgcacagcagcactttgttaatttcatgaggataatggaaaggggtgaatcaccaatccgcttaggggatctcccacttgagctggtgattgccatggcctacctgccgctctataaggaatgcatgaattccaatgggcgacttttgcctcaaaggcttagaggtcagcttgtggaggctgcaagcaggctcgaggaccggcaagtggaaagggatagccaaagcagagaactcttggccatcttggagcaccacataccacgattcatgatccaaacttgaaggtaagcgcaggcatccactctgaaccactgctgtcaatgcaagcaaaaaacaacttacaagggcaatccacgccgtcttcagtgccgccaccatgttcctgcttggggggacatcaccaaatgatagcatcttgagttggctctcctgcaggcgatcttcggagagtatataattctggggaatggtgtgtgccttgtcgaggcatgtgtcggagtgttttactgggaccgtaatcttccatgaaaaaaatgatataagccttcggtatgtaatcctgagttttcggtgtaattcaaaacgctggtcttgtgacaacatgtcgctagttttggctagcgacttttttgatcatggcttcaaaaacaaaacgaagggagtatattcatactgtgtggagattgccttgatcgtgagatgtgacatggttctgatgaggtacaagtttgagcaactctgatagcttcgaa

SEQ ID NO: 38849 - DNA, 2637 bp, Zea Mays
tgaaagaaaagtcggagagagagagagagagagcgagcgagcgagcgagagtggtggtggtgtgtgcgcgagcgcaacagggagagggagagcgtatttcttcttcctcaccctcctcgaggaagagagagggcagctccggagccgcacgggcgcgagcgaggtggtgactgttactggggtttccttgcccggttcttgatttgcgcaaggacagatttgccgtcctctcgggttccgccgtgcggtgctgaatcctccttccctgttcccttcccttaggtttggatcggggatagggatggaagtggacagaaagaagaatttgcagattggatccaaggggaaggaggttcagagcaagaatccgaggcgggaggagccgctggcatcgtcggaggtggacatggatgagccagacgctcctgagagcggtgacatgattgttgatggcaacaatggcagctccagagagagccccttgcagcccatggattccaagaattccaagggctgtgcggtcaagaagccaacatcggtgagctcagacttcggtgaggagctggacttggaccttggtggggagaagagtgggacgcagcaggagaggaagctctcaaggcaggaccgggttgagctttgccggtcgttccagcttgcagtgagctcccatgattgggagagcgccgaggggctggtaggaatggctgacgcacaagggctcaacgatgtgctgtgtgtggcagtggatgcgatttggttcttgagtgatagggatgagctgcttgctattgtggggttgatcaaaagggttgtgtctgagggcgcaaaagattttacccgtgctgcgctccggacatcattcctcgcatcgtgtgtatcagcatgtagggggcggtcgactagccttgctgatgcagtgagcttcatgggccagaaattgcatgaacgacttcaagaatcccaaggtgatgaggtattgaaagcagaagcaagtgcaaaggtgcacaggtttacagaatgggctctaaagtgtatcgggctgcattcacgtgttcgagagaacaggggcaaaggaaaccacgacactgtaattgaggttcagcttcagttgtctgctttcaagatatttcttgatcttgctgataatgagcttaccgggaaggattttacggaggcttttgatgctgcatgcttccctcttacactcttttcaaccaccttcgaccaaggatgggcatcaggaatatcagcagctgcagtacaaggccttttagagttgttggtagagggtggcgcagacaatgtgaaccaatgctttcttgaagctgcacgctatggcagcactgagcttgtgcggatcttacttcaggttgctcaaagaaacagcttggacattgatgtggacctagcccttggctttgccgcacactatgggaagatcgaaaccatgggatgcttggttgaagaaggtaatgctattggctttcttggccctttgatgcgtgctgctgaacgtgggtgcctccaagttgtggaatggtttgtcaaccacgggtgtcgagaaatggagctttgcctagcccttactgctgccacctctaatagccagattgcagttgctgcttatcttcttcctcttgtcccgcaacatgttcttgcccccctcagcattgagattatcaaggctgctggtgagaggactacgggttccctgcagggtgtggattttcttctccgctcggatttcctcaatgacccagctgccacatatgccgtggcagacagtattgcaagatgcaccgatgaagctgtggacgcaaagcttaggtctttcatgaatgagcactggagcgaggcagctttttgtgcgggattcgaatctgcacagcagcactttgttaatttcatgaggataatggaaaggggtgaatcaccaatccgcttaggggatctcccacttgagctggtgattgccatggcctacctgccgctctataaggaatgcatgaattccaatgggcgacttttgcctcaaaggcttagaggtcagcttgtggaggctgcaagcaggctcgaggaccggcaagtggaaagggatagccaaagcagagaactcttggccatcttggagcaccacataccacgattcatgatccaaacttgaaggtaagcgcaggcatccactctgaaccactgctgtcaatgcaagcaaaaaacaacttacaagggcaatccacgccgtcttcagtgccgccaccatgttcctgcttggggggacatcaccaaatgatagcatcttgagttggctctcctgcaggcgatcttcggagagtatataattctggggaatggtgtgtgccttgtcgaggcatgtgtcggagtgttttactgggaccgtaatcttccatgaaaaaaatgatataagccttcggtatgtaatcctgagttttcggtgtaattcaaaacgctggtcttgtgacaacatgtcgctagttttggctagcgacttttttgatcatggcttcaaaaacaaaacgaagggagtatattcatactgtgtggagattgccttgatcgtgagatgtgacatggttctgatgaggtacaagtttgagcaactctgatagcttcgaa

SEQ ID NO: 38850 - DNA, 2675 bp, Zea Mays
gtcggagagagagagagagagagcgagcgagcgagcgagagtggtggtggtgtgtgcgcgagcgcaacagggagagggagagcgtatttcttcttcctcaccctcctcgaggaagagagagggcagctccggagccgcacgggcgcgagcgaggcagaagagaaaaaaaaagtccttgttgagttgttgtatcgggttctggtggtgactgttactggggtttccttgcccggttcttgatttgcgcaaggacagatttgccgtcctctcgggttccgccgtgcggtgctgaatcctccttccctgttcccttcccttaggtttggatcggggatagggatggaagtggacagaaagaagaatttgcagattggatccaaggggaaggaggttcagagcaagaatccgaggcgggaggagccgctggcatcgtcggaggtggacatggatgagccagacgctcctgagagcggtgacatgattgttgatggcaacaatggcagctccagagagagccccttgcagcccatggattccaagaattccaagggctgtgcggtcaagaagccaacatcggtgagctcagacttcggtgaggagctggacttggaccttggtggggagaagagtgggacgcagcaggagaggaagctctcaaggcaggaccgggttgagctttgccggtcgttccagcttgcagtgagctcccatgattgggagagcgccgaggggctggtaggaatggctgacgcacaagggctcaacgatgtgctgtgtgtggcagtggatgcgatttggttcttgagtgatagggatgagctgcttgctattgtggggttgatcaaaagggttgtgtctgagggcgcaaaagattttacccgtgctgcgctccggacatcattcctcgcatcgtgtgtatcagcatgtagggggcggtcgactagccttgctgatgcagtgagcttcatgggccagaaattgcatgaacgacttcaagaatcccaaggtgatgaggtattgaaagcagaagcaagtgcaaaggtgcacaggtttacagaatgggctctaaagtgtatcgggctgcattcacgtgttcgagagaacaggggcaaaggaaaccacgacactgtaattgaggttcagcttcagttgtctgctttcaagatatttcttgatcttgctgataatgagcttaccgggaaggattttacggaggcttttgatgctgcatgcttccctcttacactcttttcaaccaccttcgaccaaggatgggcatcaggaatatcagcagctgcagtacaaggccttttagagttgttggtagagggtggcgcagacaatgtgaaccaatgctttcttgaagctgcacgctatggcagcactgagcttgtgcggatcttacttcaggttgctcaaagaaacagcttggacattgatgtggacctagcccttggctttgccgcacactatgggaagatcgaaaccatgggatgcttggttgaagaaggtaatgctattggctttcttggccctttgatgcgtgctgctgaacgtgggtgcctccaagttgtggaatggtttgtcaaccacgggtgtcgagaaatggagctttgcctagcccttactgctgccacctctaatagccagattgcagttgctgcttatcttcttcctcttgtcccgcaacatgttcttgcccccctcagcattgagattatcaaggctgctggtgagaggactacgggttccctgcagggtgtggattttcttctccgctcggatttcctcaatgacccagctgccacatatgccgtggcagacagtattgcaagatgcaccgatgaagctgtggacgcaaagcttaggtctttcatgaatgagcactggagcgaggcagctttttgtgcgggattcgaatctgcacagcagcactttgttaatttcatgaggataatggaaaggggtgaatcaccaatccgcttaggggatctcccacttgagctggtgattgccatggcctacctgccgctctataaggaatgcatgaattccaatgggcgacttttgcctcaaaggcttagaggtcagcttgtggaggctgcaagcaggctcgaggaccggcaagtggaaagggatagccaaagcagagaactcttggccatcttggagcaccacataccacgattcatgatccaaacttgaaggtaagcgcaggcatccactctgaaccactgctgtcaatgcaagcaaaaaacaacttacaagggcaatccacgccgtcttcagtgccgccaccatgttcctgcttggggggacatcaccaaatgatagcatcttgagttggctctcctgcaggcgatcttcggagagtatataattctggggaatggtgtgtgccttgtcgaggcatgtgtcggagtgttttactgggaccgtaatcttccatgaaaaaaatgatataagccttcggtatgtaatcctgagttttcggtgtaattcaaaacgctggtcttgtgacaacatgtcgctagttttggctagcgacttttttgatcatggcttcaaaaacaaaacgaagggagtatattcatactgtgtggagattgccttgatcgtgagatgtgacatggttctgatgaggtacaagtttgagcaactctgatagcttcgaa

SEQ ID NO: 38851 - DNA, 1724 bp, Zea Mays
aatggttacatgctcataacttacaaattgcatgaacgacttcaagaatcccaaggtgatgaggtattgaaagcagaagcaagtgcaaaggtgcacaggtttacagaatgggctctaaagtgtatcgggctgcattcacgtgttcgagagaacaggggcaaaggaaaccacgacactgtaattgaggttcagcttcagttgtctgctttcaagatatttcttgatcttgctgataatgagcttaccgggaaggattttacggaggcttttgatgctgcatgcttccctcttacactcttttcaaccaccttcgaccaaggatgggcatcaggaatatcagcagctgcagtacaaggccttttagagttgttggtagagggtggcgcagacaatgtgaaccaatgctttcttgaagctgcacgctatggcagcactgagcttgtgcggatcttacttcaggttgctcaaagaaacagcttggacattgatgtggacctagcccttggctttgccgcacactatgggaagatcgaaaccatgggatgcttggttgaagaaggtaatgctattggctttcttggccctttgatgcgtgctgctgaacgtgggtgcctccaagttgtggaatggtttgtcaaccacgggtgtcgagaaatggagctttgcctagcccttactgctgccacctctaatagccagattgcagttgctgcttatcttcttcctcttgtcccgcaacatgttcttgcccccctcagcattgagattatcaaggctgctggtgagaggactacgggttccctgcagggtgtggattttcttctccgctcggatttcctcaatgacccagctgccacatatgccgtggcagacagtattgcaagatgcaccgatgaagctgtggacgcaaagcttaggtctttcatgaatgagcactggagcgaggcagctttttgtgcgggattcgaatctgcacagcagcactttgttaatttcatgaggataatggaaaggggtgaatcaccaatccgcttaggggatctcccacttgagctggtgattgccatggcctacctgccgctctataaggaatgcatgaattccaatgggcgacttttgcctcaaaggcttagaggtcagcttgtggaggctgcaagcaggctcgaggaccggcaagtggaaagggatagccaaagcagagaactcttggccatcttggagcaccacataccacgattcatgatccaaacttgaaggtaagcgcaggcatccactctgaaccactgctgtcaatgcaagcaaaaaacaacttacaagggcaatccacgccgtcttcagtgccgccaccatgttcctgcttggggggacatcaccaaatgatagcatcttgagttggctctcctgcaggcgatcttcggagagtatataattctggggaatggtgtgtgccttgtcgaggcatgtgtcggagtgttttactgggaccgtaatcttccatgaaaaaaatgatataagccttcggtatgtaatcctgagttttcggtgtaattcaaaacgctggtcttgtgacaacatgtcgctagttttggctagcgacttttttgatcatggcttcaaaaacaaaacgaagggagtatattcatactgtgtggagattgccttgatcgtgagatgtgacatggttctgatgaggtacaagtttgagcaactctgatagcttcgaa

SEQ ID NO: 38852 - DNA, 2721 bp, Zea Mays
cccacagtcccacccgacatcctcgcgcagaacgcgtcgctaatctcgcggtcgcgcctcggccgatccgcgcctgcctgccgccgcccgcgattgtagctcaccccgacaccgcgccccctcctctcccctgacgtgatgcccgcctcccacccctttctccgcatcgcacggatctagcgcgggaattgctcggccacggctccgcacaccctcccttcccatgagacggagccgccgtatcctgctcgcgaggcaacggaagggtacgtgatcctctgtctacatggaaggtgaggcagatcggggggagagtggctcgtggcagtcgcctcgacggcgtccttcgcgccgtccggcgaggtgtcgtccaagcacggcgtcgtcggctacgggatcgtgggcgggcccaacggcaacgccgtcgcgcccgccgccaagtccaccgtcgtcgagaccaccgtcgagagggttatcttcgatttctggttcctggcgctcctccccaccgctcgggaaccactccaccgccgagaccgtcttaacgatcggctccgtcgtggcccgcccgcgaccccgtatctgctcgcgctcagctagggttcagatctgaaaatggccgatgacggtgcgaggaggggaatgcccgctgaaggctgaagctgcccccacgggctacagtaggtgccatcgctcaccacaccgaacaccccactgcccccagaccgtgctccaggaacctacggcgataggaggccactgaggatggcccggtgcggtactgctgccttccggaggacgccgagcgccggagaggggctcttctattggacttggagcaagcccacggcgacaacgccggaagcaaaatggcctcttctctagaaggacatgagttcgatccaccacagggaggcgcgcccgccaggctccatcttcggatctgatcgcccaccaagtgggttgagttcggcgagatctggtgtcaatagtttgcatatgcttctggtgtgccacgattgctacttctgcagattaatgaaaggtctcccttgctttattttcatcgaaaacaaagcgaaccacaatcttagtctccaaggtcaatttctgacgaaaaatgaagtcagcaaggaatacttcttaaaaactgtaaggaatattgttggtgataaattgcttaagcaagctgcttcacgatatcaaatgcaggcacaacgaagccctcagacaaacccaagcaactattctttatcaggtcaagtttctggtcagcagactgctcccagtggttctgtgacaggagatgaacagaagggatatccatgggcgcacaccatccctatgagacaagctattgccagcactcgaccaatttgcataaggctaatgaaatgggaaacatttggaggtccagctgcaccatttagaccacaaatggcagattccaatccaagagcacacttgattcggggagctgtgaccacagtatctgggagtgtgccaacacgatccatagtgtctggaaatgcgccagtcaatcaagccttgggatcttcaaaagtcagtgctggcatggaaagccagtcacaacaattgagtgcacctaaagcctttagctgcaacaagcttaagtcagactcaatctcatggcattcaagaagagcctaaaattcaggggaagaaacaactattattcgagagtttgcctgcaaccgatctaaaggttagagcgagcggcatgtgatgcgggaatatatgaggccttggagttgagggatggaggatctgattatcttggcaagggtgtttatcttagacctcaaagctcaatctagcatgctcttcgctctgttttactttccatgattcgttgagtatctatgcagtttctgcacgattactatgaattacgaactaaacttaaatcaaatacttcagtatggtctctagagaggaagctctgccaaccattactaataactgagaagatgttcgcgtacagggagacggtgttggaggaggcacatcggggcatggagctgcgtgagcactgccgccatatagttgacaacgatgaccgacactatagattccattctctgtgtgtacaccaaggtatcggtgtctcgtctcggaccacgccctttcccttcccttccttctccgcacacgcagaaccagctgattctctttcttttgctttcctcctctcggcctacgttgatctggcgatgcgcttttcatggttactgcgaccgtgatgggcatctaggtgctcgaaccattagttgggctaaggaacacggaacagcagcaacaatatcgtaaggagagtgcagacgttggacaaatggaagtagctcttccactactggagcaattgttggtggagtggctgctggcgcagccttgctatttgctgttcctgctatcagttttgcctattggcggcataggaaaccacaagagcattttttcaatgtatctggcttcaaagttagtctttgattattatctttctcgcaacataagggcaaacaacgtttatatgtagcaaacaagtacggtttgcaaatgttttaggaacatgtttttacaataaagatatacttatagtttcaccaatggatggccaaaaaatacaaccttttacatttgtcaaccttttagatttgttttaggaacattgtaatatagaacaacatcaagtagattttg

SEQ ID NO: 38853 - DNA, 2850 bp, Zea Mays
cccacagtcccacccgacatcctcgcgcagaacgcgtcgctaatctcgcggtcgcgcctcggccgatccgcgcctgcctgccgccgcccgcgattgtagctcaccccgacaccgcgccccctcctctcccctgacgtgatgcccgcctcccacccctttctccgcatcgcacggatctagcgcgggaattgctcggccacggctccgcacaccctcccttcccatgagacggagccgccgtatcctgctcgcgaggcaacggaagggtacgtgatcctctgtctacatggaaggtgaggcagatcggggggagagtggctcgtggcagtcgcctcgacggcgtccttcgcgccgtccggcgaggtgtcgtccaagcacggcgtcgtcggctacgggatcgtgggcgggcccaacggcaacgccgtcgcgcccgccgccaagtccaccgtcgtcgagaccaccgtcgagagggttatcttcgatttctggttcctggcgctcctccccaccgctcgggaaccactccaccgccgagaccgtcttaacgatcggctccgtcgtggcccgcccgcgaccccgtatctgctcgcgctcagctagggttcagatctgaaaatggccgatgacggtgcgaggaggggaatgcccgctgaaggctgaagctgcccccacgggctacagtaggtgccatcgctcaccacaccgaacaccccactgcccccagaccgtgctccaggaacctacggcgataggaggccactgaggatggcccggtgcggtactgctgccttccggaggacgccgagcgccggagaggggctcttctattggacttggagcaagcccacggcgacaacgccggaagcaaaatggcctcttctctagaaggacatgagttcgatccaccacagggaggcgcgcccgccaggctccatcttcggatctgatcgcccaccaagtgggttgagttcggcgagatctggtgtcaatagtttgcatatgcttctggtgtgccacgattgctacttctgcaggatgacgagagtttgcctgcaaccgatctaaaggttagagcgagcggcatgtgatgcggaaaaatgaagtcagcaaggaatacttcttaaaaactgtaaggaatattgttggtgataaattgcttaagcaagctgcttcacgatatcaaatgcaggcacaacgaagccctcagacaaacccaagcaactattctttatcaggtcaagtttctggtcagcagactgctcccagtggttctgtgacaggagatgaacagaagggatatccatgggcgcacaccatccctatgagacaagctattgccagcactcgaccaatttgcataaggctaatgaaatgggaaacatgtcagatgggaaaggggtccatatgttacaaactcgtccacccaataactccataccagtacaaacaatgcagcatcacgtgcagtgaccacaaacatcttcaccagtgtttggggcaaatagtattcatgcacgtccatttccgcggccagttggaggtccagctgcaccatttagaccacaaatggcagattccaatccaagagcacacttgattcggggagctgtgaccacagtatctgggagtgtgccaacacgatccatagtgtctggaaatgcgccagtcaatcaagccttgggatcttcaaaagtcagtgctggcatggaaagccagtcacaacaattgagtgcacctaaagcctttagctgcaacaagcttaagtcagactcaatctcatggcattcaagaagagcctaaaattcaggggaagaaacaactattattcgagagtttgcctgcaaccgatctaaaggttagagcgagcggcatgtgatgcgggaatatatgaggccttggagttgagggatggaggatctgattatcttggcaagggtgtttatcttagacctcaaagctcaatctagcatgctcttcgctctgttttactttccatgattcgttgagtatctatgcagtttctgcacgattactatgaattacgaactaaacttaaatcaaatacttcagtatggtctctagagaggaagctctgccaaccattactaataactgagaagatgttcgcgtacagggagacggtgttggaggaggcacatcggggcatggagctgcgtgagcactgccgccatatagttgacaacgatgaccgacactatagattccattctctgtgtgtacaccaaggtatcggtgtctcgtctcggaccacgccctttcccttcccttccttctccgcacacgcagaaccagctgattctctttcttttgctttcctcctctcggcctacgttgatctggcgatgcgcttttcatggttactgcgaccgtgatgggcatctaggtgctcgaaccattagttgggctaaggaacacggaacagcagcaacaatatcgtaaggagagtgcagacgttggacaaatggaagtagctcttccactactggagcaattgttggtggagtggctgctggcgcagccttgctatttgctgttcctgctatcagttttgcctattggcggcataggaaaccacaagagcattttttcaatgtatctggcttcaaagttagtctttgattattatctttctcgcaacataagggcaaacaacgtttatatgtagcaaacaagtacggtttgcaaatgttttaggaacatgtttttacaataaagatatacttatagtttcaccaatggatggccaaaaaatacaaccttttacatttgtcaaccttttagatttgttttaggaacattgtaatatagaacaacatcaagtagattttg

SEQ ID NO: 38854 - DNA, 2714 bp, Zea Mays
cccacagtcccacccgacatcctcgcgcagaacgcgtcgctaatctcgcggtcgcgcctcggccgatccgcgcctgcctgccgccgcccgcgattgtagctcaccccgacaccgcgccccctcctctcccctgacgtgatgcccgcctcccacccctttctccgcatcgcacggatctagcgcgggaattgctcggccacggctccgcacaccctcccttcccatgagacggagccgccgtatcctgctcgcgaggcaacggaagggtacgtgatcctctgtctacatggaaggtgaggcagatcggggggagagtggctcgtggcagtcgcctcgacggcgtccttcgcgccgtccggcgaggtgtcgtccaagcacggcgtcgtcggctacgggatcgtgggcgggcccaacggcaacgccgtcgcgcccgccgccaagtccaccgtcgtcgagaccaccgtcgagagggttatcttcgatttctggttcctggcgctcctccccaccgctcgggaaccactccaccgccgagaccgtcttaacgatcggctccgtcgtggcccgcccgcgaccccgtatctgctcgcgctcagctagggttcagatctgaaaatggccgatgacggtgcgaggaggggaatgcccgctgaaggctgaagctgcccccacgggctacagtaggtgccatcgctcaccacaccgaacaccccactgcccccagaccgtgctccaggaacctacggcgataggaggccactgaggatggcccggtgcggtactgctgccttccggaggacgccgagcgccggagaggggctcttctattggacttggagcaagcccacggcgacaacgccggaagcaaaatggcctcttctctagaaggacatgagttcgatccaccacagggaggcgcgcccgccaggctccatcttcggatctgatcgcccaccaagtgggttgagttcggatgacgagagtttgcctgcaaccgatctaaaggttagagcgagcggcatgtgatgcggaaaaatgaagtcagcaaggaatacttcttaaaaactgtaaggaatattgttggtgataaattgcttaagcaagctgcttcacgatatcaaatgcaggcacaacgaagccctcagacaaacccaagcaactattctttatcaggtcaagtttctggtcagcagactgctcccagtggttctgtgacaggagatgaacagaagggatatccatgggcgcacaccatccctatgagacaagctattgccagcactcgaccaatttgcataaggctaatgaaatgggaaacatgtcagatgggaaaggggtccatatgttacaaactcgtccacccaataactccataccagtacaaacaatgcagcatcacgtgcagtgaccacaaacatcttcaccagtgtttggggcaaatagtattcatgcacgtccatttccgcggccagttggaggtccagctgcaccatttagaccacaaatggcagattccaatccaagagcacacttgattcggggagctgtgaccacagtatctgggagtgtgccaacacgatccatagtgtctggaaatgcgccagtcaatcaagccttgggatcttcaaaagtcagtgctggcatggaaagccagtcacaacaattgagtgcacctaaagcctttagctgcaacaagcttaagtcagactcaatctcatggcattcaagaagagcctaaaattcaggaatatatgaggccttggagttgagggatggaggatctgattatcttggcaagggtgtttatcttagacctcaaagctcaatctagcatgctcttcgctctgttttactttccatgattcgttgagtatctatgcagtttctgcacgattactatgaattacgaactaaacttaaatcaaatacttcagtatggtctctagagaggaagctctgccaaccattactaataactgagaagatgttcgcgtacagggagacggtgttggaggaggcacatcggggcatggagctgcgtgagcactgccgccatatagttgacaacgatgaccgacactatagattccattctctgtgtgtacaccaaggtatcggtgtctcgtctcggaccacgccctttcccttcccttccttctccgcacacgcagaaccagctgattctctttcttttgctttcctcctctcggcctacgttgatctggcgatgcgcttttcatggttactgcgaccgtgatgggcatctaggtgctcgaaccattagttgggctaaggaacacggaacagcagcaacaatatcgtaaggagagtgcagacgttggacaaatggaagtagctcttccactactggagcaattgttggtggagtggctgctggcgcagccttgctatttgctgttcctgctatcagttttgcctattggcggcataggaaaccacaagagcattttttcaatgtatctggcttcaaagttagtctttgattattatctttctcgcaacataagggcaaacaacgtttatatgtagcaaacaagtacggtttgcaaatgttttaggaacatgtttttacaataaagatatacttatagtttcaccaatggatggccaaaaaatacaaccttttacatttgtcaaccttttagatttgttttaggaacattgtaatatagaacaacatcaagtagattttg

SEQ ID NO: 38855 - DNA, 3639 bp, Zea Mays
cccacagtcccacccgacatcctcgcgcagaacgcgtcgctaatctcgcggtcgcgcctcggccgatccgcgcctgcctgccgccgcccgcgattgtagctcaccccgacaccgcgccccctcctctcccctgacgtgatgcccgcctcccacccctttctccgcatcgcacggatctagcgcgggaattgctcggccacggctccgcacaccctcccttcccatgagacggagccgccgtatcctgctcgcgaggcaacggaagggtacgtgatcctctgtctacatggaaggtgaggcagatcggggggagagtggctcgtggcagtcgcctcgacggcgtccttcgcgccgtccggcgaggtgtcgtccaagcacggcgtcgtcggctacgggatcgtgggcgggcccaacggcaacgccgtcgcgcccgccgccaagtccaccgtcgtcgagaccaccgtcgagagggttatcttcgatttctggttcctggcgctcctccccaccgctcgggaaccactccaccgccgagaccgtcttaacgatcggctccgtcgtggcccgcccgcgaccccgtatctgctcgcgctcagctagggttcagatctgaaaatggccgatgacggtgcgaggaggggaatgcccgctgaaggctgaagctgcccccacgggctacagtaggtgccatcgctcaccacaccgaacaccccactgcccccagaccgtgctccaggaacctacggcgataggaggccactgaggatggcccggtgcggtactgctgccttccggaggacgccgagcgccggagaggggctcttctattggacttggagcaagcccacggcgacaacgccggaagcaaaatggcctcttctctagaaggacatgagttcgatccaccacagggaggcgcgcccgccaggctccatcttcggatctgatcgcccaccaagtgggttgagttcggatgacgagagtttgcctgcaaccgatctaaaggttagagcgagcggcatgtgatgcggaaaaatgaagtcagcaaggaatacttcttaaaaactgtaaggaatattgttggtgataaattgcttaagcaagctgcttcacgatatcaaatgcaggcacaacgaagccctcagacaaacccaagcaactattctttatcaggtcaagtttctggtcagcagactgctcccagtggttctgtgacaggagatgaacagaagggatatccatgggcgcacaccatccctatgagacaagctattgccagcactcgaccaatttgcataaggctaatgaaatgggaaacatgtcagatgggaaaggggtccatatgttacaaactcgtccacccaataactccataccagtacaaacaatgcagcatcacgtgcagtgaccacaaacatcttcaccagtgtttggggcaaatagtattcatgcacgtccatttccgcggccagttggaggtccagctgcaccatttagaccacaaatggcagattccaatccaagagcacacttgattcggggagctgtgaccacagtatctgggagtgtgccaacacgatccatagtgtctggaaatgcgccagtcaatcaagccttgggatcttcaaaagtcagtgctggcatggaaagccagtcacaacaattgagtgcacctaaagcctttagctgcaacaagcttaagtcagactcaatctcatggcattcaagaagagcctaaaattcaggtatgtattaatttgctattgtgttgctatgttttcttttacttttagttgcacataaaaatcatttcggacactactgcctgaagttttaatttgtttgataatttgcattatatttcttattaagttatatgaaaccctgaaatttgtttaatggccaatttgatgctgccctatttgaccaccctcaggggaagaaacaactattattcgagagtttgcctgcaaccgatctaaaggttagagcgagcggcatgtgatgcgggaatatatgaggccttggagttgagggatggaggatctgattatcttggcaagggtgtttatcttagacctcaaagctcaatctagcatgctcttcgctctgttttactttccatgattcgttgagtatctatgcagtttctgcacgattactatgaattacgaactaaacttaaatcaaatacttcagtatggtctctagagaggaagctctgccaaccattactaataactgagaaggtatggagacacctttgttttgctgtaattttaaacaaataagtatcctgatgatagtgatgttttggtagatcatctgataatctctattactctatatgaccatatgcacttgacatccagaaaattggtttgacattcaggcaaagtaggaatgactggggactggcttgaacatttaacttttgcagtgtatttgcttccattttttcttttgcaattaaacctggtcctgatgttcgcgtacagggagacggtgttggaggaggcacatcggggcatggagctgcgtgagcactgccgccatatagttgacaacgatgaccgacactatagattccattctctgtgtgtacaccaaggaagtagctcttccactactggagcaattgttggtggagtggctgctggcgcagccttgctatttgctgttcctgctatcagttttgcctattggcggcataggaaaccacaagagcattttttcaatgtatctggcttcaaaacgactgcctgggctacgcgcgaggacgatggccaggcttccgttgatggcgcgggcacaggcgacagcatggcgggcgtgagtgctgcggctaggcgggtgcacccgggcggggtgcgggagaagctggtcggagctcaggatacggagattctgctgttgcttgccaactggcgagaggctcagacaatccatcgggtgctggcgacgcagctcttcttcatgttcctgccgctcagtgataagagcagactgggctgcaagatcgccaggttcataagcaagtacgtcattgagtattttcccgtcactttgcacgtggaagactatggcgcctttgatcccaatagagcttatgtgttcggttatgagcctcattctgttttgcccatagctgttgggatccttggggaccttgttggattcatgccgctaccaaagctaaagattcttgcaagcagtgcggtgttctacaccccgttcctaaggcaaatatggacgtggttggggttggctcctgcgtcgagaaagagtttctactcctaccttggagctggttatagctgtattatagtgccaggaggttttgttaagatagctattgagatgggttgccctgtagtccccgtttttgctttcggacagttgattgaccggcctgagggtggatatttgactgctgatttaccaatgcctcggggagaaattgtcatcggaggtccaaatataattaaaggctatttcaagaatgaagctaaaacaaatgaagtctacaagcaaggaatcaaatacagcgatttctcagatttgtgccagaagcaagaggctgttaaagaagtgcttggatctttagcaaagattccgttcttcagcatcacatactaa

SEQ ID NO: 38856 - DNA, 3947 bp, Zea Mays
cccacagtcccacccgacatcctcgcgcagaacgcgtcgctaatctcgcggtcgcgcctcggccgatccgcgcctgcctgccgccgcccgcgattgtagctcaccccgacaccgcgccccctcctctcccctgacgtgatgcccgcctcccacccctttctccgcatcgcacggatctagcgcgggaattgctcggccacggctccgcacaccctcccttcccatgagacggagccgccgtatcctgctcgcgaggcaacggaagggtacgtgatcctctgtctacatggaaggtgaggcagatcggggggagagtggctcgtggcagtcgcctcgacggcgtccttcgcgccgtccggcgaggtgtcgtccaagcacggcgtcgtcggctacgggatcgtgggcgggcccaacggcaacgccgtcgcgcccgccgccaagtccaccgtcgtcgagaccaccgtcgagagggttatcttcgatttctggttcctggcgctcctccccaccgctcgggaaccactccaccgccgagaccgtcttaacgatcggctccgtcgtggcccgcccgcgaccccgtatctgctcgcgctcagctagggttcagatctgaaaatggccgatgacggtgcgaggaggggaatgcccgctgaaggctgaagctgcccccacgggctacagtaggtgccatcgctcaccacaccgaacaccccactgcccccagaccgtgctccaggaacctacggcgataggaggccactgaggatggcccggtgcggtactgctgccttccggaggacgccgagcgccggagaggggctcttctattggacttggagcaagcccacggcgacaacgccggaagcaaaatggcctcttctctagaaggacatgagttcgatccaccacagggaggcgcgcccgccaggctccatcttcggatctgatcgcccaccaagtgggttgagttcggcgagatctggtgtcaatagtttgcatatgcttctggtgtgccacgattgctacttctgcagattaatgaaaggtctcccttgctttattttcatcgaaaacaaagcgaaccacaatcttagtctccaaggtcaatttctgacgaaaaatgaagtcagcaaggaatacttcttaaaaactgtaaggaatattgttggtgataaattgcttaagcaagctgcttcacgatatcaaatgcaggcacaacgaagccctcagacaaacccaagcaactattctttatcaggtcaagtttctggtcagcagactgctcccagtggttctgtgacaggagatgaacagaagggatatccatgggcgcacaccatccctatgagacaagctattgccagcactcgaccaatttgcataaggctaatgaaatgggaaacatgtcagatgggaaaggggtccatatgttacaaactcgtccacccaataactccataccagtacaaacaatgcagcatcacgtgcagtgaccacaaacatcttcaccagtgtttggggcaaatagtattcatgcacgtccatttccgcggccagttggaggtccagctgcaccatttagaccacaaatggcagattccaatccaagagcacacttgattcggggagctgtgaccacagtatctgggagtgtgccaacacgatccatagtgtctggaaatgcgccagtcaatcaagccttgggatcttcaaaagtcagtgctggcatggaaagccagtcacaacaattgagtgcacctaaagcctttagctgcaacaagcttaagtcagactcaatctcatggcattcaagaagagcctaaaattcaggggaagaaacaactattattcgagagtttgcctgcaaccgatctaaaggttagagcgagcggcatgtgatgcgggtatgtacatcgttgttccaaaattcatgcgtttgatgccggattgcctgtagctagctgttcatagtagggattagcgctgaaaaaactgggggaaagcaaagtacactggtgacctcaagttcaatcgaatcaatatggcacatcagttagactgtttgcttatcttagacctcaaattccatacgttcgacatctatgaatagaaaaatttgacactatatctttgaacaattgatctctcaggaatatatgaggccttggagttgagggatggaggatctgattatcttggcaagggtgtttatcttagacctcaaagctcaatctagcatgctcttcgctctgttttactttccatgattcgttgagtatctatgcagtttctgcacgattactatgagtacgtgctttcatatattgtttactcaatgacttcaatagtttacaacgtatgattattgcttaggaccctgcactactaaatcaggggactggcttgagtcagaaaaacttaggaaccaagtttgctctctaagttactgacttcaatttctactgtttatagattacgaactaaacttaaatcaaatacttcagtatggtctctagagaggaagctctgccaaccattactaataactgagaagatgttcgcgtacagggagacggtgttggaggaggcacatcggggcatggagctgcgtgagcactgccgccatatagttgacaacgatgaccgacactatagattccattctctgtgtgtacaccaaggtatcggtgtctcgtctcggaccacgccctttcccttcccttccttctccgcacacgcagaaccagctgattctctttcttttgctttcctcctctcggcctacgttgatctggcgatgcgcttttcatggttactgcgaccgtgatgggcatctaggtgctcgaaccattagttgggctaaggaacacggaacagcagcaacaatatcgtaaggagagtgcagacgttggacaaatggaagtagctcttccactactggagcaattgttggtggagtggctgctggcgcagccttgctatttgctgttcctgctatcagttttgcctattggcggcataggaaaccacaagagcattttttcaatgtatctggcttcaaaacgactgcctgggctacgcgcgaggacgatggccaggcttccgttgatggcgcgggcacaggcgacagcatggcgggcgtgagtgctgcggctaggcgggtgcacccgggcggggtgcgggagaagctggtcggagctcaggatacggagattctgctgttgcttgccaactggcgagaggctcagacaatccatcgggtgctggcgacgcagctcttcttcatgttcctgccgctcagtgataagagcagactgggctgcaagatcgccaggttcataagcaagtacgtcattgagtattttcccgtcactttgcacgtggaagactatggcgcctttgatcccaatagagcttatgtgttcggttatgagcctcattctgttttgcccatagctgttgggatccttggggaccttgttggattcatgccgctaccaaagctaaagattcttgcaagcagtgcggtgttctacaccccgttcctaaggcaaatatggacgtggttggggttggctcctgcgtcgagaaagagtttctactcctaccttggagctggttatagctgtattatagtgccaggaggttttgttaagatagctattgagatgggttgccctgtagtccccgtttttgctttcggacagttgattgaccggcctgagggtggatatttgactgctgatttaccaatgcctcggggagaaattgtcatcggaggtccaaatataattaaaggctatttcaagaatgaagctaaaacaaatgaagtctacaagcaaggaatcaaatacagcgatttctcagatttgtgccagaagcaagaggctgttaaagaagtgcttggatctttagcaaagattccgttcttcagcatcacatactaa

SEQ ID NO: 38857 - DNA, 3826 bp, Zea Mays
cccacagtcccacccgacatcctcgcgcagaacgcgtcgctaatctcgcggtcgcgcctcggccgatccgcgcctgcctgccgccgcccgcgattgtagctcaccccgacaccgcgccccctcctctcccctgacgtgatgcccgcctcccacccctttctccgcatcgcacggatctagcgcgggaattgctcggccacggctccgcacaccctcccttcccatgagacggagccgccgtatcctgctcgcgaggcaacggaagggtacgtgatcctctgtctacatggaaggtgaggcagatcggggggagagtggctcgtggcagtcgcctcgacggcgtccttcgcgccgtccggcgaggtgtcgtccaagcacggcgtcgtcggctacgggatcgtgggcgggcccaacggcaacgccgtcgcgcccgccgccaagtccaccgtcgtcgagaccaccgtcgagagggttatcttcgatttctggttcctggcgctcctccccaccgctcgggaaccactccaccgccgagaccgtcttaacgatcggctccgtcgtggcccgcccgcgaccccgtatctgctcgcgctcagctagggttcagatctgaaaatggccgatgacggtgcgaggaggggaatgcccgctgaaggctgaagctgcccccacgggctacagtaggtgccatcgctcaccacaccgaacaccccactgcccccagaccgtgctccaggaacctacggcgataggaggccactgaggatggcccggtgcggtactgctgccttccggaggacgccgagcgccggagaggggctcttctattggacttggagcaagcccacggcgacaacgccggaagcaaaatggcctcttctctagaaggacatgagttcgatccaccacagggaggcgcgcccgccaggctccatcttcggatctgatcgcccaccaagtgggttgagttcgaaaaatgaagtcagcaaggaatacttcttaaaaactgtaaggaatattgttggtgataaattgcttaagcaagctgcttcacgatatcaaatgcaggcacaacgaagccctcagacaaacccaagcaactattctttatcaggtcaagtttctggtcagcagactgctcccagtggttctgtgacaggagatgaacagaagggatatccatgggcgcacaccatccctatgagacaagctattgccagcactcgaccaatttgcataaggctaatgaaatgggaaacatgtcagatgggaaaggggtccatatgttacaaactcgtccacccaataactccataccagtacaaacaatgcagcatcacgtgcagtgaccacaaacatcttcaccagtgtttggggcaaatagtattcatgcacgtccatttccgcggccagttggaggtccagctgcaccatttagaccacaaatggcagattccaatccaagagcacacttgattcggggagctgtgaccacagtatctgggagtgtgccaacacgatccatagtgtctggaaatgcgccagtcaatcaagccttgggatcttcaaaagtcagtgctggcatggaaagccagtcacaacaattgagtgcacctaaagcctttagctgcaacaagcttaagtcagactcaatctcatggcattcaagaagagcctaaaattcaggtatgtattaatttgctattgtgttgctatgttttcttttacttttagttgcacataaaaatcatttcggacactactgcctgaagttttaatttgtttgataatttgcattatatttcttattaagttatatgaaaccctgaaatttgtttaatggccaatttgatgctgccctatttgaccaccctcaggggaagaaacaactattattcgagagtttgcctgcaaccgatctaaaggttagagcgagcggcatgtgatgcgggtatgtacatcgttgttccaaaattcatgcgtttgatgccggattgcctgtagctagctgttcatagtagggattagcgctgaaaaaactgggggaaagcaaagtacactggtgacctcaagttcaatcgaatcaatatggcacatcagttagactgtttgcttatcttagacctcaaattccatacgttcgacatctatgaatagaaaaatttgacactatatctttgaacaattgatctctcaggaatatatgaggccttggagttgagggatggaggatctgattatcttggcaagggtgtttatcttagacctcaaagctcaatctagcatgctcttcgctctgttttactttccatgattcgttgagtatctatgcagtttctgcacgattactatgaattacgaactaaacttaaatcaaatacttcagtatggtctctagagaggaagctctgccaaccattactaataactgagaaggtatggagacacctttgttttgctgtaattttaaacaaataagtatcctgatgatagtgatgttttggtagatcatctgataatctctattactctatatgaccatatgcacttgacatccagaaaattggtttgacattcaggcaaagtaggaatgactggggactggcttgaacatttaacttttgcagtgtatttgcttccattttttcttttgcaattaaacctggtcctgatgttcgcgtacagggagacggtgttggaggaggcacatcggggcatggagctgcgtgagcactgccgccatatagttgacaacgatgaccgacactatagattccattctctgtgtgtacaccaaggaagtagctcttccactactggagcaattgttggtggagtggctgctggcgcagccttgctatttgctgttcctgctatcagttttgcctattggcggcataggaaaccacaagagcattttttcaatgtatctggcttcaaaacgactgcctgggctacgcgcgaggacgatggccaggcttccgttgatggcgcgggcacaggcgacagcatggcgggcgtgagtgctgcggctaggcgggtgcacccgggcggggtgcgggagaagctggtcggagctcaggatacggagattctgctgttgcttgccaactggcgagaggctcagacaatccatcgggtgctggcgacgcagctcttcttcatgttcctgccgctcagtgataagagcagactgggctgcaagatcgccaggttcataagcaagtacgtcattgagtattttcccgtcactttgcacgtggaagactatggcgcctttgatcccaatagagcttatgtgttcggttatgagcctcattctgttttgcccatagctgttgggatccttggggaccttgttggattcatgccgctaccaaagctaaagattcttgcaagcagtgcggtgttctacaccccgttcctaaggcaaatatggacgtggttggggttggctcctgcgtcgagaaagagtttctactcctaccttggagctggttatagctgtattatagtgccaggaggttttgttaagatagctattgagatgggttgccctgtagtccccgtttttgctttcggacagttgattgaccggcctgagggtggatatttgactgctgatttaccaatgcctcggggagaaattgtcatcggaggtccaaatataattaaaggctatttcaagaatgaagctaaaacaaatgaagtctacaagcaaggaatcaaatacagcgatttctcagatttgtgccagaagcaagaggctgttaaagaagtgcttggatctttagcaaagattccgttcttcagcatcacatactaa

SEQ ID NO: 38858 - DNA, 2307 bp, Zea Mays
gacaaacccaagcaactattctttatcaggtcaagtttctggtcagcagactgctcccagtggttctgtgacaggagatgaacagaagggatatccatgggcgcacaccatccctatgagacaagctattgccagcactcgaccaatttgcataaggctaatgaaatgggaaacatgtcagatgggaaaggggtccatatgttacaaactcgtccacccaataactccataccagtacaaacaatgcagcatcacgtgcagtgaccacaaacatcttcaccagtgtttggggcaaatagtattcatgcacgtccatttccgcggccagttggaggtccagctgcaccatttagaccacaaatggcagattccaatccaagagcacacttgattcggggagctgtgaccacagtatctgggagtgtgccaacacgatccatagtgtctggaaatgcgccagtcaatcaagccttgggatcttcaaaagtcagtgctggcatggaaagccagtcacaacaattgagtgcacctaaagcctttagctgcaacaagcttaagtcagactcaatctcatggcattcaagaagagcctaaaattcaggggaagaaacaactattattcgagagtttgcctgcaaccgatctaaaggttagagcgagcggcatgtgatgcgggaatatatgaggccttggagttgagggatggaggatctgattatcttggcaagggtgtttatcttagacctcaaagctcaatctagcatgctcttcgctctgttttactttccatgattcgttgagtatctatgcagtttctgcacgattactatgaattacgaactaaacttaaatcaaatacttcagtatggtctctagagaggaagctctgccaaccattactaataactgagaagatgttcgcgtacagggagacggtgttggaggaggcacatcggggcatggagctgcgtgagcactgccgccatatagttgacaacgatgaccgacactatagattccattctctgtgtgtacaccaaggtatcggtgtctcgtctcggaccacgccctttcccttcccttccttctccgcacacgcagaaccagctgattctctttcttttgctttcctcctctcggcctacgttgatctggcgatgcgcttttcatggttactgcgaccgtgatgggcatctaggtgctcgaaccattagttgggctaaggaacacggaacagcagcaacaatatcgtaaggagagtgcagacgttggacaaatggaagtagctcttccactactggagcaattgttggtggagtggctgctggcgcagccttgctatttgctgttcctgctatcagttttgcctattggcggcataggaaaccacaagagcattttttcaatgtatctggcttcaaaacgactgcctgggctacgcgcgaggacgatggccaggcttccgttgatggcgcgggcacaggcgacagcatggcgggcgtgagtgctgcggctaggcgggtgcacccgggcggggtgcgggagaagctggtcggagctcaggatacggagattctgctgttgcttgccaactggcgagaggctcagacaatccatcgggtgctggcgacgcagctcttcttcatgttcctgccgctcagtgataagagcagactgggctgcaagatcgccaggttcataagcaagtacgtcattgagtattttcccgtcactttgcacgtggaagactatggcgcctttgatcccaatagagcttatgtgttcggttatgagcctcattctgttttgcccatagctgttgggatccttggggaccttgttggattcatgccgctaccaaagctaaagattcttgcaagcagtgcggtgttctacaccccgttcctaaggcaaatatggacgtggttggggttggctcctgcgtcgagaaagagtttctactcctaccttggagctggttatagctgtattatagtgccaggaggttttgttaagatagctattgagatgggttgccctgtagtccccgtttttgctttcggacagttgattgaccggcctgagggtggatatttgactgctgatttaccaatgcctcggggagaaattgtcatcggaggtccaaatataattaaaggctatttcaagaatgaagctaaaacaaatgaagtctacaagcaaggaatcaaatacagcgatttctcagatttgtgccagaagcaagaggctgttaaagaagtgcttggatctttagcaaagattccgttcttcagcatcacatactaa

SEQ ID NO: 38859 - DNA, 313 bp, Zea Mays
ctgcccttggaggctgaggaggcgcagaacgatgccgaggaggcacagggcgacgctgaggagacgcaacaagacgtcgagggggcgacagtaggagattctactgcctctggttcgtcgagcgtctacttgcgaggtcccgcaagcctccctaagcgaccgatacctcttgagagacgtccggtgattcaacccgagggggaaaggaactggtcgactgtggtgagtggaggtgctcacacacgccgagtcaatggcatactcggtcttctgtgcaaggaacacttccctggcatggttgagtacgacggag

SEQ ID NO: 38860 - DNA, 3192 bp, Zea Mays
ctgctgttcccgtcgaccggattcggttcggaccgcagctccccacagcccacactcgtccgtccgcccgtcgaatggcggctcccaaaccctaagccacagatcccttcccctgcctcagcttcgaacgccctcgcctcgccgccggtctttgtgtactgccgctgtgtccgtcggcgcggatcaagggtccgctccgctgcaccccgcggggagaaaggggcgggcctcggcgtcctccgctcgtcgcccgagtgtctgagtactatcaggtgcaagtccagccgaactgattgcatgacatatgaaatagcgagcgtcgaatgaccttctctatggatatggatttgaacgcatcaccggtgcctgacgatgatgagcagcagccttacaatgaaccagtggaggctgagtatgctcaggaggaacatgttgaatctgctgtcgcaacattgcgccgggaacgtgaagaaagacgcaagagactaaagagagagcagcaggatgatgggtcaaggctacattcccagcagattagggttgattatgctcctcaacccaaaaggcatagtcgcatcaaagaggcacctcagggctggttggactgtcctgcatttggggagccaatagataaaatcataccatctaaagttcctctcgatgaaacattcaatgagtcagtgcctcctgggaagcgatactcctcaaagcaactagttaacaaacaaagaaaagctggtcgtgaaataggtctggtgattgatttgacaaataccaccaggtattattcaccagctgaatggacgaagcaaggtactaagtatgcgaagattgcatgcaaggggagagatgcggtacctgacaatgaatctgttaataagtttgtctatgaggcaatgatattccttgatcgacaaaaacattcaaagaatcctaaatatattctggttcactgtacccatggtcataatcgtaccggtttcatgattattcattaccttatgcgcacacacgtatcttgtgttgctgaggcgataaatatgtttgctcaaaggcggccacctggcatatacaagagggactatattgaagcactatattcattttaccatgaggtccctgagaatatgatgatagcatgccctccaacaccagaatggaagagaccagatgatctcgatttaaatggcgaagctaagcaggatgatgacgacgacaatggtgatccagaaccaccgcgtaatgaatcagaggataaaatcatcaccaacgacgatgtgttaggggacgaagtgccatatgaccagcaagaagctttgcgtgtgctatgttataagttgcttgaaatgccccttataaggggacattcacaatttcctggatcacatccagtttctcttaacagtgaaaatctgcaactacttagacagcgatactactatgctacatggaaagctgacggaacacgatatatgatgcttataatgagagatggttgtttcttgattgatcgaaatttttgctttagaagggttcagatgcgctttccccataagagccttgaaggtctgcatgatatgaccttgattgatggagagatgattatagacacggtaccagattcaggcttgaagagaaggtacttggcatatgatcttatggcacttggtgcagtgtccaaaactaagttgccgttttctgaaaggtggaaaatgctggaagatgaaataatacgaccacgttattatgagaaaaataaatttgagagtggttctaagagcaatccgttgtacaaatatgacatggaattattttcggtatcagattctaggattcctcctgaactataatgttcaattcatgtcctgcaaagttaattttctctttttcgtttattatatgactttaccaggttagaagaaaagatttttggctgctctcaacagtaaaaaaggttcttaaggtgttcattccatccctttgccatgatgctgatggccttatatttcagggctgggacgatccatatgtaactcgtactcatgaaggtctcctgaagtggaaataccctgagatgaattctgtggactttctgttcgagcttacgaatgataatcgtcaactggttttcctttatgagagaggaaaaaagaaactcatggatggtgcccggatagcatttactggtaacatgcatttcaatttccatgatgagttgatgaccgttaattgtgtagtcagcttctttgtctctagagtgctgatataatattctttaacacattttaaaaatattttggggtattatattttaatgacatgtgtttctattttcctgccctactattgtatttgttttatatttactgctgtttaaacttatacagacgatgtagatccatcctctatcgccgggaggattgttgaatgctcctggaataaggaagaacagtgttggtcctgtatgcgtattagatctgataaatctactccaaacgacatcaacacataccggaaggtgatgaggagtatcacagataacattaccgaggaaaagcttctcgaagagattgatgagataagtcttctcccgatgtatgctgataggatgcagcaggctcatacaaagatggcacaacaacagcggcggagattgccaccacagtgctagccagtgctggggcgctctcctaccgccctagccagctgctggcttccgtagctgtgtaattagtagaggtttcagtagccccatatgatgatggctggctgggtctggcctgccaactaattctttgcacctcatttgtgtcttctccctgccctcccacccacctgtataggcgtcgccgcagagtagtttccctgtaaattgtgtactctatgttctcccatattctcccctatggttttatttttcatgggtgtagaatagcgtttaacaagagggtggtgttctaggtacattagtgtacgcgttactatctctcggtgttgcggttgccttgtgctagaataaatatggttaccatctgttgctgatgggtcatgtggttcccccggcggatatcatgtggttgcgtggtatgggttattttcgtcttctgttttgttcgcacctgatccgatccgatcttttgttcaatgaagaagaaaaaaattattggtaaaacctacgtgtttatggtacga

SEQ ID NO: 38861 - DNA, 2690 bp, Zea Mays
ctgctgttcccgtcgaccggattcggttcggaccgcagctccccacagcccacactcgtccgtccgcccgtcgaatggcggctcccaaaccctaagccacagatcccttcccctgcctcagcttcgaacgccctcgcctcgccgccggtctttgtgtactgccgctgtgtccgtcggcgcggatcaagggtccgctccgctgcaccccgcggggagaaaggggcgggcctcggcgtcctccgctcgtcgcccgaggaacgtgaagaaagacgcaagagactaaagagagagcagcaggatgatgggtcaaggctacattcccagcagattagggttgattatgctcctcaacccaaaaggcatagtcgcatcaaagaggcacctcagggctggttggactgtcctgcatttggggagccaatagataaaatcataccatctaaagttcctctcgatgaaacattcaatgagtcagtgcctcctgggaagcgatactcctcaaagcaactagttaacaaacaaagaaaagctggtcgtgaaataggtctggtgattgatttgacaaataccaccaggtattattcaccagctgaatggacgaagcaaggtactaagtatgcgaagattgcatgcaaggggagagatgcggtacctgacaatgaatctgttaataagtttgtctatgaggcaatgatattccttgatcgacaaaaacattcaaagaatcctaaatatattctggttcactgtacccatggtcataatcgtaccggtttcatgattattcattaccttatgcgcacacacgtatcttgtgttgctgaggcgataaatatgtttgctcaaaggcggccacctggcatatacaagagggactatattgaagcactatattcattttaccatgaggtccctgagaatatgatgatagcatgccctccaacaccagaatggaagagaccagatgatctcgatttaaatggcgaagctaagcaggatgatgacgacgacaatggtgatccagaaccaccgcgtaatgaatcagaggataaaatcatcaccaacgacgatgtgttaggggacgaagtgccatatgaccagcaagaagctttgcgtgtgctatgttataagttgcttgaaatgccccttataaggggacattcacaatttcctggatcacatccagtttctcttaacagtgaaaatctgcaactacttagacagcgatactactatgctacatggaaagctgacggaacacgatatatgatgcttataatgagagatggttgtttcttgattgatcgaaatttttgctttagaagggttcagatgcgctttccccataagagccttgaaggtctgcatgatatgaccttgattgatggagagatgattatagacacggtaccagattcaggcttgaagagaaggtacttggcatatgatcttatggcacttggtgcagtgtccaaaactaagttgccgttttctgaaaggtggaaaatgctggaagatgaaataatacgaccacgttattatgagaaaaataaatttgagagtggttctaagagcaatccgttgtacaaatatgacatggaattattttcggttagaagaaaagatttttggctgctctcaacagtaaaaaaggttcttaaggtgttcattccatccctttgccatgatgctgatggccttatatttcagggctgggacgatccatatgtaactcgtactcatgaaggtctcctgaagtggaaataccctgagatgaattctgtggactttctgttcgagcttacgaatgataatcgtcaactggttttcctttatgagagaggaaaaaagaaactcatggatggtgcccggatagcatttactgacgatgtagatccatcctctatcgccgggaggattgttgaatgctcctggaataaggaagaacagtgttggtcctgtatgcgtattagatctgataaatctactccaaacgacatcaacacataccggaaggtgatgaggagtatcacagataacattaccgaggaaaagcttctcgaagagattgatgagataagtcttctcccgatgtatgctgataggatgcagcaggctcatacaaagatggcacaacaacagcggcggagattgccaccacagtgctagccagtgctggggcgctctcctaccgccctagccagctgctggcttccgtagctgtgtaattagtagaggtttcagtagccccatatgatgatggctggctgggtctggcctgccaactaattctttgcacctcatttgtgtcttctccctgccctcccacccacctgtataggcgtcgccgcagagtagtttccctgtaaattgtgtactctatgttctcccatattctcccctatggttttatttttcatgggtgtagaatagcgtttaacaagagggtggtgttctaggtacattagtgtacgcgttactatctctcggtgttgcggttgccttgtgctagaataaatatggttaccatctgttgctgatgggtcatgtggttcccccggcggatatcatgtggttgcgtggtatgggttattttcgtcttctgttttgttcgcacctgatccgatccgatcttttgttcaatgaagaagaaaaaaattattggtaaaacctacgtgtttatggtacga

SEQ ID NO: 38862 - DNA, 2036 bp, Zea Mays
tgttcccgtcgaccggattcggttcggaccgcagctccccacagcccacactcgtccgtccgcccgtcgaatggcggctcccaaaccctaagccacagatcccttcccctgcctcagcttcgaacgccctcgcctcgccgccggtctttgtgtactgccgctgtgtccgtcggcgcggatcaagggtccgctccgctgcaccccgcggggagaaaggggcgggcctcggcgtcctccgctcgtcgcccgagtgtctgagtactatcaggtgcaagtccagccgaactgattgcatgacatatgaaatagcgagcgtcgaatgaccttctctatggatatggatttgaacgcatcaccggtgcctgacgatgatgagcagcagccttacaatgaaccagtggaggctgagtatgctcaggaggaacatgttgaatctgctgtcgcaacattgcgccgggaacgtgaagaaagacgcaagagactaaagagagagcagcaggatgatgggtcaaggctacattcccagcagattagggttgattatgctcctcaacccaaaaggcatagtcgcatcaaagaggcacctcagggctggttggactgtcctgcatttggggagccaatagataaaatcataccatctaaagttcctctcgatgaaacattcaatgagtcagtgcctcctgggaagcgatactcctcaaagcaactagttaacaaacaaagaaaagctggtcgtgaaataggtctggtgattgatttgacaaataccaccaggtattattcaccagctgaatggacgaagcaaggtactaagtatgcgaagattgcatgcaaggggagagatgcggtacctgacaatgaatctgttaataagtttgtctatgaggcaatgatattccttgatcgacaaaaacattcaaagaatcctaaatatattctggttcactgtacccatggtcataatcgtaccggtttcatgattattcattaccttatgcgcacacacgtatcttgtgttgctgaggcgataaatatgtttgctcaaaggcggccacctggcatatacaagagggactatattgaagcactatattcattttaccatgaggtccctgagaatatgatgatagcatgccctccaacaccagaatggaagagaccagatgatctcgatttaaatggcgaagctaagcaggatgatgacgacgacaatggtgatccagaaccaccgcgtaatgaatcagaggataaaatcatcaccaacgacgatgtgttaggggacgaagtgccatatgaccagcaagaagctttgcgtgtgctatgttataagttgcttgaaatgccccttataaggggacattcacaatttcctggatcacatccagtttctcttaacagtgaaaatctgcaactacttagacagcgatactactatgctacatggaaagctgacggaacacgatatatgatgcttataatgagagatggttgtttcttgattgatcgaaatttttgctttagaagggttcagatgcgctttccccataagagccttgaaggtctgcatgatatgaccttgattgatggagagatgattatagacacggtaccagattcaggcttgaagagaaggtacttggcatatgatcttatggcacttggtgcagtgtccaaaactaagttgccgttttctgaaaggtggaaaatgctggaagatgaaataatacgaccacgttattatgagaaaaataaatttgagagtggttctaagagcaatccgttgtacaaatatgacatggaattattttcggtatcagattctaggattcctcctgaactataatgttcaattcatgtcctgcaaagttaattttctctttttcgtttattatatgactttaccaggttagaagaaaagatttttggctgctctcaacagtaaaaaaggttcttaaggtgttcattccatccctttgccatgatgctgatggccttatatttcagccggcaacttgagagtgcacatggcaaag

SEQ ID NO: 38863 - DNA, 2927 bp, Zea Mays
ttcccgtcgaccggattcggttcggaccgcagctccccacagcccacactcgtccgtccgcccgtcgaatggcggctcccaaaccctaagccacagatcccttcccctgcctcagcttcgaacgccctcgcctcgccgccggtctttgtgtactgccgctgtgtccgtcggcgcggatcaagggtccgctccgctgcaccccgcggggagaaaggggcgggcctcggcgtcctccgctcgtcgcccgagcgagcgtcgaatgaccttctctatggatatggatttgaacgcatcaccggtgcctgacgatgatgagcagcagccttacaatgaaccagtggaggctgagtatgctcaggaggaacatgttgaatctgctgtcgcaacattgcgccgggaacgtgaagaaagacgcaagagactaaagagagagcagcaggatgatgggtcaaggctacattcccagcagattagggttgattatgctcctcaacccaaaaggcatagtcgcatcaaagaggcacctcagggctggttggactgtcctgcatttggggagccaatagataaaatcataccatctaaagttcctctcgatgaaacattcaatgagtcagtgcctcctgggaagcgatactcctcaaagcaactagttaacaaacaaagaaaagctggtcgtgaaataggtctggtgattgatttgacaaataccaccaggtattattcaccagctgaatggacgaagcaaggtactaagtatgcgaagattgcatgcaaggggagagatgcggtacctgacaatgaatctgttaataagtttgtctatgaggcaatgatattccttgatcgacaaaaacattcaaagaatcctaaatatattctggttcactgtacccatggtcataatcgtaccggtttcatgattattcattaccttatgcgcacacacgtatcttgtgttgctgaggcgataaatatgtttgctcaaaggcggccacctggcatatacaagagggactatattgaagcactatattcattttaccatgaggtccctgagaatatgatgatagcatgccctccaacaccagaatggaagagaccagatgatctcgatttaaatggcgaagctaagcaggatgatgacgacgacaatggtgatccagaaccaccgcgtaatgaatcagaggataaaatcatcaccaacgacgatgtgttaggggacgaagtgccatatgaccagcaagaagctttgcgtgtgctatgttataagttgcttgaaatgccccttataaggggacattcacaatttcctggatcacatccagtttctcttaacagtgaaaatctgcaactacttagacagcgatactactatgctacatggaaagctgacggaacacgatatatgatgcttataatgagagatggttgtttcttgattgatcgaaatttttgctttagaagggttcagatgcgctttccccataagagccttgaaggtctgcatgatatgaccttgattgatggagagatgattatagacacggtaccagattcaggcttgaagagaaggtacttggcatatgatcttatggcacttggtgcagtgtccaaaactaagttgccgttttctgaaaggtggaaaatgctggaagatgaaataatacgaccacgttattatgagaaaaataaatttgagagtggttctaagagcaatccgttgtacaaatatgacatggaattattttcggtatcagattctaggattcctcctgaactataatgttcaattcatgtcctgcaaagttaattttctctttttcgtttattatatgactttaccaggttagaagaaaagatttttggctgctctcaacagtaaaaaaggttcttaaggtgttcattccatccctttgccatgatgctgatggccttatatttcagggctgggacgatccatatgtaactcgtactcatgaaggtctcctgaagtggaaataccctgagatgaattctgtggactttctgttcgagcttacgaatgataatcgtcaactggttttcctttatgagagaggaaaaaagaaactcatggatggtgcccggatagcatttactgacgatgtagatccatcctctatcgccgggaggattgttgaatgctcctggaataaggaagaacagtgttggtcctgtatgcgtattagatctgataaatctactccaaacgacatcaacacataccggaaggtgatgaggagtatcacagataacattaccgaggaaaagcttctcgaagagattgatgagataagtcttctcccgatgtatgctgataggatgcagcaggctcatacaaagatggcacaacaacagcggcggagattgccaccacagtgctagccagtgctggggcgctctcctaccgccctagccagctgctggcttccgtagctgtgtaattagtagaggtttcagtagccccatatgatgatggctggctgggtctggcctgccaactaattctttgcacctcatttgtgtcttctccctgccctcccacccacctgtataggcgtcgccgcagagtagtttccctgtaaattgtgtactctatgttctcccatattctcccctatggttttatttttcatgggtgtagaatagcgtttaacaagagggtggtgttctaggtacattagtgtacgcgttactatctctcggtgttgcggttgccttgtgctagaataaatatggttaccatctgttgctgatgggtcatgtggttcccccggcggatatcatgtggttgcgtggtatgggttattttcgtcttctgttttgttcgcacctgatccgatccgatcttttgttcaatgaagaagaaaaaaattattggtaaaacctacgtgtttatggtacga

SEQ ID NO: 38864 - DNA, 2035 bp, Zea Mays
ctattgtttatggtattgtcatcactcatcaggcaatgatattccttgatcgacaaaaacattcaaagaatcctaaatatattctggttcactgtacccatggtcataatcgtaccggtttcatgattattcattaccttatgcgcacacacgtatcttgtgttgctgaggcgataaatatgtttgctcaaaggcggccacctggcatatacaagagggactatattgaagcactatattcattttaccatgaggtccctgagaatatgatgatagcatgccctccaacaccagaatggaagagaccagatgatctcgatttaaatggcgaagctaagcaggatgatgacgacgacaatggtgatccagaaccaccgcgtaatgaatcagaggataaaatcatcaccaacgacgatgtgttaggggacgaagtgccatatgaccagcaagaagctttgcgtgtgctatgttataagttgcttgaaatgccccttataaggggacattcacaatttcctggatcacatccagtttctcttaacagtgaaaatctgcaactacttagacagcgatactactatgctacatggaaagctgacggaacacgatatatgatgcttataatgagagatggttgtttcttgattgatcgaaatttttgctttagaagggttcagatgcgctttccccataagagccttgaaggtctgcatgatatgaccttgattgatggagagatgattatagacacggtaccagattcaggcttgaagagaaggtacttggcatatgatcttatggcacttggtgcagtgtccaaaactaagttgccgttttctgaaaggtggaaaatgctggaagatgaaataatacgaccacgttattatgagaaaaataaatttgagagtggttctaagagcaatccgttgtacaaatatgacatggaattattttcggttagaagaaaagatttttggctgctctcaacagtaaaaaaggttcttaaggtgttcattccatccctttgccatgatgctgatggccttatatttcagggctgggacgatccatatgtaactcgtactcatgaaggtctcctgaagtggaaataccctgagatgaattctgtggactttctgttcgagcttacgaatgataatcgtcaactggttttcctttatgagagaggaaaaaagaaactcatggatggtgcccggatagcatttactgacgatgtagatccatcctctatcgccgggaggattgttgaatgctcctggaataaggaagaacagtgttggtcctgtatgcgtattagatctgataaatctactccaaacgacatcaacacataccggaaggtgatgaggagtatcacagataacattaccgaggaaaagcttctcgaagagattgatgagataagtcttctcccgatgtatgctgataggatgcagcaggctcatacaaagatggcacaacaacagcggcggagattgccaccacagtgctagccagtgctggggcgctctcctaccgccctagccagctgctggcttccgtagctgtgtaattagtagaggtttcagtagccccatatgatgatggctggctgggtctggcctgccaactaattctttgcacctcatttgtgtcttctccctgccctcccacccacctgtataggcgtcgccgcagagtagtttccctgtaaattgtgtactctatgttctcccatattctcccctatggttttatttttcatgggtgtagaatagcgtttaacaagagggtggtgttctaggtacattagtgtacgcgttactatctctcggtgttgcggttgccttgtgctagaataaatatggttaccatctgttgctgatgggtcatgtggttcccccggcggatatcatgtggttgcgtggtatgggttattttcgtcttctgttttgttcgcacctgatccgatccgatcttttgttcaatgaagaagaaaaaaattattggtaaaacctacgtgtttatggtacga

SEQ ID NO: 38865 - DNA, 865 bp, Zea Mays
cgccaccgtcgggtcccgctgtctccagccaccgccgctccacctccgccacctcatcaccgggtcccgtcgccatctggtcactgatcggcgtggcgaggaagcgcgggaggagtcggtacggcggacgtggagggcgcggtcgcctggtccgcaacaacctgcatcccgggaggccacgagagaagataaggtgagggagaagaagtgaaatccggtcgtcatgctgttagccacgccgtcgcatagggagtgatcgatcgcagtcggagtcgcaaggaaggggaaaggagcagcagagagaagataaacgcgatactgatagtgtattcggttattccataagccttactattcctagggatgcctatatcattttcgcgtaagatgctcaacccatcatctattacacagcccactcggatcatcaagcggacgatgacatgcctcactctgcgtcgtcagtcttcgttcttctgatggctcttgtcgtcgtccagcccttgctgactttgctcgatgctgcagtatcccctggtttctcctgtgtcatggagctaacaccattttcgtcccttaggtcctaacattcccaccttcttaagcgtcagcttgccccccaggccgatggagaattgttggtaccatcatgattatactccatggaatgtgcaagttcgtaatgctgaatagcagtccgctatgagcccacaggattatttcttgtgatactactaatttctatctctactatccattacgctaaggtagtgtttggttgaggagccaagtagaacggagtcgttccatccctgattctaggaacggagccgctctgttctgtgtttggtaatctggaacggag

SEQ ID NO: 38866 - DNA, 858 bp, Zea Mays
tcccgctgtctccagccaccgccgctccacctccgccacctcatcaccgggtcccgtcgccatctggtcactgatgtgcagcggcgtggcgaggaagcgcgggaggagtcggtacggcggacgtggagggcgcggtcgcctggtccgcaacaacctgcatcccgggaggccacgagagaagataaggtgagggagaagaagtgaaatccggtcgtcatgctgttagccacgccgtcgcatagggagtgatcgatcgcagtcggagtcgcaaggaaggggaaaggagcagcagagagaagataaacgcgatactgatagtgtattcggttattccataagccttactattcctagggatgcctatatcattttcgcgtaagatgctcaacccatcatctattacacagcccactcggatcatcaagcggacgatgacatgcctcactctgcgtcgtcagtcttcgttcttctgatggctcttgtcgtcgtccagcccttgctgactttgctcgatgctgcagtatcccctggtttctcctgtgtcatggagctaacaccattttcgtcccttaggtcctaacattcccaccttcttaagcgtcagcttgccccccaggccgatggagaattgttggtaccatcatgattatactccatggaatgtgcaagttcgtaatgctgaatagcagtccgctatgagcccacaggattatttcttgtgatactactaatttctatctctactatccattacgctaaggtagtgtttggttgaggagccaagtagaacggagtcgttccatccctgattctaggaacggagccgctctgttctgtgtttggtaatctggaacggag

SEQ ID NO: 38867 - DNA, 2933 bp, Zea Mays
cctagcacgcgtgacgtggccacgccgttactccgagtggccagcatttactcgcactcctctccgccgtggtggctactggctggtggccatggctacgtgagcaagtgagcaacgcgtgttccgccgcccctccgctccggagtgcagagaccacacaagacaagagggagagagccgagaaaggaaaacgaaaaaaaaaacggcctttccttccccccgcccaaaccaagaaagtgagagcgcgcagcgagcccctgccggcgactcggcagtccgcactgaggagtgaggacgattcgttcagcttgctcccaacaaattcgttggaggacaggggaggggcggggtcgtccgccgctggttctgtagtcagccaggtatcagcgtttgaggctaaaaaatggagcactgtacagcttttatatgtacttcagcacagtggcctcactcaataacgaccactcgacgagtggcataccatagatctgcaaattcaagtttctcagcaccccaaaggagaaggcggtcaacactctatgtcatgaatgccgcatcaaccagtgctccaatttcacctcaaaacataacccaacttccacggacgaacagcacagttatcaaaagtatatccagcgacaaacccagcagtgcaatggagcaacttgatattgaacgtggtgtctgtattccgttccgaaagtacactcctgaaatggtactgcaatctgcattcttttatgtttatagagtcaggaaaaaagtattggattcaagaggttccatactgtcccttgcgagccggggagtggagataatttggaaacttggattttactggtcatctcttgtgtatgactttttggttggacaggatgaagaaattgttccatatcgtgcccggcagctccgtaatcttttatgtgatctgggcccatctttcataaaagcaggacaggttctagccaacaggcctgacattattcgagaggattatatgaatgaactttgcatcttgcaagatgatgtccctccattccctaaccaggtggctttttccataatcgaggaggagcttggccagcctatagagagattgttcagcaaaatttcatcagagacaatagcagctgctagtttgggccaagtttaccgagccacacttagagaaactggcgaggatgtcgctattaaggttcagagaccagggattgaaccaataatataccgagatctattcttgttccgcactttggcttcatttttgaatgggattagtcttcagaaactagggtgcaatgcggagcttattgttgatgaatttggcgaaaaacttttggaagaacttgattacactcttgaagctacaaatattgaggacttcctagaaaattttaaggatgatccaactgtcaagatacctcaagtgtataagcagctttcaggttcccgtgttctggtgatggagtggatagatggaattagatgtacggacccacaggctataaaagaagctggaatcgatatggaaggttttctcacggttggagtgagtgctgctttgcgtcagttacttgaatttggtcttttccatggagatccacatcctggaaatatttttgcaatgcgtgatggtcgtattgcttatgtcgacttcggaaatgtggccgttcttagccagcaaaacaaacaaatcctaatagacgctgttgttcatgctgttaacgaagactatgctgaaatggcaaatgacttcacaaggttgggtttccttgctagtggaacagatgtagccccaattattccagctctggaatctatttggcaaaactcagcaggaaaaggcttggcggacttcaatttccggagtgtgactgggaagttcaatcagcttgtctacaactttccaatccgtattccagaaaggttttctttggttattcgttcattgttgacacaagaaggaatctgctttacactaaagcctgattttaagtttcttgaggttgcctatccatatgtagcaaagcgtctgttgacagatccaaaccctgctcttcgtgaacgcctgattcaggtgctattcaaggatggggcattccagtggaaacgactagaaaaccttatagttcttgccaaggagaatgtgtccaagatgagtagcaaccccgcactgaaaaagaatagtttgcaagctgtaagaaatcgacagttggagagcaaacttgatctcactgaaacaataaaagatggagcacggatgttccttatcgatgctggtatcaggagacaacttatactggctttcaccgaagactccagattgcacgtagaagagcttattgatgtatacagactggttgaagatcaaatagatatgccttcagttgccgtcgaggttcttcaagatttaccatctgttgcgcgtgatttcatgctttcctggagtgattccatcctgtcagatcgccagtactaacgatcttttacaactagaagagaaagcaagcagagtgaatagggccctgcatggttatggtatctcgatataatctatacaagaaaaatggctagacaagaattcctcctcgctgtatacagtttctttttcctttgatttttgtatagcaaaatatgcaatgcgcagttaaattttttcgttttgccttgatcttgtcgatttctcagcacaagccatttgtttagtatagcgaatgggatcttttatgtaaatgagctcgtgattggaatgtaatagaaatagatgtatacagctagcattcaaatcaaatatatgcgcaagcatcaaaggcgtctgaagtgtgtttatcaatggcacatgattgtaccgaggaaatagttacttcttcggaacaaaacatttgtttaccttttctccactattgcattttatcaatggcactgtttttttc

SEQ ID NO: 38868 - DNA, 2900 bp, Zea Mays
cctagcacgcgtgacgtggccacgccgttactccgagtggccagcatttactcgcactcctctccgccgtggtggctactggctggtggccatggctacgtgagcaagtgagcaacgcgtgttccgccgcccctccgctccggagtgcagagaccacacaagacaagagggagagagccgagaaaggaaaacgaaaaaaaaaacggcctttccttccccccgcccaaaccaagaaagtgagagcgcgcagcgagcccctgccggcgactcggcagtccgcactgaggagtgaggacgattcgttcagcttgctcccaacaaattcgttggaggacaggggaggggcggggtcgtccgccgctggttctgtagtcagccaggtatcagcgtttgaggctaaaaaatggagcactgtacagcttttatatgtacttcagcacagtggcctcactcaataacgaccactcgacgagtggcataccatagatctgcaaattcaagtttctcagcaccccaaaggagaaggcggtcaacactctatgtcatgaatgccgcatcaaccagtgctccaatttcacctcaaaacataacccaacttccacggacgaacagcacagttatcaaaagtatatccagcgacaaacccagcagtgcaatggagcaacttgatattgaacgtggtgtctgtattccgttccgaaagtacactcctgaaatggtcaggaaaaaagtattggattcaagaggttccatactgtcccttgcgagccggggagtggagataatttggaaacttggattttactggtcatctcttgtgtatgactttttggttggacaggatgaagaaattgttccatatcgtgcccggcagctccgtaatcttttatgtgatctgggcccatctttcataaaagcaggacaggttctagccaacaggcctgacattattcgagaggattatatgaatgaactttgcatcttgcaagatgatgtccctccattccctaaccaggtggctttttccataatcgaggaggagcttggccagcctatagagagattgttcagcaaaatttcatcagagacaatagcagctgctagtttgggccaagtttaccgagccacacttagagaaactggcgaggatgtcgctattaaggttcagagaccagggattgaaccaataatataccgagatctattcttgttccgcactttggcttcatttttgaatgggattagtcttcagaaactagggtgcaatgcggagcttattgttgatgaatttggcgaaaaacttttggaagaacttgattacactcttgaagctacaaatattgaggacttcctagaaaattttaaggatgatccaactgtcaagatacctcaagtgtataagcagctttcaggttcccgtgttctggtgatggagtggatagatggaattagatgtacggacccacaggctataaaagaagctggaatcgatatggaaggttttctcacggttggagtgagtgctgctttgcgtcagttacttgaatttggtcttttccatggagatccacatcctggaaatatttttgcaatgcgtgatggtcgtattgcttatgtcgacttcggaaatgtggccgttcttagccagcaaaacaaacaaatcctaatagacgctgttgttcatgctgttaacgaagactatgctgaaatggcaaatgacttcacaaggttgggtttccttgctagtggaacagatgtagccccaattattccagctctggaatctatttggcaaaactcagcaggaaaaggcttggcggacttcaatttccggagtgtgactgggaagttcaatcagcttgtctacaactttccaatccgtattccagaaaggttttctttggttattcgttcattgttgacacaagaaggaatctgctttacactaaagcctgattttaagtttcttgaggttgcctatccatatgtagcaaagcgtctgttgacagatccaaaccctgctcttcgtgaacgcctgattcaggtgctattcaaggatggggcattccagtggaaacgactagaaaaccttatagttcttgccaaggagaatgtgtccaagatgagtagcaaccccgcactgaaaaagaatagtttgcaagctgtaagaaatcgacagttggagagcaaacttgatctcactgaaacaataaaagatggagcacggatgttccttatcgatgctggtatcaggagacaacttatactggctttcaccgaagactccagattgcacgtagaagagcttattgatgtatacagactggttgaagatcaaatagatatgccttcagttgccgtcgaggttcttcaagatttaccatctgttgcgcgtgatttcatgctttcctggagtgattccatcctgtcagatcgccagtactaacgatcttttacaactagaagagaaagcaagcagagtgaatagggccctgcatggttatggtatctcgatataatctatacaagaaaaatggctagacaagaattcctcctcgctgtatacagtttctttttcctttgatttttgtatagcaaaatatgcaatgcgcagttaaattttttcgttttgccttgatcttgtcgatttctcagcacaagccatttgtttagtatagcgaatgggatcttttatgtaaatgagctcgtgattggaatgtaatagaaatagatgtatacagctagcattcaaatcaaatatatgcgcaagcatcaaaggcgtctgaagtgtgtttatcaatggcacatgattgtaccgaggaaatagttacttcttcggaacaaaacatttgtttaccttttctccactattgcattttatcaatggcactgtttttttc

SEQ ID NO: 38869 - DNA, 2605 bp, Zea Mays
ctacgtgagcaagtgagcaacgcgtgttccgccgcccctccgctccggagtgcagagaccacacaagacaagagggagagagccgagaaaggaaaacgaaaaaaaaaacggcctttccttccccccgcccaaaccaagaaagtgagagcgcgcagcgagcccctgccggcgactcggcagtccgcactgaggagtgaggacgattcgttcagcttgctcccaacaaattcgttggaggacaggggaggggcggggtcgtccgccgctggttctgtagtcagccaggtatcagcgtttgaggctaaaaaatggagcactgtacagcttttatatgtacttcagcacagtggcctcactcaataacgaccactcgacgagtggcataccatagatctgcaaattcaagtttctcagcaccccaaaggagaaggcggtcaacactctatgtcatgaatgccgcatcaaccagtgctccaatttcacctcaaaacataacccaacttccacggacgaacagcacagttatcaaaagtatatccagcgacaaacccagcagtgcaatggagcaacttgatattgaacgtggtgtctgtattccgttccgaaagtacactcctgaaatggtcaggaaaaaagtattggattcaagaggttccatactgtcccttgcgagccggggagtggagataatttggaaacttggattttactggtcatctcttgtgtatgactttttggttggacaggatgaagaaattgttccatatcgtgcccggcagctccgtaatcttttatgtgatctgggcccatctttcataaaagcaggacaggttctagccaacaggcctgacattattcgagaggattatatgaatgaactttgcatcttgcaagatgatgtccctccattccctaaccaggtggctttttccataatcgaggaggagcttggccagcctatagagagattgttcagcaaaatttcatcagagacaatagcagctgctagtttgggccaagtttaccgagccacacttagagaaactggcgaggatgtcgctattaaggttcagagaccagggattgaaccaataatataccgagatctattcttgttccgcactttggcttcatttttgaatgggattagtcttcagaaactagggtgcaatgcggagcttattgttgatgaatttggcgaaaaacttttggaagaacttgattacactcttgaagctacaaatattgaggacttcctagaaaattttaaggatgatccaactgtcaagatacctcaagtgtataagcagctttcaggttcccgtgttctggtgatggagtggatagatggaattagatgtacggacccacaggctataaaagaagctggaatcgatatggaaggttttctcacggttggagtgagtgctgctttgcgtcagttacttgaatttggtcttttccatggagatccacatcctggaaatatttttgcaatgcgtgatggtcgtattgcttatgtcgacttcggaaatgtggccgttcttagccagcaaaacaaacaaatcctaatagacgctgttgttcatgctgttaacgaagactatgctgaaatggcaaatgacttcacaaggttgggtttccttgctagtggaacagatgtagccccaattattccagctctggaatctatttggcaaaactcagcaggaaaaggcttggcggacttcaatttccggagtgtgactggtgctattcaaggatggggcattccagtggaaacgactagaaaaccttatagttcttgccaaggagaatgtgtccaagatgagtagcaaccccgcactgaaaaagaatagtttgcaagctgtaagaaatcgacagttggagagcaaacttgatctcactgaaacaataaaagatggagcacggatgttccttatcgatgctggtatcaggagacaacttatactggctttcaccgaagactccagattgcacgtagaagagcttattgatgtatacagactggttgaagatcaaatagatatgccttcagttgccgtcgaggttcttcaagatttaccatctgttgcgcgtgatttcatgctttcctggagtgattccatcctgtcagatcgccagtactaacgatcttttacaactagaagagaaagcaagcagagtgaatagggccctgcatggttatggtatctcgatataatctatacaagaaaaatggctagacaagaattcctcctcgctgtatacagtttctttttcctttgatttttgtatagcaaaatatgcaatgcgcagttaaattttttcgttttgccttgatcttgtcgatttctcagcacaagccatttgtttagtatagcgaatgggatcttttatgtaaatgagctcgtgattggaatgtaatagaaatagatgtatacagctagcattcaaatcaaatatatgcgcaagcatcaaaggcgtctgaagtgtgtttatcaatggcacatgattgtaccgaggaaatagttacttcttcggaacaaaacatttgtttaccttttctccactattgcattttatcaatggcactgtttttttc

SEQ ID NO: 38870 - DNA, 2729 bp, Zea Mays
agggagagagccgagaaaggaaaacgaaaaaaaaaacggcctttccttccccccgcccaaaccaagaaagtgagagcgcgcagcgagcccctgccggcgactcggcagtccgcactgaggagtgaggacgattcgttcagcttgctcccaacaaattcgttggaggacaggggaggggcggggtcgtccgccgctggttctgtagtcagccaggtatcagcgtttgaggctaaaaaatggagcactgtacagcttttatatgtacttcagcacagtggcctcactcaataacgaccactcgacgagtggcataccatagatctgcaaattcaagtttctcagcaccccaaaggagaaggcggtcaacactctatgtcatgaatgccgcatcaaccagtgctccaatttcacctcaaaacataacccaacttccacggacgaacagcacagttatcaaaagtatatccagcgacaaacccagcagtgcaatggagcaacttgatattgaacgtggtgtctgtattccgttccgaaagtacactcctgaaatggtcaggaaaaaagtattggattcaagaggttccatactgtcccttgcgagccggggagtggagataatttggaaacttggattttactggtcatctcttgtgtatgactttttggttggacaggatgaagaaattgttccatatcgtgcccggcagctccgtaatcttttatgtgatctgggcccatctttcataaaagcaggacaggttctagccaacaggcctgacattattcgagaggattatatgaatgaactttgcatcttgcaagatgatgtccctccattccctaaccaggtggctttttccataatcgaggaggagcttggccagcctatagagagattgttcagcaaaatttcatcagagacaatagcagctgctagtttgggccaagtttaccgagccacacttagagaaactggcgaggatgtcgctattaaggttcagagaccagggattgaaccaataatataccgagatctattcttgttccgcactttggcttcatttttgaatgggattagtcttcagaaactagggtgcaatgcggagcttattgttgatgaatttggcgaaaaacttttggaagaacttgattacactcttctacaaatattgaggacttcctagaaaattttaaggatgatccaactgtcaagatacctcaagtgtataagcagctttcaggttcccgtgttctggtgatggagtggatagatggaattagatgtacggacccacaggctataaaagaagctggaatcgatatggaaggttttctcacggttggagtgagtgctgctttgcgtcagttacttgaatttggtcttttccatggagatccacatcctggaaatatttttgcaatgcgtgatggtcgtattgcttatgtcgacttcggaaatgtggccgttcttagccagcaaaacaaacaaatcctaatagacgctgttgttcatgctgttaacgaagactatgctgaaatggcaaatgacttcacaaggttgggtttccttgctagtggaacagatgtagccccaattattccagctctggaatctatttggcaaaactcagcaggaaaaggcttggcggacttcaatttccggagtgtgactgggaagttcaatcagcttgtctacaactttccaatccgtattccagaaaggttttctttggttattcgttcattgttgacacaagaaggaatctgctttacactaaagcctgattttaagtttcttgaggttgcctatccatatgtagcaaagcgtctgttgacagatccaaaccctgctcttcgtgaacgcctgattcaggtgctattcaaggatggggcattccagtggaaacgactagaaaaccttatagttcttgccaaggagaatgtgtccaagatgagtagcaaccccgcactgaaaaagaatagtttgcaagctgtaagaaatcgacagttggagagcaaacttgatctcactgaaacaataaaagatggagcacggatgttccttatcgatgctggtatcaggagacaacttatactggctttcaccgaagactccagattgcacgtagaagagcttattgatgtatacagactggttgaagatcaaatagatatgccttcagttgccgtcgaggttcttcaagatttaccatctgttgcgcgtgatttcatgctttcctggagtgattccatcctgtcagatcgccagtactaacgatcttttacaactagaagagaaagcaagcagagtgaatagggccctgcatggttatggtatctcgatataatctatacaagaaaaatggctagacaagaattcctcctcgctgtatacagtttctttttcctttgatttttgtatagcaaaatatgcaatgcgcagttaaattttttcgttttgccttgatcttgtcgatttctcagcacaagccatttgtttagtatagcgaatgggatcttttatgtaaatgagctcgtgattggaatgtaatagaaatagatgtatacagctagcattcaaatcaaatatatgcgcaagcatcaaaggcgtctgaagtgtgtttatcaatggcacatgattgtaccgaggaaatagttacttcttcggaacaaaacatttgtttaccttttctccactattgcattttatcaatggcactgtttttttc

SEQ ID NO: 38871 - DNA, 2705 bp, Zea Mays
aaacgaaaaaaaaaacggcctttccttccccccgcccaaaccaagaaagtgagagcgcgcagcgagcccctgccggcgactcggcagtccgcactgaggagtgaggacgattcgttcagcttgctcccaacaaattcgttggaggacaggggaggggcggggtcgtccgccgctggttctgtagtcagccagcgtttgaggctaaaaaatggagcactgtacagcttttatatgtacttcagcacagtggcctcactcaataacgaccactcgacgagtggcataccatagatctgcaaattcaagtttctcagcaccccaaaggagaaggcggtcaacactctatgtcatgaatgccgcatcaaccagtgctccaatttcacctcaaaacataacccaacttccacggacgaacagcacagttatcaaaagtatatccagcgacaaacccagcagtgcaatggagcaacttgatattgaacgtggtgtctgtattccgttccgaaagtacactcctgaaatggtcaggaaaaaagtattggattcaagaggttccatactgtcccttgcgagccggggagtggagataatttggaaacttggattttactggtcatctcttgtgtatgactttttggttggacaggatgaagaaattgttccatatcgtgcccggcagctccgtaatcttttatgtgatctgggcccatctttcataaaagcaggacaggttctagccaacaggcctgacattattcgagaggattatatgaatgaactttgcatcttgcaagatgatgtccctccattccctaaccaggtggctttttccataatcgaggaggagcttggccagcctatagagagattgttcagcaaaatttcatcagagacaatagcagctgctagtttgggccaagtttaccgagccacacttagagaaactggcgaggatgtcgctattaaggttcagagaccagggattgaaccaataatataccgagatctattcttgttccgcactttggcttcatttttgaatgggattagtcttcagaaactagggtgcaatgcggagcttattgttgatgaatttggcgaaaaacttttggaagaacttgattacactcttgaagctacaaatattgaggacttcctagaaaattttaaggatgatccaactgtcaagatacctcaagtgtataagcagctttcaggttcccgtgttctggtgatggagtggatagatggaattagatgtacggacccacaggctataaaagaagctggaatcgatatggaaggttttctcacggttggagtgagtgctgctttgcgtcagttacttgaatttggtcttttccatggagatccacatcctggaaatatttttgcaatgcgtgatggtcgtattgcttatgtcgacttcggaaatgtggccgttcttagccagcaaaacaaacaaatcctaatagacgctgttgttcatgctgttaacgaagactatgctgaaatggcaaatgacttcacaaggttgggtttccttgctagtggaacagatgtagccccaattattccagctctggaatctatttggcaaaactcagcaggaaaaggcttggcggacttcaatttccggagtgtgactgggaagttcaatcagcttgtctacaactttccaatccgtattccagaaaggttttctttggttattcgttcattgttgacacaagaaggaatctgctttacactaaagcctgattttaagtttcttgaggttgcctatccatatgtagcaaagcgtctgttgacagatccaaaccctgctcttcgtgaacgcctgattcaggtgctattcaaggatggggcattccagtggaaacgactagaaaaccttatagttcttgccaaggagaatgtgtccaagatgagtagcaaccccgcactgaaaaagaatagtttgcaagctgtaagaaatcgacagttggagagcaaacttgatctcactgaaacaataaaagatggagcacggatgttccttatcgatgctggtatcaggagacaacttatactggctttcaccgaagactccagattgcacgtagaagagcttattgatgtatacagactggttgaagatcaaatagatatgccttcagttgccgtcgaggttcttcaagatttaccatctgttgcgcgtgatttcatgctttcctggagtgattccatcctgtcagatcgccagtactaacgatcttttacaactagaagagaaagcaagcagagtgaatagggccctgcatggttatggtatctcgatataatctatacaagaaaaatggctagacaagaattcctcctcgctgtatacagtttctttttcctttgatttttgtatagcaaaatatgcaatgcgcagttaaattttttcgttttgccttgatcttgtcgatttctcagcacaagccatttgtttagtatagcgaatgggatcttttatgtaaatgagctcgtgattggaatgtaatagaaatagatgtatacagctagcattcaaatcaaatatatgcgcaagcatcaaaggcgtctgaagtgtgtttatcaatggcacatgattgtaccgaggaaatagttacttcttcggaacaaaacatttgtttaccttttctccactattgcattttatcaatggcactgtttttttc

SEQ ID NO: 38872 - DNA, 1078 bp, Zea Mays
aagggacagggggaggggaaacggaagttcaatcagcttgtctacaactttccaatccgtattccagaaaggttttctttggttattcgttcattgttgacacaagaaggaatctgctttacactaaagcctgattttaagtttcttgaggttgcctatccatatgtagcaaagcgtctgttgacagatccaaaccctgctcttcgtgaacgcctgattcaggtgctattcaaggatggggcattccagtggaaacgactagaaaaccttatagttcttgccaaggagaatgtgtccaagatgagtagcaaccccgcactgaaaaagaatagtttgcaagctgtaagaaatcgacagttggagagcaaacttgatctcactgaaacaataaaagatggagcacggatgttccttatcgatgctggtatcaggagacaacttatactggctttcaccgaagactccagattgcacgtagaagagcttattgatgtatacagactggttgaagatcaaatagatatgccttcagttgccgtcgaggttcttcaagatttaccatctgttgcgcgtgatttcatgctttcctggagtgattccatcctgtcagatcgccagtactaacgatcttttacaactagaagagaaagcaagcagagtgaatagggccctgcatggttatggtatctcgatataatctatacaagaaaaatggctagacaagaattcctcctcgctgtatacagtttctttttcctttgatttttgtatagcaaaatatgcaatgcgcagttaaattttttcgttttgccttgatcttgtcgatttctcagcacaagccatttgtttagtatagcgaatgggatcttttatgtaaatgagctcgtgattggaatgtaatagaaatagatgtatacagctagcattcaaatcaaatatatgcgcaagcatcaaaggcgtctgaagtgtgtttatcaatggcacatgattgtaccgaggaaatagttacttcttcggaacaaaacatttgtttaccttttctccactattgcattttatcaatggcactgtttttttc

SEQ ID NO: 38873 - DNA, 1642 bp, Zea Mays
aaaaaggctggtgtgggaaggaagacgacagcaaacagcaaaaagcaaaacccgcttctccctcctgcactccactacttgccttcccgcccgtcctctactcccccaaatccgccgggccaaaccctagagaaggcgatcggcatttccccgacggcgagcgggcggaagcggacaattatgccccgctgccgccgcgacaaggggcaggcgctcatcgacctcgacagcgacgccgaagacgagtgccaaagcaagggttctcaaacaagtagaacaacaacattgaagacatctgggagattgaaaaatagcctcacgccatgcaactagcaggaggaacaagacaaatcaagacaagctaaatactgatatttttgaattatacatggaagatctttggaagcacattgatgaagataagaagagtgcttatgcatacttggattctttatggtttaacatgtattaccatgggagtaataaacctaatgtccttaaatggataaaagctaagagaatattttcaagacaatatgtttttgttcctattgtttgttttggacactggagcctccttgtcttatgccactttggtgatgcaaactgttcggatattaagaaaggaccacggatgatggtgctggactcactcaatacgacagatccgacaaggttgcgatcagcaatcagaaaattcattattgacatttacaagactgaggagcgggaagaaagcaagcagttcataaacaaaatctgcctcgagtttcccaaagtgccacagcaaaatggggatgaatgtggaatttatgttctttatttcatccgctgttttctactgaacaaaaaactgacagaagttcttgaaaacaaaaaattggaagaaaaatttacccagctgtttgatgatggctggtttaacccagaggaactagagaacttccgcaaggatatccattcattccaagcgaatcgaaataacaaagttgcagagtagggtatatagcaaaatggtgccaagtatataaattgatagcttcatccaccatgtagattgctgagtttcatcttcctttgtggctcattccgaggacatttgaaggctgttgaggatatgttgtatttccgttttatccatggaagagggagtacatagagcttcgctggcagacagcaaactagccatttatcgtatttaaaatatcgaacttggtagtgtatatatattatatctggaagtgctagattagcatcaccctcttggataatgttagcatttagcagggttacacacgatgtactagtgtatgtattctcattctagagatgctgtagagtctcctgcttatccgggtatagacgttacagtttcacatctgttgtgccgagatggtgatggtaatagtaagtaaaaaaaaaaaaaaactcgcagcagcttcctgtttcagatatcctgtagattctgctgttgctgttgtgacggggatagattagaatcagactttttccttgttcatgttttgcttacgtgagggcatctgctagattgttactgttatgtcagttttttaacctgatttgggtataaataagattctgtgttgaacatgccaaatgccctaagcctgttaaatttgct

SEQ ID NO: 38874 - DNA, 1703 bp, Zea Mays
aggaagacgacagcaaacagcaaaaagcaaaacccgcttctccctcctgcactccactacttgccttcccgcccgtcctctactcccccaaatccgccgggccaaaccctagagaaggcgatcggcatttccccgacggcgagcgggcggaagcggacaattatgccccgctgccgccgcgacaaggggcaggcgctcatcgacctcgacagcgacgccgaagacgagtgccaaagcaagggttctcaaacaagtagaacaacaacattgaagacatctgggagattgaaaaatgtattaacaacaacattgaagacatctgggaggagatccaaaaatgtattgccttcattttatgataacctcccccagggcagagcctcacgccatgcaactagcaggaggaacaagacaaatcaagacaagctaaatactgatatttttgaattatacatggaagatctttggaagcacattgatgaagataagaagagtgcttatgcatacttggattctttatggtttaacatgtattaccatgggagtaataaacctaatgtccttaaatggataaaagctaagagaatattttcaagacaatatgtttttgttcctattgtttgttttggacactggagcctccttgtcttatgccactttggtgatgcaaactgttcggatattaagaaaggaccacggatgatggtgctggactcactcaatacgacagatccgacaaggttgcgatcagcaatcagaaaattcattattgacatttacaagactgaggagcgggaagaaagcaagcagttcataaacaaaatctgcctcgagtttcccaaagtgccacagcaaaatggggatgaatgtggaatttatgttctttatttcatccgctgttttctactgaacaaaaaactgacagaagttcttgaaaacaaaaaattggaagaaaaatttacccagctgtttgatgatggctggtttaacccagaggaactagagaacttccgcaaggatatccattcattccaagcgaatcgaaataacaaagttgcagagtagggtatatagcaaaatggtgccaagtatataaattgcttcatccaccatgtagattgctgagtttcatcttcctttgtggctcattccgaggacatttgaaggctgttgaggatatgttgtatttccgttttatccatggaagagggagtacatagagcttcgctggcagacagcaaactagccatttatcgtatttaaaatatcgaacttggtagtgtatatatattatatctggaagtgctagattagcatcaccctcttggataatgttagcatttagcagggttacacacgatgtactagtgtatgtattctcattctagagatgctgtagagtctcctgcttatccgggtatagacgttacagtttcacatctgttgtgccgagatggtgatggtaatagtaagtaaaaaaaaaaaaaaactcgcagcagcttcctgtttcagatatcctgtagattctgctgttgctgttgtgacggggatagattagaatcagactttttccttgttcatgttttgcttacgtgagggcatctgctagattgttactgttatgtcagttttttaacctgatttgggtataaataagattctgtgttgaacatgccaaatgccctaagcctgttaaatttgct

SEQ ID NO: 38875 - DNA, 1539 bp, Zea Mays
aggaagacgacagcaaacagcaaaaagcaaaacccgcttctccctcctgcactccactacttgccttcccgcccgtcctctactcccccaaatccgccgggccaaaccctagagaaggcgatcggcatttccccgacggcgagcgggcggaagcggacaattatgccccgctgccgccgcgacaaggggcaggcgctcatcgacctcgacagcgacgccgaagacgagtgccaaagcaagggttctcaaacaagtagaacaacaacattgaagacatctgggagattgaaaaatgtattaacaacaacattgaagacatctgggaggagatccaaaaatgtattgccttcattttatgataacctcccccagggcagagcctcacgccatgcaactagcaggaggaacaagacaaatcaagacaagctaaatactgatatttttgaattatacatggatggacactggagcctccttgtcttatgccactttggtgatgcaaactgttcggatattaagaaaggaccacggatgatggtgctggactcactcaatacgacagatccgacaaggttgcgatcagcaatcagaaaattcattattgacatttacaagactgaggagcgggaagaaagcaagcagttcataaacaaaatctgcctcgagtttcccaaagtgccacagcaaaatggggatgaatgtggaatttatgttctttatttcatccgctgttttctactgaacaaaaaactgacagaagttcttgaaaacaaaaaattggaagaaaaatttacccagctgtttgatgatggctggtttaacccagaggaactagagaacttccgcaaggatatccattcattccaagcgaatcgaaataacaaagttgcagagtagggtatatagcaaaatggtgccaagtatataaattgatagcttcatccaccatgtagattgctgagtttcatcttcctttgtggctcattccgaggacatttgaaggctgttgaggatatgttgtatttccgttttatccatggaagagggagtacatagagcttcgctggcagacagcaaactagccatttatcgtatttaaaatatcgaacttggtagtgtatatatattatatctggaagtgctagattagcatcaccctcttggataatgttagcatttagcagggttacacacgatgtactagtgtatgtattctcattctagagatgctgtagagtctcctgcttatccgggtatagacgttacagtttcacatctgttgtgccgagatggtgatggtaatagtaagtaaaaaaaaaaaaaaactcgcagcagcttcctgtttcagatatcctgtagattctgctgttgctgttgtgacggggatagattagaatcagactttttccttgttcatgttttgcttacgtgagggcatctgctagattgttactgttatgtcagttttttaacctgatttgggtataaataagattctgtgttgaacatgccaaatgccctaagcctgttaaatttgct

SEQ ID NO: 38876 - DNA, 884 bp, Zea Mays
agacgacagcaaacagcaaaaagcaaaacccgcttctccctcctgcactccactacttgccttcccgcccgtcctctactcccccaaatccgccgggccaaaccctagagaaggcgatcggcatttccccgacggcgagcgggcggaagcggacaattatgccccgctgccgccgcgacaaggggcaggcgctcatcgacctcgacagcgacgccgaagacgagtgccaaagcaagggttctcaaacaagtagaacaacaacattgaagacatctgggagattgaaaaatgtattaacaacaacattgaagacatctgggaggagatccaaaaatgtattgccttcattttatgataacctcccccagggcagagcctcacgccatgcaactagcaggaggaacaagacaaatcaagacaagctaaatactgatatttttgaattatacatggaagatctttggaagcacattgatgaagataagaagagtgcttatgcatacttggattctttatggtttaacatgtattaccatgggagtaataaacctaatgtccttaaatggataaaagctaagagaatattttcaagacaatatgtttttgttcctattgtttgtttgtgagttactctcattattaccttgtgtattcacttaattagttgtcagatatgtatcaaattttcaccttttttaatggcagtggacactggagcctccttgtcttatgccactttggtgatgcaaactgttcggatattaagaaaggaccacggatgatggtgctggactcactcaatacgacagatccgacaaggttgcgatcagcaatcagaaatttggcgagtgcgtcaagctcgacgtcggtcttcagtggttcgc

SEQ ID NO: 38877 - DNA, 1687 bp, Zea Mays
gcaaaaagcaaaacccgcttctccctcctgcactccactacttgccttcccgcccgtcctctactcccccaaatccgccgggccaaaccctagagaaggcgatcggcatttccccgacggcgagcgggcggaagcggacaattatgccccgctgccgccgcgacaaggggcaggcgctcatcgacctcgacagcgacgccgaagacgagtgccaaagcaagggttctcaaacaagtagaacaacaacattgaagacatctgggagattgaaaaatgtattaacaacaacattgaagacatctgggaggagatccaaaaatgtattgccttcattttatgataacctcccccagggcagagcctcacgccatgcaactagcaggaggaacaagacaaatcaagacaagctaaatactgatatttttgaattatacatggaagatctttggaagcacattgatgaagataagaagagtgcttatgcatacttggattctttatggtttaacatgtattaccatgggagtaataaacctaatgtccttaaatggataaaagctaagagaatattttcaagacaatatgtttttgttcctattgtttgtttgtgagttactctcattattaccttgtgtattcacttaattagttgtcagatatgtatcaaattttcaccttttttaatggcagtggacactggagcctccttgtcttatgccactttggtgatgcaaactgttcggatattaagaaaggaccacggatgatggtgctggactcactcaatacgacagatccgacaaggttgcgatcagcaatcagaaaattcattattgacatttacaagactgaggagcgggaagaaagcaagcagttcataaacaaaatctgcctcgagtttcccaaagtgccacagcaaaatggggatgaatgtggaatttatgttctttatttcatccgctgttttctactgaacaaaaaactgacagaagttcttgaaaacaaaaaattggaagaaaaatttacccagctgtttgatgatggctggtttaacccagaggaactagagaacttccgcaaggatatccattcattccaagcattgctgagtttcatcttcctttgtggctcattccgaggacatttgaaggctgttgaggatatgttgtatttccgttttatccatggaagagggagtacatagagcttcgctggcagacagcaaactagccatttatcgtatttaaaatatcgaacttggtagtgtatatatattatatctggaagtgctagattagcatcaccctcttggataatgttagcatttagcagggttacacacgatgtactagtgtatgtattctcattctagagatgctgtagagtctcctgcttatccgggtatagacgttacagtttcacatctgttgtgccgagatggtgatggtaatagtaagtaaaaaaaaaaaaaaactcgcagcagcttcctgtttcagatatcctgtagattctgctgttgctgttgtgacggggatagattagaatcagactttttccttgttcatgttttgcttacgtgagggcatctgctagattgttactgttatgtcagttttttaacctgatttgggtataaataagattctgtgttgaacatgccaaatgccctaagcctgttaaatttgct

SEQ ID NO: 38878 - DNA, 788 bp, Zea Mays
caaaaagcaaaacccgcttctccctcctgcactccactacttgccttcccgcccgtcctctactcccccaaatccgccgggccaaaccctagagaaggcgatcggcatttccccgacggcgagcgggcggaagcggacaattatgccccgctgccgccgcgacaaggggcaggcgctcatcgacctcgacagcgacgccgaagacgagtgccaaagcaagggttctcaaacaagtagaacaacaacattgaagacatctgggagattgaaaaatgtattaacaacaacattgaagacatctgggaggagatccaaaaatgtattgccttcattttatgataacctcccccagggcagagcctcacgccatgcaactagcaggaggaacaagacaaatcaagacaagctaaatactgatatttttgaattatacatggaagatctttggaagcacattgatgaagataagaagagtgcttatgcatacttggattctttatggtttaacatgtattaccatgggagtaataaacctaatgtccttaaatggataaaagctaagagaatattttcaagacaatatgtttttgttcctattgtttgttttggacactggagcctccttgtcttatgccactttggtgatgcaaactgttcggatattaagaaaggaccacggatgatggtgctggactcactcaatacgacagatccgacaaggttgcgatcagcaatcagaaagtcataaagatgtcaagggaggacactgtctgattgcctggggaagg

SEQ ID NO: 38879 - DNA, 1515 bp, Zea Mays
caaaaagcaaaacccgcttctccctcctgcactccactacttgccttcccgcccgtcctctactcccccaaatccgccgggccaaaccctagagaaggcgatcggcatttccccgacggcgagcgggcggaagcggacaattatgccccgctgccgccgcgacaaggggcaggcgctcatcgacctcgacagcgacgccgaagacgagtgccaaagcaagggttctcaaacaagtagaacaacaacattgaagacatctgggagattgaaaaatgtattaacaacaacattgaagacatctgggaggagatccaaaaatgtattgccttcattttatgataacctcccccagggcagagcctcacgccatgcaactagcaggaggaacaagacaaatcaagacaagctaaatactgatatttttgaattatacatggatggacactggagcctccttgtcttatgccactttggtgatgcaaactgttcggatattaagaaaggaccacggatgatggtgctggactcactcaatacgacagatccgacaaggttgcgatcagcaatcagaaaattcattattgacatttacaagactgaggagcgggaagaaagcaagcagttcataaacaaaatctgcctcgagtttcccaaagtgccacagcaaaatggggatgaatgtggaatttatgttctttatttcatccgctgttttctactgaacaaaaaactgacagaagttcttgaaaacaaaaaattggaagaaaaatttacccagctgtttgatgatggctggtttaacccagaggaactagagaacttccgcaaggatatccattcattccaagcgaatcgaaataacaaagttgcagagtagggtatatagcaaaatggtgccaagtatataaattgcttcatccaccatgtagattgctgagtttcatcttcctttgtggctcattccgaggacatttgaaggctgttgaggatatgttgtatttccgttttatccatggaagagggagtacatagagcttcgctggcagacagcaaactagccatttatcgtatttaaaatatcgaacttggtagtgtatatatattatatctggaagtgctagattagcatcaccctcttggataatgttagcatttagcagggttacacacgatgtactagtgtatgtattctcattctagagatgctgtagagtctcctgcttatccgggtatagacgttacagtttcacatctgttgtgccgagatggtgatggtaatagtaagtaaaaaaaaaaaaaaactcgcagcagcttcctgtttcagatatcctgtagattctgctgttgctgttgtgacggggatagattagaatcagactttttccttgttcatgttttgcttacgtgagggcatctgctagattgttactgttatgtcagttttttaacctgatttgggtataaataagattctgtgttgaacatgccaaatgccctaagcctgttaaatttgct

SEQ ID NO: 38880 - DNA, 634 bp, Zea Mays
gcaaaacccgcttctccctcctgcactccactacttgccttcccgcccgtcctctactcccccaaatccgccgggccaaaccctagagaaggcgatcggcatttccccgacggcgagcgggcggaagcggacaattatgccccgctgccgccgcgacaaggggcaggcgctcatcgacctcgacagcgacgccgaagacgagtgccaaagcaagggttctcaaacaagtagaacaacaacattgaagacatctgggagattgaaaaatgtattaacaacaacattgaagacatctgggaggagatccaaaaatgtattgccttcattttatgataacctcccccagggcagagcctcacgccatgcaactagcaggaggaacaagacaaatcaagacaagctaaatactgatatttttgaattatacatggatggacactggagcctccttgtcttatgccactttggtgatgcaaactgttcggatattaagaaaggaccacggatgatggtgctggactcactcaatacgacagatccgacaaggttgcgatcagcaatcagaaaattattccataatgatattgttgggattagggttacggaggtagtacgagtggtaggtttaaggttt

SEQ ID NO: 38881 - DNA, 1514 bp, Zea Mays
gcaaaacccgcttctccctcctgcactccactacttgccttcccgcccgtcctctactcccccaaatccgccgggccaaaccctagagaaggcgatcggcatttccccgacggcgagcgggcggaagcggacaattatgccccgctgccgccgcgacaaggggcaggcgctcatcgacctcgacagcgacgccgaagacgagtgccaaagcaagggttctcaaacaagtagaacaacaacattgaagacatctgggagattgaaaaatgtattaacaacaacattgaagacatctgggaggagatccaaaaatgtattgccttcattttatgataacctcccccagggcagagcctcacgccatgcaactagcaggaggaacaagacaaatcaagacaagctaaatactgatatttttgaattatacatggatggacactggagcctccttgtcttatgccactttggtgatgcaaactgttcggatattaagaaaggaccacggatgatggtgctggactcactcaatacgacagatccgacaaggttgcgatcagcaatcagaaaattcattattgacatttacaagactgaggagcgggaagaaagcaagcagttcataaacaaaatctgcctcgagtttcccaaagtgccacagcaaaatggggatgaatgtggaatttatgttctttatttcatccgctgttttctactgaacaaaaaactgacagaagttcttgaaaacaaaaaattggaagaaaaatttacccagctgtttgatgatggctggtttaacccagaggaactagagaacttccgcaaggatatccattcattccaagcgaatcgaaataacaaagttgcagagtagggtatatagcaaaatggtgccaagtatataaattgcttcatccaccatgtagattgctgagtttcatcttcctttgtggctcattccgaggacatttgaaggctgttgaggatatgttgtatttccgttttatccatggaagagggagtacatagagcttcgctggcagacagcactagtaactagccatttatcgtatttaaaatatcgaacttggtagtgtatatatattatatctggaagtgctagattagcatcaccctcttggataatgttagcatttagcagggttacacacgatgtactagtgtatgtattctcattctagagatgctgtagagtctcctgcttatccgggtatagacgttacagtttcacatctgttgtgccgagatggtgatggtaatagtaagtaaaaaaaaaaaaaaactcgcagcagcttcctgtttcagatatcctgtagattctgctgttgctgttgtgacggggatagattagaatcagactttttccttgttcatgttttgcttacgtgagggcatctgctagattgttactgttatgtcagttttttaacctgatttgggtataaataagattctgtgttgaacatgccaaatgccctaagcctgttaaatttgct

SEQ ID NO: 38882 - DNA, 1429 bp, Zea Mays
gcaaaacccgcttctccctcctgcactccactacttgccttcccgcccgtcctctactcccccaaatccgccgggccaaaccctagagaaggcgatcggcatttccccgacggcgagcgggcggaagcggacaattatgccccgctgccgccgcgacaaggggcaggcgctcatcgacctcgacagcgacgccgaagacgagtgccaaagcaagggttctcaaacaagtagaacaacaacattgaagacatctgggagattgaaaaatgtattaacaacaacattgaagacatctgggaggagatccaaaaatgtattgccttcattttatgataacctcccccagggcagagcctcacgccatgcaactagcaggaggaacaagacaaatcaagacaagctaaatactgatatttttgaattatacatggatggacactggagcctccttgtcttatgccactttggtgatgcaaactgttcggatattaagaaaggaccacggatgatggtgctggactcactcaatacgacagatccgacaaggttgcgatcagcaatcagaaaattcattattgacatttacaagactgaggagcgggaagaaagcaagcagttcataaacaaaatctgcctcgagtttcccaaagtgccacagcaaaatggggatgaatgtggaatttatgttctttatttcatccgctgttttctactgaacaaaaaactgacagaagttcttgaaaacaaaaaattggaagaaaaatttacccagctgtttgatgatggctggtttaacccagaggaactagagaacttccgcaaggatatccattcattccaagcattgctgagtttcatcttcctttgtggctcattccgaggacatttgaaggctgttgaggatatgttgtatttccgttttatccatggaagagggagtacatagagcttcgctggcagacagcaaactagccatttatcgtatttaaaatatcgaacttggtagtgtatatatattatatctggaagtgctagattagcatcaccctcttggataatgttagcatttagcagggttacacacgatgtactagtgtatgtattctcattctagagatgctgtagagtctcctgcttatccgggtatagacgttacagtttcacatctgttgtgccgagatggtgatggtaatagtaagtaaaaaaaaaaaaaaactcgcagcagcttcctgtttcagatatcctgtagattctgctgttgctgttgtgacggggatagattagaatcagactttttccttgttcatgttttgcttacgtgagggcatctgctagattgttactgttatgtcagttttttaacctgatttgggtataaataagattctgtgttgaacatgccaaatgccctaagcctgttaaatttgct

SEQ ID NO: 38883 - DNA, 1758 bp, Zea Mays
gcaaaacccgcttctccctcctgcactccactacttgccttcccgcccgtcctctactcccccaaatccgccgggccaaaccctagagaaggcgatcggcatttccccgacggcgagcgggcggaagcggacaattatgccccgctgccgccgcgacaaggggcaggcgctcatcgacctcgacagcgacgccgaagacgagtgccaaagcaagggttctcaaacaagtagaacaacaacattgaagacatctgggagattgaaaaatgtattaacaacaacattgaagacatctgggaggagatccaaaaatgtattgccttcattttatgataacctcccccagggcagagcctcacgccatgcaactagcaggaggaacaagacaaatcaagacaagctaaatactgatatttttgaattatacatggaatctttggaagcacattgatgaagataagaagagtgcttatgcatacttggattctttatggtttaacatgtattaccatgggagtaataaacctaatgtccttaaatggataaaagctaagagaatattttcaagacaatatgtttttgttcctattgtttgtttgtgagttactctcattattaccttgtgtattcacttaattagttgtcagatatgtatcaaattttcaccttttttaatggcagtggacactggagcctccttgtcttatgccactttggtgatgcaaactgttcggatattaagaaaggaccacggatgatggtgctggactcactcaatacgacagatccgacaaggttgcgatcagcaatcagaaaattcattattgacatttacaagactgaggagcgggaagaaagcaagcagttcataaacaaaatctgcctcgagtttcccaaagtgccacagcaaaatggggatgaatgtggaatttatgttctttatttcatccgctgttttctactgaacaaaaaactgacagaagttcttgaaaacaaaaaattggaagaaaaatttacccagctgtttgatgatggctggtttaacccagaggaactagagaacttccgcaaggatatccattcattccaagcgaatcgaaataacaaagttgcagagtagggtatatagcaaaatggtgccaagtatataaattgcttcatccaccatgtagattgctgagtttcatcttcctttgtggctcattccgaggacatttgaaggctgttgaggatatgttgtatttccgttttatccatggaagagggagtacatagagcttcgctggcagacagcaaactagccatttatcgtatttaaaatatcgaacttggtagtgtatatatattatatctggaagtgctagattagcatcaccctcttggataatgttagcatttagcagggttacacacgatgtactagtgtatgtattctcattctagagatgctgtagagtctcctgcttatccgggtatagacgttacagtttcacatctgttgtgccgagatggtgatggtaatagtaagtaaaaaaaaaaaaaaactcgcagcagcttcctgtttcagatatcctgtagattctgctgttgctgttgtgacggggatagattagaatcagactttttccttgttcatgttttgcttacgtgagggcatctgctagattgttactgttatgtcagttttttaacctgatttgggtataaataagattctgtgttgaacatgccaaatgccctaagcctgttaaatttgct

SEQ ID NO: 38884 - DNA, 1896 bp, Zea Mays
gtctttttcgcgtggcttggctgacatgtgaaaaagctaggcgcccccgataaaaagggcctccccgctccccggacgcggcggctactgtttctgtttcttccttcgaccccggtcgtcccgtcctccgctgggcatcgaaagtcgaacgcctcccccctccctccctcccagttccgtcgtcggctcctgcagcagcagcaagcaatggcggcttcctggagagccgtggcgctggcggtggccgcagtgggctggcttcttgccggtgccgcgcgggcgttcccggccgaggacttggtcgcgcggctgccggggcagcctccggtcacgttcaggcagttcgccgggtacgtggacgtcgacgccaaggccggcaggagcctcttctactacttcgccgaggcgcgggaggacgccgccgccaagccgctcacgctgtggctgaatggaggtcctggctgttcttcggttggaggtggtgctttcaccgagctagggccattttatccgcgaggagacggccgaggcctcagattgaacaagaagtcatggaacagagcgtccaatcttctgttcgtggagtcaccggctggagttggatggtcttattcgaacacttcatcggactacagcactggagacgtgcggactgctcatgacatgtaccaatttttgttgggatggtatgcgaagtttcctgagtacagatcaagagctttgttccttaccggagagagttacgcagggcattacataccacagctcgctgatgtacttatcacccataacgagaaatccaagggtttcaagttcaatattaagggagtcgctatcgggaatccgctcctcaagcttgacagggacgtccctgcgacctacgagtacttctggtctcatggcatgatctccgacgagatattcctggcgatcagccacagctgcgactttgaggactacaccttcaacgaccctcacaacgagagcaagtcatgcaacgacgccatcgcggaagcgaacagcgtagtcggagactacgtcaacaactacgatgtcattctcgacgtctgctacccatcgatcgtgatgcaggagctacggctgcgagaatacgtatgctattgcttgctcctccgactacgctgttcttcctcgtttgattggctcttcttggttgcaggcgacgaagatcagtattggcgtggatgtctgcatgtcctacgagaggtttttctacttcaatctaccggaggtgcagcaggctctgcatgctaacaggacgcatctgaagcatcactggagcatgtgcagcgagttttggttatcttctcaatgccaaactctcacacgggtcatttgcaccatcatgtgccagtatcctgaactacagcaacaccgacggcaacatcaacatactgcctacacttcaaagaatcgtcgagcacaagataccactttgggtgttcaggttggagggtgggtgacggagtatggcaacttcctgaccttcgccacagtgcgaggtgcgtctcacatggtgccctttgcacagccagaccgggctctcgggctgtttcgatccattgtactcggacaaagactaccgaacacgacgaatccacacattgactagaagtgtatctacaaaagaaggtggagacagacagaaaaatagcttagattttgctttttcagttttgctgcaatgaatggatctacaaaagaaggtagttcataaagacgtgtgatgtgttggatgctcaactagtactttaactatttataaagagcagaaataatatttttattgctgtggttataactatcatcaatctgcatccctcgaagtttggaacacacatagatttgtgcaagtgacgacaggctcaacagcat

SEQ ID NO: 38885 - DNA, 1947 bp, Zea Mays
gtctttttcgcgtggcttggctgacatgtgaaaaagctaggcgcccccgataaaaagggcctccccgctccccggacgcggcggctactgtttctgtttcttccttcgaccccggtcgtcccgtcctccgctgggcatcgaaagtcgaacgcctcccccctccctccctcccagttccgtcgtcggctcctgcagcagcagcaagcaatggcggcttcctggagagccgtggcgctggcggtggccgcagtgggctggcttcttgccggtgccgcgcgggcgttcccggccgaggacttggtcgcgcggctgccggggcagcctccggtcacgttcaggcagttcgccgggtacgtggacgtcgacgccaaggccggcaggagcctcttctactacttcgccgaggcgcgggaggacgccgccgccaagccgctcacgctgtggctgaatggaggtcctggctgttcttcggttggaggtggtgctttcaccgagctagggccattttatccgcgaggagacggccgaggcctcagattgaacaagaagtcatggaacagagcgtccaatcttctgttcgtggagtcaccggctggagttggatggtcttattcgaacacttcatcggactacagcactggagacgtgcggactgctcatgacatgtaccaatttttgttgggatggtatgcgaagtttcctgagtacagatcaagagctttgttccttaccggagagagttacgcagggcattacataccacagctcgctgatgtacttatcacccataacgagaaatccaagggtttcaagttcaatattaagggagtcgctatcgggaatccgctcctcaagcttgacagggacgtccctgcgacctacgagtacttctggtctcatggcatgatctccgacgagatattcctggcgatcagccacagctgcgactttgaggactacaccttcaacgaccctcacaacgagagcaagtcatgcaacgacgccatcgcggaagcgaacagcgtagtcggagactacgtcaacaactacgatgtcattctcgacgtctgctacccatcgatcgtgatgcaggagctacggctgcgagaatacgcgacgaagatcagtattggcgtggatgtctgcatgtcctacgagaggtttttctacttcaatctaccggaggtgcagcaggctctgcatgctaacaggacgcatctgaagcatcactggagcatgtgcagcgagttttggttatcttctcaatgccaaactctcacacgggtcatttgcaccatcatgtgccagtatcctgaactacagcaacaccgacggcaacatcaacatactgcctacacttcaaagaatcgtcgagcacaagataccactttgggtgttcagcggcgaccaagactccgtcgtgcccttgctgggcacccgaacccttgtgcgagagctcgctcacgccatggggctgcatgtcaccgtcccctacagcacctggttccacaaaggccaggttggagggtgggtgacggagtatggcaacttcctgaccttcgccacagtgcgaggtgcgtctcacatggtgccctttgcacagccagaccgggctctcgggctgtttcgatccattgtactcggacaaagactaccgaacacgacgaatccacacattgactagaagtgtatctacaaaagaaggtggagacagacagaaaaatagcttagattttgctttttcagttttgctgcaatgaatggatctacaaaagaaggtagttcataaagacgtgtgatgtgttggatgctcaactagtactttaactatttataaagagcagaaataatatttttattgctgtggttataactatcatcaatctgcatccctcgaagtttggaacacacatagatttgtgcaagtgacgacaggctcaacagcat

SEQ ID NO: 38886 - DNA, 1498 bp, Zea Mays
aaacatatctcatgttccatcacttattatagtggcacctgtactgtttcattaaggaaaataattggtcctggctgttcttcggttggaggtggtgctttcaccgagctagggccattttatccgcgaggagacggccgaggcctcagattgaacaagaagtcatggaacagaggtccaatcttctgttcgtggagtcaccggctggagttggatggtcttattcgaacacttcatcggactacagcactggagacgtgcggactgctcatgacatgtaccaatttttgttgggatggtatgcgaagtttcctgagtacagatcaagagctttgttccttaccggagagagttacgcagggcattacataccacagctcgctgatgtacttatcacccataacgagaaatccaagggtttcaagttcaatattaagggagtcgctatcgggaatccgctcctcaagcttgacagggacgtccctgcgacctacgagtacttctggtctcatggcatgatctccgacgagatattcctggcgatcagccacagctgcgactttgaggactacaccttcaacgaccctcacaacgagagcaagtcatgcaacgacgccatcgcggaagcgaacagcgtagtcggagactacgtcaacaactacgatgtcattctcgacgtctgctacccatcgatcgtgatgcaggagctacggctgcgagaatacgcgacgaagatcagtattggcgtggatgtctgcatgtcctacgagaggtttttctacttcaatctaccggaggtgcagcaggctctgcatgctaacaggacgcatctgaagcatcactggagcatgtgcagcgatatcctgaactacagcaacaccgacggcaacatcaacatactgcctacacttcaaagaatcgtcgagcacaagataccactttgggtgttcagcggcgaccaagactccgtcgtgcccttgctgggcacccgaacccttgtgcgagagctcgctcacgccatggggctgcatgtcaccgtcccctacagcacctggttccacaaaggccaggttggagggtgggtgacggagtatggcaacttcctgaccttcgccacagtgcgaggtgcgtctcacatggtgccctttgcacagccagaccgggctctcgggctgtttcgatccattgtactcggacaaagactaccgaacacgacgaatccacacattgactagaagtgtatctacaaaagaaggtggagacagacagaaaaatagcttagattttgctttttcagttttgctgcaatgaatggatctacaaaagaaggtagttcataaagacgtgtgatgtgttggatgctcaactagtactttaactatttataaagagcagaaataatatttttattgctgtggttataactatcatcaatctgcatccctcgaagtttggaacacacatagatttgtgcaagtgacgacaggctcaacagcat

SEQ ID NO: 38887 - DNA, 1762 bp, Zea Mays
aagagcataaacttaactgggcgtttggatcccttcattttagaggaattggaattcactcaataaagtaacttatttagtttggaatttgacattccaccactttccagagttcatatataagcccatctcaaattcatggggttggatgggaaataattttatgcattagtagattttgtttctactccgtaacttacatgacgctcttcgtctcactcatctatagtaaaaatgtagcacataactatcttcgacatcttgctaataatagtataaaaatatattttgcataaaaccaaattggcttaattgatatatgcctaaattactattattagaatggaattcaattccaatgatccaaacagggcgtaagcgaaatttcctctccagctatgtaaaatagaccccttttcctgttatctgtgaattggtctcttcgtattttgtagagatcctacaacattcagatggaccagacaaaatgctgcttctttgtttggttcatactgtaccaggggttcccgggtcagaaactatggagaaaattgtcttctgtggatagtggtgatgcaggcttgcaatggctatagtctaatatgtgtccccactatatgatactgtaggtgattgggaggccattaaatagtaggcccacgtcatataatgtttcagatcaaataataaaatatatgggaccacacactcttttaataagaaatccaatgtaatactttaggaattcagagaatacatttccatgtcaaacgggtgcaggagatgttaactacatcattgatcatgctgagattgatgttgtcttcatacaagacaagaaaataaaagagatactatccccaaacagcaaggctgctaataggctaaaaggtaaggaacgtcgcagtcagctgatccctcgtcctctaccgatgtcgcgtcgccctgcggcctcccccagaagtgtagatccacacaggctcagctacatttctcctcttgttggtaaggaagctcgctctaatggattgctgcgagggttagttctgccctgttcttccgttcctacgctgtcaacaatcaagttccaagtactgacgtatcgccgccgatgacttaggcaatttgaacagtattttggataatccttattcatgtggtatgtcttagaactagtctgtcttaatggcctgtcatttttgtttgactctgcatagagtgtatgctccaataaaatgtgcgcctatcattctaaatattatatgttggagggaatcagactgaatgttggacttgctggacagattagggtaacaaaaataattctcttctcttgctacatgattcctgtatttttttttggacatggcattatgatctcgcctttgcccatctatagctacatattagcacctttgtctcaaatgctctgcctatttcttcaaccatagattcaagatcttcaaagtcataagcctccgaaaaaatgaagacctagaacaaatttatgagagggtaaatccaaccgtccttctataaggattataagtctattatacttttgttttggtcattatacatgtaatgattttttgtagttgagtggaacataaatagttggcaccgttttagtaaattcaggcacaggatcttagacatccgaatgatgaacagagaaaacatagagagtgtagtagggcttgaatatactttacttgaaataagctcagtcaatacagtaattagaggacacttgttgaac

SEQ ID NO: 38888 - DNA, 805 bp, Zea Mays
ggaaaacagttgatcttgtcggtaatgagaaactgaaggccagtgcatctgttaagcaccttgctcttccttgtaacaaggcagcaagggcacaagttattccagacattatccgatgttatagccaggatgtactaccccatagatggttgtttttcagtaatactggtgttgctgtcatgctttatgagcccagatataagcacagtgtcagcagactagaaagggagtctggggttaaatttgagcatatctctgcgccacaacccactgatgtagcacaatctgctggcagtgaagctgcagatgccattgcgagtgtgtcagacagtgttattcctatcttcaggcagcaagcagagcagttgctaagctcttccagtctgtctgcagctgacttgcttgccaaagcacttgcgaaggcagttgtttgctataacattccggtgatcttgtttcttcatcgtcggggtcatatttgttcccattggtgttatcttcagtttgacgtcggcaacgtggtcatggtgaccggcgggaggaacaccgggcgtgtaggagtgatcaagaactgggagaagcacaagggcatcttcgaggaaaacatagaatggaattcaaatttggtggtcgcaaaagtgtggagacttgaattcatataatgttaggcttaacattagtgtaaacagttgtattttagtttagatttagagtacacttatgtatgccttgtttgacaatgcttatttatgatatattgaatggtacttatttatattatattaattataatgttgttcaatat

SEQ ID NO: 38889 - DNA, 689 bp, Zea Mays
atcatcttcactgagacgaaggattctgcatcagagctttctggtaatactggtgttgctgtcatgctttatgagcccagatataagcacagtgtcagcagactagaaagggagtctggggttaaatttgagcatatctctgcgccacaacccactgatgtagcacaatctgctggcagtgaagctgcagatgccattgcgagtgtgtcagacagtgttattcctatcttcaggcagcaagcagagcagttgctaagctcttccagtctgtctgcagctgacttgcttgccaaagcacttgcgaaggcagttgtttgctataacattccggtgatcttgtttcttcatcgtcggggtcatatttgttcccattggtgttatcttcagtttgacgtcggcaacgtggtcatggtgaccggcgggaggaacaccgggcgtgtaggagtgatcaagaactgggagaagcacaagggcatcttcgaggaaaacatagaatggaattcaaatttggtggtcgcaaaagtgtggagacttgaattcatataatgttaggcttaacattagtgtaaacagttgtattttagtttagatttagagtacacttatgtatgccttgtttgacaatgcttatttatgatatattgaatggtacttatttatattatattaattataatgttgttcaatat

SEQ ID NO: 38890 - DNA, 4871 bp, Zea Mays
ggtggatcccgcgtcccgcggccatcaccgcccccacctgctccgcgtcctccgatccccacccggccaccaccaccacgcccgagaagaaaaccgtaagaaacggtggaaaaataattgggaaaacaaaatttcaaatcgaagtcttcctacacccagcgacgaaaaggctgcgacaattcgaatcaaaaatccatccgagtcgaatcgagccagcggaaactccgcggccgatctcctgtgctctcaccgcccgcctcccccgattctgcagcccctcgctgcgaatctggacgcgatttcgaggctagggtttgggaggctccggatcgcgagcccgtgcggaggcaagggtttggattcgggggttgctgctgcatgtcgggggtgctggattgagctactccgcgccggcttgtgatggtggtgaccggcggtggaagacgagtagacggcggcggtgagtagggtttgttgactgagttggggtcgagggtgcgccggccatggtgcggcttctcgggctgcggagcctgagcttcggcccggaggactcgccgcgggagatcccctccactgccgacgtggccccgcccgttggcagcagcggctggctcgtgcgcttcttcgactccgccttcttctgcgagtggattgccgtcagctatctctacaagcacgaccatgctggagtgcgcgactacctctgcaaccgcatgtacacgctcccgctgccggggctcgaggcctacctcttccaggtctgctacatgctcgtccacaagcccagcccttccctcgaccgcttcgtcatcgacacctgcgccaagtcgctccgcatcgcgctcaaggtgcactggctcctcgctgcagagcttgagctggaggatgctgacgatctcgacgggatcgataaggtgcaggagcagtgccaggttgcagcgaccgtgcagggcgagtggccaccgcttgtccggccttcacctccatcccctgctgccagtccgcgaggtaaccccatgctcagcagaatacgatcgtccaagcagcggctactgtcccttgcatcgtcaccttcgcttggactgagccccccagcaggtggtggggtcaatgtcgctgaggatgctatgggtactggagggaagcagccagccacaccgtcatcagaggataacaagttactcaagaggctgagcattggtccaaaaatgcgcgatgcactgctcttcagacgatcaggagagaaggatgaagaacaagaccgggatggtttttttaaaaggcttcttagggacagcagagacaaggaggaggaggatggtgacagagaaggatttttcaaaagattacttagcagggagaaggataatgaggaggaagaaagtgatagagatggtttcttccgcagattactcagggatagcaaagaggaggacatggaactgacaccaagctcagatggtttgttgaagcgactttttcgtgataaggaggacaggcaaggtgaggatgatgagaaggaaggattttttcgcaggatgttcaaggataagaacgaggagaggagagatagtagtcatgcaagacatgggaatgaggaaagactgggcaagagtgtggaagatgatgacagagaaggtttcttccgcaaaattttcaaagataagaatgaggagaggaaagatgaagggcatcaaaagccagatgagagggaaaaggttggtgcgaacatagaagatgataagagagatggttttttcaggcaactctttaaggagaaaaacgatgagaaaaaggaaggcagcacaccaagcaagaaagaggaagatgataaaggccataaaaatgcagatgatgataatttctttcgcaggcttttcaaggataagaatgaagaaaagaaagggattgttcatgacaggaatgaagatgacaagtgtgaggaaggtgataaagaaaacttcttccgcaaattatttaaggataaacatgaggagaggagaactgagggacctgataaaaatgatgattatggtaagggaagtagtggtatcgaagaggaagataatccagagtttttgtcattccgtaggttgtttagagtgcacccagaagattctaagagtgggcacatagaaagcagtcaatctaacaatctttctgaggggagcccaggatcagaaagcttttttaagaggctattccgtgatagagaccgctcacttgaagattctgagatttttgggtcaaaaatggcaaaagagaaacaccctggtactacaggaatcaatgagaagcaaagtggaaaaccaccattaccaattaatgcagtagcagagcttcgaaaaggttcttactatgcttcgttggaacttgttcaggctttatgtgatacatcgtatggcctggtagacatatttcctattgaggatcgtaagattgccctccgggagtctcttacagagatcaatagccagattgcttctgctgaaaaaaacggaggagtatgctttccgatgggaaagggcatatatcgagtggttcatatacctgaagacgagtctgttcttctgaattctagggagaaagctccttaccttatatgtgttgaagttttaaaagcagaagctcctagccactctaaaggatcatcagatgggcacaaattatcaaaaggtgggataccattggctaatggagatgtgcaactaccaaaaccacctccatgggcctatcctttgtggagcagacacgaaacacaaaactatgaaacagacagaatgctgaagtctacttctcaggctgcgacatgatgctacggattctcatgatccacctggagattcgcaaacagttgctgatcagcctattgaatgggtgaaggttacgttgtctgcagttccaggagttaacatggaagatgtagatgataatgaaccaacacgaaagaaggaccatcgccgtgttcctagtacaattgccattgaggaagtaaaggctgcagcattaaaaggagaagctccacctggtcttcctctgaaaggagttgcgcagagcacccaaaatttagatcctaaggctactgatggtggggatccaaaaccaaccgatgctttggctggtgagctttgggctgtcaaacgcgaaagaattcgacggtcttcggttcatggaaaatcacctggttgggacttgcgttctattattgtcaagagtggtgatgattgccgacaggaacacttggccgtacagcttgttgcacacttctatgatatatatcaagaagctggtttaccactatggctgcggccttatgaagtaattgttacttcagcttatacagcactaattgagaccatccctgatacggcatcaatccattccgtcaaaagtaggtttcccaatatttcaagtctccgagactactatgtagccaagtatgaagagaattctccaaattttaaactcgcacagagaaactttgttgaaagtatggctggatattcaattctgtgctacctacttcaggtgaaagatcgccacaatgggaatcttctaattgatgaggaaggacatattattcatattgattttggtttcatactgtcgaactctcctggaggtgtaaacttcgagagtgcaccatttaagctaacgagggaactccttgaagtgatggattctgatgcagagggaactcccagtgagttctttgattactttaaggtgctatgcattcaaggtttccttacttgccggaagcatgcagaacgtattatacttcttgtggaaatgttgcaggattctggctttccatgtttcaaaggtggccctcgcacaatacaaaacttgaggaagaggttccacttgagtctaactgaagagcaatgtgtatccctggtgctctcactgatcagtagcagcatggatgcttggcgcactcggcaatatgattactaccagagagtattgaatggaattttatgattttccccacaggagcaacggattcattcagaaaccaattttcttgtatccttggagcaaaccatgggattgcataggtcagttttgggctgatctatgctggcaccccatatcagatttccaggagaggactaggttattgatcactgtgttttcatgtggcattgcacatttgtggtcaactagggaaacagattggtgccgcattgtactttcatgggaccccccctctgaaagagttgagaagtgtacagtcatcggcagtcatctagttagcgctttgtgctaggaggttgtgaccagtggagctctatttggcatattggaatttggaatccggctacattgttgtacagacctttgattgacgtagcttggagaggatgtaggagtgaacagggccatgctttgaagcgaacaagttataggcatatgggagctggggatcatccgagacagatgccgctcgaagtgtcactgtacttgttgtgtggtatccctatagcaccaaagtagatggagatgtgctttgctaaaaaaagataaagacccagtgttggccgctctcatatgtcactaggtctgaaaggaaattggccgctaatttgcgcgaggcctgtccttcagagaggtgctttgctgcatttgtaaattatcattactgtacagggaccatactgtcttagcattctgtttttaagttgttaagattttaattccttctttgtgggtgtcttggtcttcgaagatctaggtgatagcttgtttgactagcactatgatcagtgttcgaaagtacagttccatgtgtcatgaagaaaaacactgcaagatttttaatacatttttgatgtactatgagagcaaatttctatttcgat

SEQ ID NO: 38891 - DNA, 2663 bp, Zea Mays
caccgcccccacctgctccgcgtcctccgatccccacccggccaccaccaccacgcccgagaagaaaaccgtaagaaacggtggaaaaataattgggaaaacaaaatttcaaatcgaagtcttcctacacccagcgacgaaaaggctgcgacaattcgaatcaaaaatccatccgagtcgaatcgagccagcggaaactccgcggccgatctcctgtgctctcaccgcccgcctcccccgattctgcagcccctcgctgcgaatctggacgcgatttcgaggctagggtttgggaggctccggatcgcgagcccgtgcggaggcaagggtttggattcgggggttgctgctgcatgtcgggggtgctggattgagctactccgcgccggcttgtgatggtggtgaccggcggtggaagacgagtagacggcggcggtgagtagggtttgttgactgagttggggtcgagggtgcgccggccatggtgcggcttctcgggctgcggagcctgagcttcggcccggaggactcgccgcgggagatcccctccactgccgacgtggccccgcccgttggcagcagcggctggctcgtgcgcttcttcgactccgccttcttctgcgagtggattgccgtcagctatctctacaagcacgaccatgctggagtgcgcgactacctctgcaaccgcatgtacacgctcccgctgccggggctcgaggcctacctcttccaggtctgctacatgctcgtccacaagcccagcccttccctcgaccgcttcgtcatcgacacctgcgccaagtcgctccgcatcgcgctcaaggtgcactggctcctcgctgcagagcttgagctggaggatgctgacgatctcgacgggatcgataaggtgcaggagcagtgccaggttgcagcgaccgtgcagggcgagtggccaccgcttgtccggccttcacctccatcccctgctgccagtccgcgaggtaaccccatgctcagcagaatacgatcgtccaagcagcggctactgtcccttgcatcgtcaccttcgcttggactgagccccccagcaggtggtggggtcaatgtcgctgaggatgctatgggtactggagggaagcagccagccacaccgtcatcagaggataacaagttactcaagaggctgagcattggtccaaaaatgcgcgatgcactgctcttcagacgatcaggagagaaggatgaagaacaagaccgggatggtttttttaaaaggcttcttagggacagcagagacaaggaggaggaggatggtgacagagaaggatttttcaaaagattacttagcagggagaaggataatgaggaggaagaaagtgatagagatggtttcttccgcagattactcagggatagcaaagaggaggacatggaactgacaccaagctcagatggtttgttgaagcgactttttcgtgataaggaggacaggcaaggtgaggatgatgagaaggaaggattttttcgcaggatgttcaaggataagaacgaggagaggagagatagtagtcatgcaagacatgggaatgaggaaagactgggcaagagtgtggaagatgatgacagagaaggtttcttccgcaaaattttcaaagataagaatgaggagaggaaagatgaagggcatcaaaagccagatgagagggaaaaggttggtgcgaacatagaagatgataagagagatggttttttcaggcaactctttaaggagaaaaacgatgagaaaaaggaaggcagcacaccaagcaagaaagaggaagatgataaaggccataaaaatgcagatgatgataatttctttcgcaggcttttcaaggataagaatgaagaaaagaaagggattgttcatgacaggaatgaagatgacaagtgtgaggaaggtgataaagaaaacttcttccgcaaattatttaaggataaacatgaggagaggagaactgagggacctgataaaaatgatgattatggtaagggaagtagtggtatcgaagaggaagataatccagagtttttgtcattccgtaggttgtttagagtgcacccagaagattctaagagtgggcacatagaaagcagtcaatctaacaatctttctgaggggagcccaggatcagaaagcttttttaagaggctattccgtgatagagaccgctcacttgaagattctgagatttttgggtcaaaaatggcaaaagagaaacaccctggtactacaggaatcaatgagaagcaaagtggaaaaccaccattaccaattaatgcagtagcagagcttcgaaaaggttcttactatgcttcgttggaacttgttcaggctttatgtgatacatcgtatggcctggtagacatatttcctattgaggatcgtaagattgccctccgggaggtaggtcaaacacattaccatgtaacttcatggctattcatttcacaacccttcagtcatcctgtgccaatcattgcactctctttgttcttttcacattttaacttgtaccctgcactgcaatgatatcttcttttgtgtggcagtctcttacagagatcaatagccagattgcttctgctgaaaaaaacggagttgccatcaccattgtaaggactggagttagtttctt

SEQ ID NO: 38892 - DNA, 5433 bp, Zea Mays
caccgcccccacctgctccgcgtcctccgatccccacccggccaccaccaccacgcccgagaagaaaaccgtaagaaacggtggaaaaataattgggaaaacaaaatttcaaatcgaagtcttcctacacccagcgacgaaaaggctgcgacaattcgaatcaaaaatccatccgagtcgaatcgagccagcggaaactccgcggccgatctcctgtgctctcaccgcccgcctcccccgattctgcagcccctcgctgcgaatctggacgcgatttcgaggctagggtttgggaggctccggatcgcgagcccgtgcggaggcaagggtttggattcgggggttgctgctgcatgtcgggggtgctggattgagctactccgcgccggcttgtgatggtggtgaccggcggtggaagacgagtagacggcggcggtgagtagggtttgttgactgagttggggtcgagggtgcgccggccatggtgcggcttctcgggctgcggagcctgagcttcggcccggaggactcgccgcgggagatcccctccactgccgacgtggccccgcccgttggcagcagcggctggctcgtgcgcttcttcgactccgccttcttctgcgagtggattgccgtcagctatctctacaagcacgaccatgctggagtgcgcgactacctctgcaaccgcatgtacacgctcccgctgccggggctcgaggcctacctcttccaggtctgctacatgctcgtccacaagcccagcccttccctcgaccgcttcgtcatcgacacctgcgccaagtcgctccgcatcgcgctcaaggtgcactggctcctcgctgcagagcttgagctggaggatgctgacgatctcgacgggatcgataaggtgcaggagcagtgccaggttgcagcgaccgtgcagggcgagtggccaccgcttgtccggccttcacctccatcccctgctgccagtccgcgaggtaaccccatgctcagcagaatacgatcgtccaagcagcggctactgtcccttgcatcgtcaccttcgcttggactgagccccccagcaggtggtggggtcaatgtcgctgaggatgctatgggtactggagggaagcagccagccacaccgtcatcagaggataacaagttactcaagaggctgagcattggtccaaaaatgcgcgatgcactgctcttcagacgatcaggagagaaggatgaagaacaagaccgggatggtttttttaaaaggcttcttagggacagcagagacaaggaggaggaggatggtgacagagaaggatttttcaaaagattacttagcagggagaaggataatgaggaggaagaaagtgatagagatggtttcttccgcagattactcagggatagcaaagaggaggacatggaactgacaccaagctcagatggtttgttgaagcgactttttcgtgataaggaggacaggcaaggtgaggatgatgagaaggaaggattttttcgcaggatgttcaaggataagaacgaggagaggagagatagtagtcatgcaagacatgggaatgaggaaagactgggcaagagtgtggaagatgatgacagagaaggtttcttccgcaaaattttcaaagataagaatgaggagaggaaagatgaagggcatcaaaagccagatgagagggaaaaggttggtgcgaacatagaagatgataagagagatggttttttcaggcaactctttaaggagaaaaacgatgagaaaaaggaaggcagcacaccaagcaagaaagaggaagatgataaaggccataaaaatgcagatgatgataatttctttcgcaggcttttcaaggataagaatgaagaaaagaaagggattgttcatgacaggaatgaagatgacaagtgtgaggaaggtgataaagaaaacttcttccgcaaattatttaaggataaacatgaggagaggagaactgagggacctgataaaaatgatgattatggtaagggaagtagtggtatcgaagaggaagataatccagagtttttgtcattccgtaggttgtttagagtgcacccagaagattctaagagtgggcacatagaaagcagtcaatctaacaatctttctgaggggagcccaggatcagaaagcttttttaagaggctattccgtgatagagaccgctcacttgaagattctgagatttttgggtcaaaaatggcaaaagagaaacaccctggtactacaggaatcaatgagaagcaaagtggaaaaccaccattaccaattaatgcagtagcagagcttcgaaaaggttcttactatgcttcgttggaacttgttcaggctttatgtgatacatcgtatggcctggtagacatatttcctattgaggatcgtaagattgccctccgggagtctcttacagagatcaatagccagattgcttctgctgaaaaaaacggaggagtatgctttccgatgggaaagggcatatatcgagtggttcatatacctgaagacgagtctgttcttctgaattctagggagaaagctccttaccttatatgtgttgaagttttaaaagcagaagctcctagccactctaaaggatcatcagatgggcacaaattatcaaaaggtgggataccattggctaatggagatgtgcaactaccaaaaccacctccatgggcctatcctttgtggagcagacacgaaacacaaaactatgaaacagacagaatgctgaagtctacttctcaggttattgaccaagcaatggctcaactctgggagactaaagtaaaatttgtaaatgttagtttctctattgagaaacttggtcgctcaaggagcattgtactttctgaaacgggtcgtaggctgcgacatgatgctacggattctcatgatccacctggagattcgcaaacagttgctgatcagcctattgaatgggtgaaggttacgttgtctgcagttccaggagttaacatggaagatgtagatgataatgaaccaacacgaaagaaggaccatcgccgtgttcctagtacaattgccattgaggaagtaaaggctgcagcattaaaaggagaagctccacctggtcttcctctgaaaggagttgcgcagagcacccaaaatttagatcctaaggctactgatggtggggatccaaaaccaaccgatgctttggctggtgagctttgggctgtcaaacgcgaaagaattcgacggtcttcggttcatggaaaatcacctggttgggacttgcgttctattattgtcaagagtggtgatgattgccgacaggaacacttggccgtacagcttgttgcacacttctatgatatatatcaagaagctggtttaccactatggctgcggccttatgaagtaattgttacttcagcttatacagcactaattgagaccatccctgatacggcatcaatccattccgtcaaaagtaggtttcccaatatttcaagtctccgagactactatgtagccaagtatgaagagaattctccaaattttaaactcgcacagagaaactttgttgaaagtatggctggatattcaattctgtgctacctacttcaggtgaaagatcgccacaatgggaatcttctaattgatgaggaaggacatattattcatattgattttggtttcatactgtcgaactctcctggaggtgtaaacttcgagagtgcaccatttaagctaacgagggaactccttgaagtgatggattctgatgcagagggaactcccagtgagttctttgattactttaaggtgctatgcattcaaggtttccttacttgccggaagcatgcagaacgtattatacttcttgtggaaatgttgcaggtaacgtactttatctgtgttgcgtaatatatgtcatacaactaatttctaagggcaaatatttgtttaatccaaacgttttttttggctcaacattttgtgatgtatatcagtaaagaattatcgcattagattctttgacaggtcttctatattggccaaaagttccagtttctcaattttcatccaatacgaactcaagttttttcactgtgccttgtaatctgagctactacagtgaagttgttttctttttttctctcaaaaagtgaagttttttccttgtattgaagcatataaattgatttgagttaaccttttttatatggtataaggttacccctgcatgtctgggatgtggtatgctgtttacttataattgtgttgatttagctttttctctgatttggctagtatgcaaattgttacaaattatcttacaagtgttatattgcgttcccttaccaggattctggctttccatgtttcaaaggtggccctcgcacaatacaaaacttgaggaagaggttccacttgagtctaactgaagagcaatgtgtatccctggtgctctcactgatcagtagcagcatggatgcttggcgcactcggcaatatgattactaccagagagtattgaatggaattttatgattttccccacaggagcaacggattcattcagaaaccaattttcttgtatccttggagcaaaccatgggattgcataggtcagttttgggctgatctatgctggcaccccatatcagatttccaggagaggactaggttattgatcactgtgttttcatgtggcattgcacatttgtggtcaactagggaaacagattggtgccgcattgtactttcatgggaccccccctctgaaagagttgagaagtgtacagtcatcggcagtcatctagttagcgctttgtgctaggaggttgtgaccagtggagctctatttggcatattggaatttggaatccggctacattgttgtacagacctttgattgacgtagcttggagaggatgtaggagtgaacagggccatgctttgaagcgaacaagttataggcatatgggagctggggatcatccgagacagatgccgctcgaagtgtcactgtacttgttgtgtggtatccctatagcaccaaagtagatggagatgtgctttgctaaaaaaagataaagacccagtgttggccgctctcatatgtcactaggtctgaaaggaaattggccgctaatttgcgcgaggcctgtccttcagagaggtgctttgctgcatttgtaaattatcattactgtacagggaccatactgtcttagcattctgtttttaagttgttaagattttaattccttctttgtgggtgtcttggtcttcgaagatctaggtgatagcttgtttgactagcactatgatcagtgttcgaaagtacagttccatgtgtcatgaagaaaaacactgcaagatttttaatacatttttgatgtactatgagagcaaatttctatttcgat

SEQ ID NO: 38893 - DNA, 4650 bp, Zea Mays
caccgcccccacctgctccgcgtcctccgatccccacccggccaccaccaccacgcccgagaagaaaaccgtaagaaacggtggaaaaataattgggaaaacaaaatttcaaatcgaagtcttcctacacccagcgacgaaaaggctgcgacaattcgaatcaaaaatccatccgagtcgaatcgagccagcggaaactccgcggccgatctcctgtgctctcaccgcccgcctcccccgattctgcagcccctcgctgcgaatctggacgcgatttcgaggctagggtttgggaggctccggatcgcgagcccgtgcggaggcaagggtttggattcgggggttgctgctgcatgtcgggggtgctggattgagctactccgcgccggcttgtgatggtggtgaccggcggtggaagacgagtagacggcggcggtgagtagggtttgttgactgagttggggtcgagggtgcgccggccatggtgcggcttctcgggctgcggagcctgagcttcggcccggaggactcgccgcgggagatcccctccactgccgacgtggccccgcccgttggcagcagcggctggctcgtgcgcttcttcgactccgccttcttctgcgagtggattgccgtcagctatctctacaagcacgaccatgctggagtgcgcgactacctctgcaaccgcatgtacacgctcccgctgccggggctcgaggcctacctcttccaggtctgctacatgctcgtccacaagcccagcccttccctcgaccgcttcgtcatcgacacctgcgccaagtcgctccgcatcgcgctcaaggtgcactggctcctcgctgcagagcttgagctggaggatgctgacgatctcgacgggatcgataaggtgcaggagcagtgccaggttgcagcgaccgtgcagggcgagtggccaccgcttgtccggccttcacctccatcccctgctgccagtccgcgaggtaaccccatgctcagcagaatacgatcgtccaagcagcggctactgtcccttgcatcgtcaccttcgcttggactgagccccccagcaggtggtggggtcaatgtcgctgaggatgctatgggtactggagggaagcagccagccacaccgtcatcagaggataacaagttactcaagaggctgagcattggtccaaaaatgcgcgatgcactgctcttcagacgatcaggagagaaggatgaagaacaagaccgggatggtttttttaaaaggcttcttagggacagcagagacaaggaggaggaggatggtgacagagaaggatttttcaaaagattacttagcagggagaaggataatgaggaggaagaaagtgatagagatggtttcttccgcagattactcagggatagcaaagaggaggacatggaactgacaccaagctcagatggtttgttgaagcgactttttcgtgataaggaggacaggcaaggtgaggatgatgagaaggaaggattttttcgcaggatgttcaaggataagaacgaggagaggagagatagtagtcatgcaagacatgggaatgaggaaagactgggcaagagtgtggaagatgatgacagagaaggtttcttccgcaaaattttcaaagataagaatgaggagaggaaagatgaagggcatcaaaagccagatgagagggaaaaggttggtgcgaacatagaagatgataagagagatggttttttcaggcaactctttaaggagaaaaacgatgagaaaaaggaaggcagcacaccaagcaagaaagaggaagatgataaaggccataaaaatgcagatgatgataatttctttcgcaggcttttcaaggataagaatgaagaaaagaaagggattgttcatgacaggaatgaagatgacaagtgtgaggaaggtgataaagaaaacttcttccgcaaattatttaaggataaacatgaggagaggagaactgagggacctgataaaaatgatgattatggtaagggaagtagtggtatcgaagaggaagataatccagagtttttgtcattccgtaggttgtttagagtgcacccagaagattctaagagtgggcacatagaaagcagtcaatctaacaatctttctgaggggagcccaggatcagaaagcttttttaagaggctattccgtgatagagaccgctcacttgaagattctgagatttttgggtcaaaaatggcaaaagagaaacaccctggtactacaggaatcaatgagaagcaaagtggaaaaccaccattaccaattaatgcagtagcagagcttcgaaaaggttcttactatgcttcgttggaacttgttcaggctttatgtgatacatcgtatggcctggtagacatatttcctattgaggatcgtaagattgccctccgggagtctcttacagagatcaatagccagattgcttctgctgaaaaaaacggaggagtatgctttccgatgggaaagggcatatatcgagtggttcatatacctgaagacgagtctgttcttctgaattctagggagaaagctccttaccttatatgtgttgaagttttaaaagcagaagctcctagccactctaaaggatcatcagatgggcacaaattatcaaaaggtgggataccattggctaatggagatgtgcaactaccaaaaccacctccatgggcctatcctttgtggagcagacacgaaacacaaaactatgaaacagacagaatgctgaagtctacttctcaggctgcagcattaaaaggagaagctccacctggtcttcctctgaaaggagttgcgcagagcacccaaaatttagatcctaaggctactgatggtggggatccaaaaccaaccgatgctttggctggtgagctttgggctgtcaaacgcgaaagaattcgacggtcttcggttcatggaaaatcacctggttgggacttgcgttctattattgtcaagagtggtgatgattgccgacaggaacacttggccgtacagcttgttgcacacttctatgatatatatcaagaagctggtttaccactatggctgcggccttatgaagtaattgttacttcagcttatacagcactaattgagaccatccctgatacggcatcaatccattccgtcaaaagtaggtttcccaatatttcaagtctccgagactactatgtagccaagtatgaagagaattctccaaattttaaactcgcacagagaaactttgttgaaagtatggctggatattcaattctgtgctacctacttcaggtgaaagatcgccacaatgggaatcttctaattgatgaggaaggacatattattcatattgattttggtttcatactgtcgaactctcctggaggtgtaaacttcgagagtgcaccatttaagctaacgagggaactccttgaagtgatggattctgatgcagagggaactcccagtgagttctttgattactttaaggtgctatgcattcaaggtttccttacttgccggaagcatgcagaacgtattatacttcttgtggaaatgttgcaggattctggctttccatgtttcaaaggtggccctcgcacaatacaaaacttgaggaagaggttccacttgagtctaactgaagagcaatgtgtatccctggtgctctcactgatcagtagcagcatggatgcttggcgcactcggcaatatgattactaccagagagtattgaatggaattttatgattttccccacaggagcaacggattcattcagaaaccaattttcttgtatccttggagcaaaccatgggattgcataggtcagttttgggctgatctatgctggcaccccatatcagatttccaggagaggactaggttattgatcactgtgttttcatgtggcattgcacatttgtggtcaactagggaaacagattggtgccgcattgtactttcatgggaccccccctctgaaagagttgagaagtgtacagtcatcggcagtcatctagttagcgctttgtgctaggaggttgtgaccagtggagctctatttggcatattggaatttggaatccggctacattgttgtacagacctttgattgacgtagcttggagaggatgtaggagtgaacagggccatgctttgaagcgaacaagttataggcatatgggagctggggatcatccgagacagatgccgctcgaagtgtcactgtacttgttgtgtggtatccctatagcaccaaagtagatggagatgtgctttgctaaaaaaagataaagacccagtgttggccgctctcatatgtcactaggtctgaaaggaaattggccgctaatttgcgcgaggcctgtccttcagagaggtgctttgctgcatttgtaaattatcattactgtacagggaccatactgtcttagcattctgtttttaagttgttaagattttaattccttctttgtgggtgtcttggtcttcgaagatctaggtgatagcttgtttgactagcactatgatcagtgttcgaaagtacagttccatgtgtcatgaagaaaaacactgcaagatttttaatacatttttgatgtactatgagagcaaatttctatttcgat

SEQ ID NO: 38894 - DNA, 4948 bp, Zea Mays
caccgcccccacctgctccgcgtcctccgatccccacccggccaccaccaccacgcccgagaagaaaaccgtaagaaacggtggaaaaataattgggaaaacaaaatttcaaatcgaagtcttcctacacccagcgacgaaaaggctgcgacaattcgaatcaaaaatccatccgagtcgaatcgagccagcggaaactccgcggccgatctcctgtgctctcaccgcccgcctcccccgattctgcagcccctcgctgcgaatctggacgcgatttcgaggctagggtttgggaggctccggatcgcgagcccgtgcggaggcaagggtttggattcgggggttgctgctgcatgtcgggggtgctggattgagctactccgcgccggcttgtgatggtggtgaccggcggtggaagacgagtagacggcggcggtgagtagggtttgttgactgagttggggtcgagggtgcgccggccatggtgcggcttctcgggctgcggagcctgagcttcggcccggaggactcgccgcgggagatcccctccactgccgacgtggccccgcccgttggcagcagcggctggctcgtgcgcttcttcgactccgccttcttctgcgagtggattgccgtcagctatctctacaagcacgaccatgctggagtgcgcgactacctctgcaaccgcatgtacacgctcccgctgccggggctcgaggcctacctcttccaggtctgctacatgctcgtccacaagcccagcccttccctcgaccgcttcgtcatcgacacctgcgccaagtcgctccgcatcgcgctcaaggtgcactggctcctcgctgcagagcttgagctggaggatgctgacgatctcgacgggatcgataaggtgcaggagcagtgccaggttgcagcgaccgtgcagggcgagtggccaccgcttgtccggccttcacctccatcccctgctgccagtccgcgaggtaaccccatgctcagcagaatacgatcgtccaagcagcggctactgtcccttgcatcgtcaccttcgcttggactgagccccccagcaggtggtggggtcaatgtcgctgaggatgctatgggtactggagggaagcagccagccacaccgtcatcagaggataacaagttactcaagaggctgagcattggtccaaaaatgcgcgatgcactgctcttcagacgatcaggagagaaggatgaagaacaagaccgggatggtttttttaaaaggcttcttagggacagcagagacaaggaggaggaggatggtgacagagaaggatttttcaaaagattacttagcagggagaaggataatgaggaggaagaaagtgatagagatggtttcttccgcagattactcagggatagcaaagaggaggacatggaactgacaccaagctcagatggtttgttgaagcgactttttcgtgataaggaggacaggcaaggtgaggatgatgagaaggaaggattttttcgcaggatgttcaaggataagaacgaggagaggagagatagtagtcatgcaagacatgggaatgaggaaagactgggcaagagtgtggaagatgatgacagagaaggtttcttccgcaaaattttcaaagataagaatgaggagaggaaagatgaagggcatcaaaagccagatgagagggaaaaggttggtgcgaacatagaagatgataagagagatggttttttcaggcaactctttaaggagaaaaacgatgagaaaaaggaaggcagcacaccaagcaagaaagaggaagatgataaaggccataaaaatgcagatgatgataatttctttcgcaggcttttcaaggataagaatgaagaaaagaaagggattgttcatgacaggaatgaagatgacaagtgtgaggaaggtgataaagaaaacttcttccgcaaattatttaaggataaacatgaggagaggagaactgagggacctgataaaaatgatgattatggtaagggaagtagtggtatcgaagaggaagataatccagagtttttgtcattccgtaggttgtttagagtgcacccagaagattctaagagtgggcacatagaaagcagtcaatctaacaatctttctgaggggagcccaggatcagaaagcttttttaagaggctattccgtgatagagaccgctcacttgaagattctgagatttttgggtcaaaaatggcaaaagagaaacaccctggtactacaggaatcaatgagaagcaaagtggaaaaccaccattaccaattaatgcagtagcagagcttcgaaaaggttcttactatgcttcgttggaacttgttcaggctttatgtgatacatcgtatggcctggtagacatatttcctattgaggatcgtaagattgccctccgggagtctcttacagagatcaatagccagattgcttctgctgaaaaaaacggaggagtatgctttccgatgggaaagggcatatatcgagtggttcatatacctgaagacgagtctgttcttctgaattctagggagaaagctccttaccttatatgtgttgaagttttaaaagcagaagctcctagccactctaaaggatcatcagatgggcacaaattatcaaaaggtgggataccattggctaatggagatgtgcaactaccaaaaccacctccatgggcctatcctttgtggagcagacacgaaacacaaaactatgaaacagacagaatgctgaagtctacttctcaggttattgaccaagcaatggctcaactctgggagactaaagtaaaatttgtaaatgttagtttctctattgagaaacttggtcgctcaaggagcattgtactttctgaaacgggtcgtaggctgcgacatgatgctacggattctcatgatccacctggagattcgcaaacagttgctgatcagcctattgaatgggtgaaggttacgttgtctgcagttccaggagttaacatggaagatgtagatgataatgaaccaacacgaaagaaggaccatcgccgtgttcctagtacaattgccattgaggaagtaaaggctgcagcattaaaaggagaagctccacctggtcttcctctgaaaggagttgcgcagagcacccaaaatttagatcctaaggctactgatggtggggatccaaaaccaaccgatgctttggctggtgagctttgggctgtcaaacgcgaaagaattcgacggtcttcggttcatggaaaatcacctgattattgtcaagagtggtgatgattgccgacaggaacacttggccgtacagcttgttgcacacttctatgatatatatcaagaagctggtttaccactatggctgcggccttatgaagtaattgttacttcagcttatacagcactaattgagaccatccctgatacggcatcaatccattccgtcaaaagtaggtttcccaatatttcaagtctccgagactactatgtagccaagtatgaagagaattctccaaattttaaactcgcacagagaaactttgttgaaagtatggctggatattcaattctgtgctacctacttcaggtgaaagatcgccacaatgggaatcttctaattgatgaggaaggacatattattcatattgattttggtttcatactgtcgaactctcctggaggtgtaaacttcgagagtgcaccatttaagctaacgagggaactccttgaagtgatggattctgatgcagagggaactcccagtgagttctttgattactttaaggtgctatgcattcaaggtttccttacttgccggaagcatgcagaacgtattatacttcttgtggaaatgttgcaggattctggctttccatgtttcaaaggtggccctcgcacaatacaaaacttgaggaagaggttccacttgagtctaactgaagagcaatgtgtatccctggtgctctcactgatcagtagcagcatggatgcttggcgcactcggcaatatgattactaccagagagtattgaatggaattttatgattttccccacaggagcaacggattcattcagaaaccaattttcttgtatccttggagcaaaccatgggattgcataggtcagttttgggctgatctatgctggcaccccatatcagatttccaggagaggactaggttattgatcactgtgttttcatgtggcattgcacatttgtggtcaactagggaaacagattggtgccgcattgtactttcatgggaccccccctctgaaagagttgagaagtgtacagtcatcggcagtcatctagttagcgctttgtgctaggaggttgtgaccagtggagctctatttggcatattggaatttggaatccggctacattgttgtacagacctttgattgacgtagcttggagaggatgtaggagtgaacagggccatgctttgaagcgaacaagttataggcatatgggagctggggatcatccgagacagatgccgctcgaagtgtcactgtacttgttgtgtggtatccctatagcaccaaagtagatggagatgtgctttgctaaaaaaagataaagacccagtgttggccgctctcatatgtcactaggtctgaaaggaaattggccgctaatttgcgcgaggcctgtccttcagagaggtgctttgctgcatttgtaaattatcattactgtacagggaccatactgtcttagcattctgtttttaagttgttaagattttaattccttctttgtgggtgtcttggtcttcgaagatctaggtgatagcttgtttgactagcactatgatcagtgttcgaaagtacagttccatgtgtcatgaagaaaaacactgcaagatttttaatacatttttgatgtactatgagagcaaatttctatttcgat

SEQ ID NO: 38895 - DNA, 4861 bp, Zea Mays
caccgcccccacctgctccgcgtcctccgatccccacccggccaccaccaccacgcccgagaagaaaaccgtaagaaacggtggaaaaataattgggaaaacaaaatttcaaatcgaagtcttcctacacccagcgacgaaaaggctgcgacaattcgaatcaaaaatccatccgagtcgaatcgagccagcggaaactccgcggccgatctcctgtgctctcaccgcccgcctcccccgattctgcagcccctcgctgcgaatctggacgcgatttcgaggctagggtttgggaggctccggatcgcgagcccgtgcggaggcaagggtttggattcgggggttgctgctgcatgtcgggggtgctggattgagctactccgcgccggcttgtgatggtggtgaccggcggtggaagacgagtagacggcggcggtgagtagggtttgttgactgagttggggtcgagggtgcgccggccatggtgcggcttctcgggctgcggagcctgagcttcggcccggaggactcgccgcgggagatcccctccactgccgacgtggccccgcccgttggcagcagcggctggctcgtgcgcttcttcgactccgccttcttctgcgagtggattgccgtcagctatctctacaagcacgaccatgctggagtgcgcgactacctctgcaaccgcatgtacacgctcccgctgccggggctcgaggcctacctcttccaggtctgctacatgctcgtccacaagcccagcccttccctcgaccgcttcgtcatcgacacctgcgccaagtcgctccgcatcgcgctcaaggtgcactggctcctcgctgcagagcttgagctggaggatgctgacgatctcgacgggatcgataaggtgcaggagcagtgccaggttgcagcgaccgtgcagggcgagtggccaccgcttgtccggccttcacctccatcccctgctgccagtccgcgaggtaaccccatgctcagcagaatacgatcgtccaagcagcggctactgtcccttgcatcgtcaccttcgcttggactgagccccccagcaggtggtggggtcaatgtcgctgaggatgctatgggtactggagggaagcagccagccacaccgtcatcagaggataacaagttactcaagaggctgagcattggtccaaaaatgcgcgatgcactgctcttcagacgatcaggagagaaggatgaagaacaagaccgggatggtttttttaaaaggcttcttagggacagcagagacaaggaggaggaggatggtgacagagaaggatttttcaaaagattacttagcagggagaaggataatgaggaggaagaaagtgatagagatggtttcttccgcagattactcagggatagcaaagaggaggacatggaactgacaccaagctcagatggtttgttgaagcgactttttcgtgataaggaggacaggcaaggtgaggatgatgagaaggaaggattttttcgcaggatgttcaaggataagaacgaggagaggagagatagtagtcatgcaagacatgggaatgaggaaagactgggcaagagtgtggaagatgatgacagagaaggtttcttccgcaaaattttcaaagataagaatgaggagaggaaagatgaagggcatcaaaagccagatgagagggaaaaggttggtgcgaacatagaagatgataagagagatggttttttcaggcaactctttaaggagaaaaacgatgagaaaaaggaaggcagcacaccaagcaagaaagaggaagatgataaaggccataaaaatgcagatgatgataatttctttcgcaggcttttcaaggataagaatgaagaaaagaaagggattgttcatgacaggaatgaagatgacaagtgtgaggaaggtgataaagaaaacttcttccgcaaattatttaaggataaacatgaggagaggagaactgagggacctgataaaaatgatgattatggtaagggaagtagtggtatcgaagaggaagataatccagagtttttgtcattccgtaggttgtttagagtgcacccagaagattctaagagtgggcacatagaaagcagtcaatctaacaatctttctgaggggagcccaggatcagaaagcttttttaagaggctattccgtgatagagaccgctcacttgaagattctgagatttttgggtcaaaaatggcaaaagagaaacaccctggtactacaggaatcaatgagaagcaaagtggaaaaccaccattaccaattaatgcagtagcagagcttcgaaaagtctcttacagagatcaatagccagattgcttctgctgaaaaaaacggaggagtatgctttccgatgggaaagggcatatatcgagtggttcatatacctgaagacgagtctgttcttctgaattctagggagaaagctccttaccttatatgtgttgaagttttaaaagcagaagctcctagccactctaaaggatcatcagatgggcacaaattatcaaaaggtgggataccattggctaatggagatgtgcaactaccaaaaccacctccatgggcctatcctttgtggagcagacacgaaacacaaaactatgaaacagacagaatgctgaagtctacttctcaggttattgaccaagcaatggctcaactctgggagactaaagtaaaatttgtaaatgttagtttctctattgagaaacttggtcgctcaaggagcattgtactttctgaaacgggtcgtaggctgcgacatgatgctacggattctcatgatccacctggagattcgcaaacagttgctgatcagcctattgaatgggtgaaggttacgttgtctgcagttccaggagttaacatggaagatgtagatgataatgaaccaacacgaaagaaggaccatcgccgtgttcctagtacaattgccattgaggaagtaaaggctgcagcattaaaaggagaagctccacctggtcttcctctgaaaggagttgcgcagagcacccaaaatttagatcctaaggctactgatggtggggatccaaaaccaaccgatgctttggctggtgagctttgggctgtcaaacgcgaaagaattcgacggtcttcggttcatggaaaatcacctggttgggacttgcgttctattattgtcaagagtggtgatgattgccgacaggaacacttggccgtacagcttgttgcacacttctatgatatatatcaagaagctggtttaccactatggctgcggccttatgaagtaattgttacttcagcttatacagcactaattgagaccatccctgatacggcatcaatccattccgtcaaaagtaggtttcccaatatttcaagtctccgagactactatgtagccaagtatgaagagaattctccaaattttaaactcgcacagagaaactttgttgaaagtatggctggatattcaattctgtgctacctacttcaggtgaaagatcgccacaatgggaatcttctaattgatgaggaaggacatattattcatattgattttggtttcatactgtcgaactctcctggaggtgtaaacttcgagagtgcaccatttaagctaacgagggaactccttgaagtgatggattctgatgcagagggaactcccagtgagttctttgattactttaaggtgctatgcattcaaggtttccttacttgccggaagcatgcagaacgtattatacttcttgtggaaatgttgcaggattctggctttccatgtttcaaaggtggccctcgcacaatacaaaacttgaggaagaggttccacttgagtctaactgaagagcaatgtgtatccctggtgctctcactgatcagtagcagcatggatgcttggcgcactcggcaatatgattactaccagagagtattgaatggaattttatgattttccccacaggagcaacggattcattcagaaaccaattttcttgtatccttggagcaaaccatgggattgcataggtcagttttgggctgatctatgctggcaccccatatcagatttccaggagaggactaggttattgatcactgtgttttcatgtggcattgcacatttgtggtcaactagggaaacagattggtgccgcattgtactttcatgggaccccccctctgaaagagttgagaagtgtacagtcatcggcagtcatctagttagcgctttgtgctaggaggttgtgaccagtggagctctatttggcatattggaatttggaatccggctacattgttgtacagacctttgattgacgtagcttggagaggatgtaggagtgaacagggccatgctttgaagcgaacaagttataggcatatgggagctggggatcatccgagacagatgccgctcgaagtgtcactgtacttgttgtgtggtatccctatagcaccaaagtagatggagatgtgctttgctaaaaaaagataaagacccagtgttggccgctctcatatgtcactaggtctgaaaggaaattggccgctaatttgcgcgaggcctgtccttcagagaggtgctttgctgcatttgtaaattatcattactgtacagggaccatactgtcttagcattctgtttttaagttgttaagattttaattccttctttgtgggtgtcttggtcttcgaagatctaggtgatagcttgtttgactagcactatgatcagtgttcgaaagtacagttccatgtgtcatgaagaaaaacactgcaagatttttaatacatttttgatgtactatgagagcaaatttctatttcgat

SEQ ID NO: 38896 - DNA, 1513 bp, Zea Mays
ctgatcgttgcattgcattgcatccatccagcgctcacagagaaaatggagttggtcgtgctaatcgtcggcgctggcccagccggactggcgacggcggcatgcctgagccagcgctcgatcccgtacctgatcgttgagcgcgaggactgcagcgcgtcgctgtggcgctaccgcacctacgaccgcgtgaagctccacctgtccaaggagttcagctgcctgccgtacatgccgcacgaggaagacaccccgacctacatccccaaggcggagttcctcaagtacttggactgctaccgcgagcatttcggcatcaagcccaggtactgcacttccgtcgtgtcggcagcatacgatgaggggaccggccgctgggtcgtcgccgcacgtgacacggtcgagggcacggagatcaggtacgcggccaggttcctggttgtggccaccggcgagaatggagcggggaggattccggagatccagggcctggagagcttctgcggggaggctatccactcctcgacctacaagtctggaagaagctatgccgggagaagggttctggtggttggtgctggaaattccgggatggagatcgcctatgatcttgcaaaccatggtgccgacacctcgattgttgttcgcagtccgttccacaacctccgactatccatcgcgctcgaagtcggaagatcagggagcacagcaggcaggtcgtgccagctggtacacataatgcccaaggagctgatccgtctcggaatgacatttgtccaatacatgccagttacaatagttgaccttttcttagtgaagctagccgatttcatatttggtgatctatcaaattatggcatcgtacggcctggagttggccccctacaactcaaatccaaaacaggtagatcttctgtaattgatgttgggacagcagggttgattaagaaaggcgtcgtgaaggtgttcaagaggatttcgaagatcactggaaacaaagttcagttcgaatgcgggaaggactgcgaattcgatgccatcgtgtttgcaacaggttacaagagcagtgcgaatctttggctcaagacgacaagtgcatggtgaatagtgacggacgtccaaacacatgtcgtcccaatatttggaaaggagaaaatggcctctatttctctggttttaggaggatgggattggctggtatttgcatggatgcttataatattgccaatgaaatcgtatctgtctactgaagatttcttgcttggccttttaagtctagttaaatctatattaggtcttggttatccggttcattgcatcaataaatcagtagtagtgcatgcattggcttgtatgtcaacacattgtcctaagattgactgtctgtaaacggtgccttttatgcataacaatagctctcagttgtttagagtatttcttggtagctgatgttgagcatgcaatactagaattcggctctttgccaagtgtcaaatgatttgtcgagtgtttt

SEQ ID NO: 38897 - DNA, 677 bp, Zea Mays
atggcggagcagggaaagggaaacaacactcaagcaaaggttacacaagtgagcagtaaagatgggcctgtagaatcactagtattagaggatgaatcacatgttatcgttgagaaggacttggtttctcagggagaagaggaggacattgaggctcttcttggcaattatgttatggccattggtgaagcagaggctttttccgaaaggatgaagcgcgagcttgtagcgctagaatctgcaaatgtttatgccttgttggaaactgaatctgttgtagaagaggtattgcagggtctcgaaatagccagtatatgtgttgaagatatggatgaatggctagggattttcaatataaagctcaggcatatgagggaggatatacaatctgtatgcttactttcacctttactgatgtatatgggcaaatcatgtttccttagagttgttgtgattaaaattattttctcttttaatgcccgatacatttaaaaccaaactatatggatgtctgatgaggcccaataagagcttaacgaaataatatttgaattgtttgtcacatgcttacaacttatagttatagtgcatcttggctgttgaaatttacacttagtgttgtctctagttctctactgaagacattagggacaatttcctaccatattcatattaat

SEQ ID NO: 38898 - DNA, 750 bp, Zea Mays
ctttgttgcataataaagttgaggatacgttctctgaaaaaagagatgaataagccctgctgcatcatgatcatagctgcaggttcctgcctagaagaacactcaagcaaaggttacacaagtgagcagtaaagatgggcctgtagaatcactagtattagaggatgaatcacatgttatcgttgagaaggacttggtttctcagggagaagaggaggacattgaggctcttcttggcaattatgttatggccattggtgaagcagaggctttttccgaaaggatgaagcgcgagcttgtagcgctagaatctgcaaatgtttatgccttgttggaaactgaatctgttgtagaagaggtattgcagggtctcgaaatagccagtatatgtgttgaagatatggatgaatggctagggattttcaatataaagctcaggcatatgagggaggatatacaatctgtatgcttactttcacctttactgatgtatatgggcaaatcatgtttccttagagttgttgtgattaaaattattttctcttttaatgcccgatacatttaaaaccaaactatatggatgtctgatgaggcccaataagagcttaacgaaataatatttgaattgtttgtcacatgcttacaacttatagttatagtgcatcttggctgttgaaatttacacttagtgttgtctctagttctctactgaagacattagggacaatttcctaccatattcatattaat

SEQ ID NO: 38899 - DNA, 962 bp, Zea Mays
gccagggaaaaacgtgcagaatttgtacttcttaagtgcaccttcgttcggagggcatcagaatttttaaggaattactttcctagtttgattgattctatgctaaatgacaaaggaaacttctctcagcgaggtcatctgcagaggcctgatcacactgatatgaggtacaaatttaggacttatgcacgacttttacaacacatcaagagtttggacaagagttgtatgatgcctttgcggaaagcttactgccattcgctgaacatgataattcgacgtgagtctcgtgacttttctaatgaactccgtaatagttcaaaagcatcaaagagcagcacaccattgtttgagggtcctgcaggtgcaaaccagcctgcaagtattacagatagtcctgcagatgcatactccaagatgattactgttttcgttccacttcttgttgatgaggaggacttttatgctttggttgactgggcattcaagctagatccattgagttgcatatcaatgcatggactaacagatcggtatctttctggtcagaaagcagaggtctccggatatgtacaagtgttgcttgatgacttggagacaagaataacaattttattcagcaggtgcagtttgttgatgatgcctgctaccagattgagaaatatgagcgtaatgtgcgtcaaattggagttgtgccctatattcccaggttctcacaacttgcagcacgtatggagcagtatatcaatggatccagggatctagttgaccaggcatatactaaaattgttaccattatgtttgtcattctggagaaaattgctcaagtggaacctaaatatgttgatattgtacttttggaaaactatgcagctttccagcacaggtacaactaaaaccatcggagcaagatcaaccaaggcctggtagggatgtctcgggttttacctccccatcatcat

SEQ ID NO: 38900 - DNA, 2142 bp, Zea Mays
  misc_feature (1091)..(1095): n is a, c, g, or t
gccagggaaaaacgtgcagaatttgtacttcttaagtgcaccttcgttcggagggcatcagaatttttaaggaattactttcctagtttgattgattctatgctaaatgacaaaggaaacttctctcagcgaggtcatctgcagaggcctgatcacactgatatgaggtacaaatttaggacttatgcacgacttttacaacacatcaagagtttggacaagagttgtatgatgcctttgcggaaagcttactgccattcgctgaacatgataattcgacgtgagtctcgtgacttttctaatgaactccgtaatagttcaaaagcatcaaagagcagcacaccattgtttgagggtcctgcaggtgcaaaccagcctgcaagtattacagatagtcctgcagatgcatactccaagatgattactgttttcgttccacttcttgttgatgagttgcattagaagcttctgcaagcattggcaaaacaagtaacaatccagccgagatgggagcgctaaatgaatgcattcaggagttgcttgatggtattcaggaggacttttatgctttggttgactgggcattcaagctagatccattgagttgcatatcaatgcatggactaacagatcggtatctttctggtcagaaagcagaggtctccggatatgtacaagtgttgcttgatgacttggagacaagaataacaattttattcagcaggtttgttgatgatgcctgctaccagattgagaaatatgagcgtaatgtgcgtcaaattggagttgtgccctatattcccaggttctcacaacttgcagcacgtatggagcagtatatcaatggatccagggatctagttgaccaggcatatactaaaattgttaccattatgtttgtcattctggagaaaattgctcaagtggaacctaaatatgttgatattgtacttttggaaaactatgcagctttccagcacagcttgtatgatttagcaaatgttgtgccaacacttgctaaatattattcatcaagctagtgaagcctatgaacaagctttgctcacgccatatcaatttggtcataatannnnnaaaagaaaagctattccaattcgctcggaaaattgaggaattaatgtacaacatgagccctgaggagatacccttccaagttggaatgtcaaaggtagattttcgcaagatgttgaagtctagcttaactggacttgacaagacaatcaatgcaatgtatagaaaactacagaagaatatgactgccgaggaattgctgccttcgctatgggaaaaatgcaagaaagagtttcttgataaatacgcaacattcctcaagttgatttcgaaaatatatcctgacgagaaggtgatatctgtgaacgaaatgagagatactctagcttcactgtagctatttcgttagaaggttcgcatgtccgttggtttgcttgcgcatataagttgacctgattcagcatcatcttaggttcttgatcctcactgaaccaactatctgatatgtgatcccttaccaattatctgattcatggtctgttgtggaacctttaagggcttgttcaatccatgtggattgggtgggattgagtgacaatctcacccaatccacgtgggataggaataaccaaacaatgcctaaataaattctggatgacatggatgttaaacaatttgtttatttctgtttttactagcaataatgtgcattagtcaagcttaaatatggtccattaccttcatggattggtggtgatggcacgagagggccttaattccattaccttcctcggtgtctggactatgtggaaacgtaggaattgttgtgtttttgataggatgtggctggacatgaactagagctttggaggttggctggtgcttggagtctctctctcctcatcggttctataccgggttgcggaatctttagttggtagttgccctgttgttttagttatgaatccttttgttattgtgtatgcttgcttcttgtaacggtcataatagaccgaaacttccttctacttaatttaatgatacatagtttttctacacgtccgagagaaaaaatataaaacatggtgacataggcaaagacgacacata

SEQ ID NO: 38901 - DNA, 2213 bp, Zea Mays
  misc_feature (1162)..(1166): n is a, c, g, or t
gccagggaaaaacgtgcagaatttgtacttcttaagtgcaccttcgttcggagggcatcagaatttttaaggaattactttcctagtttgattgattctatgctaaatgacaaaggaaacttctctcagcgaggtcatctgcagaggcctgatcacactgatatgaggtacaaatttaggacttatgcacgacttttacaacacatcaagagtttggacaagagttgtatgatgcctttgcggaaagcttactgccattcgctgaacatgataattcgacgtgagttcaaaagcatcaaagagcagcacaccattgtttgagggtcctgcaggtgcaaaccagcctgcaagtattacagatagtcctgcagatgcatactccaagatgattactgttttcgttccacttcttgttgatgagagtgcattccttgcacattttatgtgctttgaagtttctgcacttcctcaatctgatgcttcaagtagcaatcctaatgctgaatcaactattacttcttcagttgcattagaagcttctgcaagcattggcaaaacaagtaacaatccagccgagatgggagcgctaaatgaatgcattcaggagttgcttgatggtattcaggaggacttttatgctttggttgactgggcattcaagctagatccattgagttgcatatcaatgcatggactaacagatcggtatctttctggtcagaaagcagaggtctccggatatgtacaagtgttgcttgatgacttggagacaagaataacaattttattcagcaggtttgttgatgatgcctgctaccagattgagaaatatgagcgtaatgtgcgtcaaattggagttgtgccctatattcccaggttctcacaacttgcagcacgtatggagcagtatatcaatggatccagggatctagttgaccaggcatatactaaaattgttaccattatgtttgtcattctggagaaaattgctcaagtggaacctaaatatgttgatattgtacttttggaaaactatgcagctttccagcacagcttgtatgatttagcaaatgttgtgccaacacttgctaaatattattcatcaagctagtgaagcctatgaacaagctttgctcacgccatatcaatttggtcataatannnnnaaaagaaaagctattccaattcgctcggaaaattgaggaattaatgtacaacatgagccctgaggagatacccttccaagttggaatgtcaaaggtagattttcgcaagatgttgaagtctagcttaactggacttgacaagacaatcaatgcaatgtatagaaaactacagaagaatatgactgccgaggaattgctgccttcgctatgggaaaaatgcaagaaagagtttcttgataaatacgcaacattcctcaagttgatttcgaaaatatatcctgacgagaaggtgatatctgtgaacgaaatgagagatactctagcttcactgtagctatttcgttagaaggttcgcatgtccgttggtttgcttgcgcatataagttgacctgattcagcatcatcttaggttcttgatcctcactgaaccaactatctgatatgtgatcccttaccaattatctgattcatggtctgttgtggaacctttaagggcttgttcaatccatgtggattgggtgggattgagtgacaatctcacccaatccacgtgggataggaataaccaaacaatgcctaaataaattctggatgacatggatgttaaacaatttgtttatttctgtttttactagcaataatgtgcattagtcaagcttaaatatggtccattaccttcatggattggtggtgatggcacgagagggccttaattccattaccttcctcggtgtctggactatgtggaaacgtaggaattgttgtgtttttgataggatgtggctggacatgaactagagctttggaggttggctggtgcttggagtctctctctcctcatcggttctataccgggttgcggaatctttagttggtagttgccctgttgttttagttatgaatccttttgttattgtgtatgcttgcttcttgtaacggtcataatagaccgaaacttccttctacttaatttaatgatacatagtttttctacacgtccgagagaaaaaatataaaacatggtgacataggcaaagacgacacata

SEQ ID NO: 38902 - DNA, 2046 bp, Zea Mays
  misc_feature (995)..(999): n is a, c, g, or t
gccagggaaaaacgtgcagaatttgtacttcttaagtgcaccttcgttcggagggcatcagaatttttaaggaattactttcctagtttgattgattctatgctaaatgacaaaggaaacttctctcagcgaggtcatctgcagaggcctgatcacactgatatgaggtacaaatttaggacttatgcacgacttttacaacacatcaagagtttggacaagagttgtatgatgcctttgcggaaagcttactgccattcgctgaacatgataattcgacgtgagtctcgtgacttttctaatgaactccgtaatagttcaaaagcatcaaagagcagcacaccattgtttgagggtcctgcaggtgcaaaccagcctgcaagtattacagatagtcctgcagatgcatactccaagatgattactgttttcgttccacttcttgttgatgaggaggacttttatgctttggttgactgggcattcaagctagatccattgagttgcatatcaatgcatggactaacagatcggtatctttctggtcagaaagcagaggtctccggatatgtacaagtgttgcttgatgacttggagacaagaataacaattttattcagcaggtgcagtttgttgatgatgcctgctaccagattgagaaatatgagcgtaatgtgcgtcaaattggagttgtgccctatattcccaggttctcacaacttgcagcacgtatggagcagtatatcaatggatccagggatctagttgaccaggcatatactaaaattgttaccattatgtttgtcattctggagaaaattgctcaagtggaacctaaatatgttgatattgtacttttggaaaactatgcagctttccagcacagcttgtatgatttagcaaatgttgtgccaacacttgctaaatattattcatcaagctagtgaagcctatgaacaagctttgctcacgccatatcaatttggtcataatannnnnaaaagaaaagctattccaattcgctcggaaaattgaggaattaatgtacaacatgagccctgaggagatacccttccaagttggaatgtcaaaggtagattttcgcaagatgttgaagtctagcttaactggacttgacaagacaatcaatgcaatgtatagaaaactacagaagaatatgactgccgaggaattgctgccttcgctatgggaaaaatgcaagaaagagtttcttgataaatacgcaacattcctcaagttgatttcgaaaatatatcctgacgagaaggtgatatctgtgaacgaaatgagagatactctagcttcactgtagctatttcgttagaaggttcgcatgtccgttggtttgcttgcgcatataagttgacctgattcagcatcatcttaggttcttgatcctcactgaaccaactatctgatatgtgatcccttaccaattatctgattcatggtctgttgtggaacctttaagggcttgttcaatccatgtggattgggtgggattgagtgacaatctcacccaatccacgtgggataggaataaccaaacaatgcctaaataaattctggatgacatggatgttaaacaatttgtttatttctgtttttactagcaataatgtgcattagtcaagcttaaatatggtccattaccttcatggattggtggtgatggcacgagagggccttaattccattaccttcctcggtgtctggactatgtggaaacgtaggaattgttgtgtttttgataggatgtggctggacatgaactagagctttggaggttggctggtgcttggagtctctctctcctcatcggttctataccgggttgcggaatctttagttggtagttgccctgttgttttagttatgaatccttttgttattgtgtatgcttgcttcttgtaacggtcataatagaccgaaacttccttctacttaatttaatgatacatagtttttctacacgtccgagagaaaaaatataaaacatggtgacataggcaaagacgacacata

SEQ ID NO: 38903 - DNA, 1974 bp, Zea Mays
  misc_feature (923)..(927): n is a, c, g, or t
gccagggaaaaacgtgcagaatttgtacttcttaagtgcaccttcgttcggagggcatcagaatttttaaggaattactttcctagtttgattgattctatgctaaatgacaaaggaaacttctctcagcgaggtcatctgcagaggcctgatcacactgatatgaggtacaaatttaggacttatgcacgacttttacaacacatcaagagtttggacaagagttgtatgatgcctttgcggaaagcttactgccattcgctgaacatgataattcgacgtgagttgcattagaagcttctgcaagcattggcaaaacaagtaacaatccagccgagatgggagcgctaaatgaatgcattcaggagttgcttgatggtattcaggaggacttttatgctttggttgactgggcattcaagctagatccattgagttgcatatcaatgcatggactaacagatcggtatctttctggtcagaaagcagaggtctccggatatgtacaagtgttgcttgatgacttggagacaagaataacaattttattcagcaggtttgttgatgatgcctgctaccagattgagaaatatgagcgtaatgtgcgtcaaattggagttgtgccctatattcccaggttctcacaacttgcagcacgtatggagcagtatatcaatggatccagggatctagttgaccaggcatatactaaaattgttaccattatgtttgtcattctggagaaaattgctcaagtggaacctaaatatgttgatattgtacttttggaaaactatgcagctttccagcacagcttgtatgatttagcaaatgttgtgccaacacttgctaaatattattcatcaagctagtgaagcctatgaacaagctttgctcacgccatatcaatttggtcataatannnnnaaaagaaaagctattccaattcgctcggaaaattgaggaattaatgtacaacatgagccctgaggagatacccttccaagttggaatgtcaaaggtagattttcgcaagatgttgaagtctagcttaactggacttgacaagacaatcaatgcaatgtatagaaaactacagaagaatatgactgccgaggaattgctgccttcgctatgggaaaaatgcaagaaagagtttcttgataaatacgcaacattcctcaagttgatttcgaaaatatatcctgacgagaaggtgatatctgtgaacgaaatgagagatactctagcttcactgtagctatttcgttagaaggttcgcatgtccgttggtttgcttgcgcatataagttgacctgattcagcatcatcttaggttcttgatcctcactgaaccaactatctgatatgtgatcccttaccaattatctgattcatggtctgttgtggaacctttaagggcttgttcaatccatgtggattgggtgggattgagtgacaatctcacccaatccacgtgggataggaataaccaaacaatgcctaaataaattctggatgacatggatgttaaacaatttgtttatttctgtttttactagcaataatgtgcattagtcaagcttaaatatggtccattaccttcatggattggtggtgatggcacgagagggccttaattccattaccttcctcggtgtctggactatgtggaaacgtaggaattgttgtgtttttgataggatgtggctggacatgaactagagctttggaggttggctggtgcttggagtctctctctcctcatcggttctataccgggttgcggaatctttagttggtagttgccctgttgttttagttatgaatccttttgttattgtgtatgcttgcttcttgtaacggtcataatagaccgaaacttccttctacttaatttaatgatacatagtttttctacacgtccgagagaaaaaatataaaacatggtgacataggcaaagacgacacata

SEQ ID NO: 38904 - DNA, 2250 bp, Zea Mays
  misc_feature (1199)..(1203): n is a, c, g, or t
gccagggaaaaacgtgcagaatttgtacttcttaagtgcaccttcgttcggagggcatcagaatttttaaggaattactttcctagtttgattgattctatgctaaatgacaaaggaaacttctctcagcgaggtcatctgcagaggcctgatcacactgatatgaggtacaaatttaggacttatgcacgacttttacaacacatcaagagtttggacaagagttgtatgatgcctttgcggaaagcttactgccattcgctgaacatgataattcgacgtgagtctcgtgacttttctaatgaactccgtaatagttcaaaagcatcaaagagcagcacaccattgtttgagggtcctgcaggtgcaaaccagcctgcaagtattacagatagtcctgcagatgcatactccaagatgattactgttttcgttccacttcttgttgatgagagtgcattccttgcacattttatgtgctttgaagtttctgcacttcctcaatctgatgcttcaagtagcaatcctaatgctgaatcaactattacttcttcagttgcattagaagcttctgcaagcattggcaaaacaagtaatgtaacaatccagccgagatgggagcgctaaatgaatgcattcaggagttgcttgatggtattcaggaggacttttatgctttggttgactgggcattcaagctagatccattgagttgcatatcaatgcatggactaacagatcggtatctttctggtcagaaagcagaggtctccggatatgtacaagtgttgcttgatgacttggagacaagaataacaattttattcagcaggtttgttgatgatgcctgctaccagattgagaaatatgagcgtaatgtgcgtcaaattggagttgtgccctatattcccaggttctcacaacttgcagcacgtatggagcagtatatcaatggatccagggatctagttgaccaggcatatactaaaattgttaccattatgtttgtcattctggagaaaattgctcaagtggaacctaaatatgttgatattgtacttttggaaaactatgcagctttccagcacagcttgtatgatttagcaaatgttgtgccaacacttgctaaatattattcatcaagctagtgaagcctatgaacaagctttgctcacgccatatcaatttggtcataatannnnnaaaagaaaagctattccaattcgctcggaaaattgaggaattaatgtacaacatgagccctgaggagatacccttccaagttggaatgtcaaaggtagattttcgcaagatgttgaagtctagcttaactggacttgacaagacaatcaatgcaatgtatagaaaactacagaagaatatgactgccgaggaattgctgccttcgctatgggaaaaatgcaagaaagagtttcttgataaatacgcaacattcctcaagttgatttcgaaaatatatcctgacgagaaggtgatatctgtgaacgaaatgagagatactctagcttcactgtagctatttcgttagaaggttcgcatgtccgttggtttgcttgcgcatataagttgacctgattcagcatcatcttaggttcttgatcctcactgaaccaactatctgatatgtgatcccttaccaattatctgattcatggtctgttgtggaacctttaagggcttgttcaatccatgtggattgggtgggattgagtgacaatctcacccaatccacgtgggataggaataaccaaacaatgcctaaataaattctggatgacatggatgttaaacaatttgtttatttctgtttttactagcaataatgtgcattagtcaagcttaaatatggtccattaccttcatggattggtggtgatggcacgagagggccttaattccattaccttcctcggtgtctggactatgtggaaacgtaggaattgttgtgtttttgataggatgtggctggacatgaactagagctttggaggttggctggtgcttggagtctctctctcctcatcggttctataccgggttgcggaatctttagttggtagttgccctgttgttttagttatgaatccttttgttattgtgtatgcttgcttcttgtaacggtcataatagaccgaaacttccttctacttaatttaatgatacatagtttttctacacgtccgagagaaaaaatataaaacatggtgacataggcaaagacgacacata

SEQ ID NO: 38905 - DNA, 2245 bp, Zea Mays
  misc_feature (1194)..(1198): n is a, c, g, or t
gccagggaaaaacgtgcagaatttgtacttcttaagtgcaccttcgttcggagggcatcagaatttttaaggaattactttcctagtttgattgattctatgctaaatgacaaaggaaacttctctcagcgaggtcatctgcagaggcctgatcacactgatatgaggtacaaatttaggacttatgcacgacttttacaacacatcaagagtttggacaagagttgtatgatgcctttgcggaaagcttactgccattcgctgaacatgataattcgacgtgagtctcgtgacttttctaatgaactccgtaatagttcaaaagcatcaaagagcagcacaccattgtttgagggtcctgcaggtgcaaaccagcctgcaagtattacagatagtcctgcagatgcatactccaagatgattactgttttcgttccacttcttgttgatgagagtgcattccttgcacattttatgtgctttgaagtttctgcacttcctcaatctgatgcttcaagtagcaatcctaatgctgaatcaactattacttcttcagttgcattagaagcttctgcaagcattggcaaaacaagtaacaatccagccgagatgggagcgctaaatgaatgcattcaggagttgcttgatggtattcaggaggacttttatgctttggttgactgggcattcaagctagatccattgagttgcatatcaatgcatggactaacagatcggtatctttctggtcagaaagcagaggtctccggatatgtacaagtgttgcttgatgacttggagacaagaataacaattttattcagcaggtttgttgatgatgcctgctaccagattgagaaatatgagcgtaatgtgcgtcaaattggagttgtgccctatattcccaggttctcacaacttgcagcacgtatggagcagtatatcaatggatccagggatctagttgaccaggcatatactaaaattgttaccattatgtttgtcattctggagaaaattgctcaagtggaacctaaatatgttgatattgtacttttggaaaactatgcagctttccagcacagcttgtatgatttagcaaatgttgtgccaacacttgctaaatattattcatcaagctagtgaagcctatgaacaagctttgctcacgccatatcaatttggtcataatannnnnaaaagaaaagctattccaattcgctcggaaaattgaggaattaatgtacaacatgagccctgaggagatacccttccaagttggaatgtcaaaggtagattttcgcaagatgttgaagtctagcttaactggacttgacaagacaatcaatgcaatgtatagaaaactacagaagaatatgactgccgaggaattgctgccttcgctatgggaaaaatgcaagaaagagtttcttgataaatacgcaacattcctcaagttgatttcgaaaatatatcctgacgagaaggtgatatctgtgaacgaaatgagagatactctagcttcactgtagctatttcgttagaaggttcgcatgtccgttggtttgcttgcgcatataagttgacctgattcagcatcatcttaggttcttgatcctcactgaaccaactatctgatatgtgatcccttaccaattatctgattcatggtctgttgtggaacctttaagggcttgttcaatccatgtggattgggtgggattgagtgacaatctcacccaatccacgtgggataggaataaccaaacaatgcctaaataaattctggatgacatggatgttaaacaatttgtttatttctgtttttactagcaataatgtgcattagtcaagcttaaatatggtccattaccttcatggattggtggtgatggcacgagagggccttaattccattaccttcctcggtgtctggactatgtggaaacgtaggaattgttgtgtttttgataggatgtggctggacatgaactagagctttggaggttggctggtgcttggagtctctctctcctcatcggttctataccgggttgcggaatctttagttggtagttgccctgttgttttagttatgaatccttttgttattgtgtatgcttgcttcttgtaacggtcataatagaccgaaacttccttctacttaatttaatgatacatagtttttctacacgtccgagagaaaaaatataaaacatggtgacataggcaaagacgacacata

SEQ ID NO: 38906 - DNA, 2077 bp, Zea Mays
  misc_feature (1026)..(1030): n is a, c, g, or t
gccagggaaaaacgtgcagaatttgtacttcttaagtgcaccttcgttcggagggcatcagaatttttaaggaattactttcctagtttgattgattctatgctaaatgacaaaggaaacttctctcagcgaggtcatctgcagaggcctgatcacactgatatgaggtacaaatttaggacttatgcacgacttttacaacacatcaagagtttggacaagagttgtatgatgcctttgcggaaagcttactgccattcgctgaacatgataattcgacgtgagagtgcattccttgcacattttatgtgctttgaagtttctgcacttcctcaatctgatgcttcaagtagcaatcctaatgctgaatcaactattacttcttcagttgcattagaagcttctgcaagcattggcaaaacaagtaacaatccagccgagatgggagcgctaaatgaatgcattcaggagttgcttgatggtattcaggaggacttttatgctttggttgactgggcattcaagctagatccattgagttgcatatcaatgcatggactaacagatcggtatctttctggtcagaaagcagaggtctccggatatgtacaagtgttgcttgatgacttggagacaagaataacaattttattcagcaggtttgttgatgatgcctgctaccagattgagaaatatgagcgtaatgtgcgtcaaattggagttgtgccctatattcccaggttctcacaacttgcagcacgtatggagcagtatatcaatggatccagggatctagttgaccaggcatatactaaaattgttaccattatgtttgtcattctggagaaaattgctcaagtggaacctaaatatgttgatattgtacttttggaaaactatgcagctttccagcacagcttgtatgatttagcaaatgttgtgccaacacttgctaaatattattcatcaagctagtgaagcctatgaacaagctttgctcacgccatatcaatttggtcataatannnnnaaaagaaaagctattccaattcgctcggaaaattgaggaattaatgtacaacatgagccctgaggagatacccttccaagttggaatgtcaaaggtagattttcgcaagatgttgaagtctagcttaactggacttgacaagacaatcaatgcaatgtatagaaaactacagaagaatatgactgccgaggaattgctgccttcgctatgggaaaaatgcaagaaagagtttcttgataaatacgcaacattcctcaagttgatttcgaaaatatatcctgacgagaaggtgatatctgtgaacgaaatgagagatactctagcttcactgtagctatttcgttagaaggttcgcatgtccgttggtttgcttgcgcatataagttgacctgattcagcatcatcttaggttcttgatcctcactgaaccaactatctgatatgtgatcccttaccaattatctgattcatggtctgttgtggaacctttaagggcttgttcaatccatgtggattgggtgggattgagtgacaatctcacccaatccacgtgggataggaataaccaaacaatgcctaaataaattctggatgacatggatgttaaacaatttgtttatttctgtttttactagcaataatgtgcattagtcaagcttaaatatggtccattaccttcatggattggtggtgatggcacgagagggccttaattccattaccttcctcggtgtctggactatgtggaaacgtaggaattgttgtgtttttgataggatgtggctggacatgaactagagctttggaggttggctggtgcttggagtctctctctcctcatcggttctataccgggttgcggaatctttagttggtagttgccctgttgttttagttatgaatccttttgttattgtgtatgcttgcttcttgtaacggtcataatagaccgaaacttccttctacttaatttaatgatacatagtttttctacacgtccgagagaaaaaatataaaacatggtgacataggcaaagacgacacata

SEQ ID NO: 38907 - DNA, 1131 bp, Zea Mays
caagaatccaagtctgatccacaagagcttcaagaataatacgcttgttggctctgcgattgctttgctatgctaaatacccttccaagttggaatgtcaaaggtagattttcgcaagatgttgaagtctagcttaactggacttgacaagacaatcaatgcaatgtatagaaaactacagaagaatatgactgccgaggaattgctgccttcgctatgggaaaaatgcaagaaagagtttcttgataaatacgcaacattcctcaagttgatttcgaaaatatatcctgacgagaaggtgatatctgtgaacgaaatgagagatactctagcttcactgtagctatttcgttagaaggtaactttctgctctctgatttgtactgctttgccctgctacttgttttaatgcattgttcgttgcttgtgccaggttcgcatgtccgttggtttgcttgcgcatataagttgacctgattcagcatcatcttaggttcttgatcctcactgaaccaactatctgatatgtgatcccttaccaattatctgattcatggtctgttgtggaacctttaagggcttgttcaatccatgtggattgggtgggattgagtgacaatctcacccaatccacgtgggataggaataaccaaacaatgcctaaataaattctggatgacatggatgttaaacaatttgtttatttctgtttttactagcaataatgtgcattagtcaagcttaaatatggtccattaccttcatggattggtggtgatggcacgagagggccttaattccattaccttcctcggtgtctggactatgtggaaacgtaggaattgttgtgtttttgataggatgtggctggacatgaactagagctttggaggttggctggtgcttggagtctctctctcctcatcggttctataccgggttgcggaatctttagttggtagttgccctgttgttttagttatgaatccttttgttattgtgtatgcttgcttcttgtaacggtcataatagaccgaaacttccttctacttaatttaatgatacatagtttttctacacgtccgagagaaaaaatataaaacatggtgacataggcaaagacgacacata

SEQ ID NO: 38908 - DNA, 1285 bp, Zea Mays
aaatacatttcgaaataaataaaaaaagaaaatccttcctaaccctaaggcccactaagggtccatctacctaaccctagcagctgcgcgctccttagcttctctcccagccgccgccgcctctacctcttcctacgcttccttctctccaccgcggtcccgcaccacgggcacgcgccgtcgcctcgcccccacggcctacgccgccgccgcggcagctgcggctgaggccccgctccccatgacgccccgtccgaccattcattcgttcaccggccagcgtcagccagccaggcgtctaactccaacacgtgttgccaaatgccaacactccagtctccaggttgaagcgcccagggtgcagccgaagctgagcgagcccttcttggggttcacccagaccgcagagatttggaactccaggcttgcatgatcggcctcatcggcaccttcattgtggagtgctgaacaaggggattcttcagatgattggggtggaggtgggcaagggtctggaccttcctctttgaagggtgaccaaatagtgacattatcgtttgctggtgtattatgctggccgaaaaacatgagggtttcacttgctttttgacttggtggctacatatgcatgttcatcatgcatgtccttggatatccggatgttacaacatcaactatgttaatgacttggtggctggccgtttgacagggttaatttgtgaacaaaaacgtgtgccttgtgaaacagagaaagataattgatgccaccgtgaaattagtactggtttataagataagatcaatgcaaaaatgggagaaggtggtcttctccgctgcgctcctgaaatatttgagcagtctggagtggctagtttgttttcagacattggagtttctcctcattcaacatcaattctcatgagtacccttaatgctttgctgatactcccttgtataactgccgcaatgctgctgatggatgtctgcgggagaagataaaacatgagacaccatgaaaattagtgatgtagttgtgggcttttgaacaatagctggagtgatataaaatattagtgatgtagttgtgggcttttgaactgcttcaagctggagtgatgtcgctgtggtgcttttgtgactgatcatctctggagcttttgtgaatgatctagctaacaatctgtaaatgatctaattgtgaatgatattataattgtgatgcttttgtgaatatataattgtggtgcttttgtgtttgtgtgatagatctatgactgtggtatac

SEQ ID NO: 38909 - DNA, 1041 bp, Zea Mays
aaatacatttcgaaataaataaaaaaagaaaatccttcctaaccctaaggcccactaagggtccatctacctaaccctagcagctgcgcgctccttagcttctctcccagccgccgccgcctctacctcttcctacgcttccttctctccaccgcggtcccgcaccacgggcacgcgccgtcgcctcgcccccacggcctacgccgccgccgcggcagctgcggctgaggccccgctccccatgacgccccgtccgaccattcattcgttcaccggccagcgtcagccagccaggcgtctaactccaacacgtgttgccaaatgccaacactccagtctccaggttgaagcgcccagggtgcagccgaagctgagcgagcccttcttggggttcacccagaccgcagagatttggaactccaggcttgcatgatcggcctcatcggcaccttcattgtggagctgggttaatttgtgaacaaaaacgtgtgccttgtgaaacagagaaagataattgatgccaccgtgaaattagtactggtttataagataagatcaatgcaaaaatgggagaaggtggtcttctccgctgcgctcctgaaatatttgagcagtctggagtggctagtttgttttcagacattggagtttctcctcattcaacatcaattctcatgagtacccttaatgctttgctgatactcccttgtataactgccgcaatgctgctgatggatgtctgcgggagaagataaaacatgagacaccatgaaaattagtgatgtagttgtgggcttttgaacaatagctggagtgatataaaatattagtgatgtagttgtgggcttttgaactgcttcaagctggagtgatgtcgctgtggtgcttttgtgactgatcatctctggagcttttgtgaatgatctagctaacaatctgtaaatgatctaattgtgaatgatattataattgtgatgcttttgtgaatatataattgtggtgcttttgtgtttgtgtgatagatctatgactgtggtatac

SEQ ID NO: 38910 - DNA, 2453 bp, Zea Mays
tcaccaaaccgctcctaatccccaccatcatcacgtgcaattaatcaaccctctccaaccaatccgcgttggaattacaagaaagtcccttgcttcccttcccccctcgtctccgttcatggtgctggtggccgtcgaccggcaactccggcgcgggggcctctaatggcgcagtacaggcagcagtacggcgtcggcttttccgactcccgcggccaccatcaccaggtgctcccggactggcaccggccccaccacgcctccgccaagtcctcctcacggatccgccgccccgggaagcctgcgccgcgccgccgctcgccggctgctgctgccgccgtcgccgccgctctactcctcgccgccgtcttcctcctttcgcgccgcatctcgcgcagccccgcagagatcagccaagattcgagcgctagggagacgttgccggactggaaccagagcaagagctggaaggagctcaagttcgggcacggcggaggtggccgcagcgcgcgggactccaggtactgggaccgggacgataggcgccgcgacgaggactacacagaggacgaaaaggagaagatctcgggtggaagtgggacctccggcgatgctggcggcagcagcgataaaggtaccacctctgagggaggtggggaggataaaggtttgactaccggcagcgatgctaaggatgttccagaggtgtctgaaggtgggaaaggtgggaccttgtacaatgagggtggcaggaaggagctggagcagtacgaggctgcagccatgggagccacaggaacaggggtgaaggaggttgatccagatgatgagtatgacgatggcatcgatacacaggatgaaatggaggatgctcacctgcattcatctgatggtgggaggaagcttggtggtggcagccatgagggtgctgagaagaaggacgaggtcgctactgagaggcacacagaagcaggtggagggattgcgggtagtcatgatattagcagcccagacaaaaagaaggtttcaggtactggagacaagaagcatgggcccaagaagaaaccgaaacgcaagaagtctggttcaatttgtcaaatgaagtttcttaactcaactgctcagcttgtggagcctgtgaggaatgagaaatttgctagttttaagttggagtatgtagaagttgaagaaagacctattggatcagaattttgggaaccgagatttgccggccaccaaagcctgcaagaaagagaggagtcatacaaagcccatgaccaacagttgacatgcgcttttgttaagggtccaaatggtacaagtactggttttgatatatctgatgatgaccgaaagtacatgagtaaatgccacattgctgtatcatcctgcatctttggaaattctgatcgactgaggactccatttggcaaaacgattacaagcctctcaaagaagacagtttgctttgctatgtttttggatgaagtgacattgcacactttagaatctgaaggccagaaaatggacagcatgggtttcattggcatatggaagatcatattgattaagaacatgccttataatgacatgcgtagagtggggaaaataccaaagtttttggcacacaggctattcccatcatcgaggttctcaatctggttagacagcaaactgagactacaaactgatcctatccttatcctggagtatttcctctggcggcatggctatgaatatgctatttccaatcactatgatcggcattgtgtttgggaggaagtagcacaaaataaaaagctgaacaagttcaaccatacaataattgaccagcaatttgagttttaccaagcagacggactgacaagatgtccccgaaggctcttttatcgtgagagaacacacaccaatgtccaacttattctcttgcctgtggtacaatgaggttgatcgtttcacgcctcgtgaccagctcagctttgcatatacgtacctaaaactaagaaggataaaccctgacagaccgttccgactcaatatgtttaaggattgtgagaggcgatcgatagcgaagctattccatcatcgatcagaagagagtcacagtggtgcacaactaacaagatgacacatccttcttggtgatggggggcagaagagggagagatcagggattgtattttttatacagctcagcagtcagctatgcacaagatccattgaaatttatacccctgtcgaagagttcatactttatataatgcaagtcatctttacccttgttactctctagtgctgcagaccagttcccgcctttcatgttttgcagttgacaaaggcagattaggaggttctagttgtttggtttttctttattctccgtaaagctctgtttattctttggataatatgggaaagttgtggctgggcatggacttcccagatgtattatt

SEQ ID NO: 38911 - DNA, 1111 bp, Zea Mays
gtatcatcctgcatctttggaaattctgatcgactgaggactccatttggcaaaacgattacaagcctctcaaagaagacagtttgctttgctatgtttttggatgaagtgacattgcacactttagaatctgaaggccagaaaatggacagcatgggtttcattggcatatggaagatcatattgattaagaacatgccttataatgacatgcgtagagtggggaaaataccaaagtttttggcacacaggctattcccatcatcgaggttctcaatctggttagacagcaaactgagactacaaactgatcctatccttatcctggagtatttcctctggcggcatggctatgaatatgctatttccaatcactatgatcggcattgtgtttgggaggaagtagcacaaaataaaaagctgaacaagttcaaccatacaataattgaccagcaatttgagttttaccaagcagacggactgacaaggttcaacccgtcggatcccaacaagcttctaccaagctatgtccccgaaggctcttttatcgtgagagaacacacaccaatgtccaacttattctcttgcctgtggtacaatgaggttgatcgtttcacgcctcgtgaccagctcagctttgcatatacgtacctaaaactaagaaggataaaccctgacagaccgttccgactcaatatgtttaaggattgtgagaggcgatcgatagcgaagctattccatcatcgatcagaagagagtcacagtggtgcacaactaacaagatgacacatccttcttggtgatggggggcagaagagggagagatcagggattgtattttttatacagctcagcagtcagctatgcacaagatccattgaaatttatacccctgtcgaagagttcatactttatataatgcaagtcatctttacccttgttactctctagtgctgcagaccagttcccgcctttcatgttttgcagttgacaaaggcagattaggaggttctagttgtttggtttttctttattctccgtaaagctctgtttattctttggataatatgggaaagttgtggctgggcatggacttcccagatgtattatt

SEQ ID NO: 38912 - DNA, 1199 bp, Zea Mays
catcgctcccggtacacgaaatcaaagccgccgaaaactagtgctgatttaaattcccgcgacgactccgagcactcgccatcgctttctgctccgctctggttgcgttgcattgcgggtgcggctggagtactcgacgacgccattattaaccaaccatctccccggcgccctccaccttcccttccccacgcgcgagacggacacacctctctcgctctgcactgcacagcagctgctctgttacagggaccgaccgatcccctccttggctggccctggccatgcagcggcgaccagagttcagcttcccgggctcgccggcgcgggggctgccgccgcggccgccggcgaacccgatggcgccgcggtacggggacgaggaggtccggtggctgcaggcgtcgccgcaggcctcgccggagatggactacagctccggcggctcgggcacgccgtcgccgcagctgtgggcgcaccaccaccagctccaccggcagtacccggcgtcggcgggcagctcgccgtcgcgggcgcaggccatcgcggggtaccgccgcgagatgctcgacctcgtccgcggcctcccggagtccgcctacgagctctcgctccgcgacatcgtcgagcacccgtcgcccccgtcccctccccacgcccctaccaaccctctgccgccgcctaccaccgccggaccacgcgcgagtcgcgccgtccccgtcccggcgcaggagaagggcgagtccgccggcgccaggaaggacgccgtcgcggcggcggacgccgaggacggcggcggtagcaggaagcagggaggctccaagggcaagaagcaggggaggaagcagaggacgatgcggaagcagcggagccggagcctggaccgcagcgtcagcctggacaccggcctgctcatcaagctcttcctcccgctctccctcggcggcaagaagaaggtctcgcccaagcccgacgccgccaaggacagcaagaagaagaagaggaaggagaagaaggaggcggcggtgcaggaggaggagtggtggaccaagagcgagttcagcgaggccgggaacagcagccggaccagcagcagcaacagcaacagcagcgccgccagcctcaggaatgccaatggcgccgccaatccgagagcgccggacaggagctggagcagtgcaactgtccaaattaaggtg

SEQ ID NO: 38913 - DNA, 1625 bp, Zea Mays
aaaaaaagcacctcactggaagttaggtatgtatttgaaccttctagaattacgtctctttctttacgtagccttttgtttattaaaattgcatcagttttataattccttgtacaaaacattatatatgttttaaatgaattgttcttttttttgtttcagtgcaaatgtgtacctatacattttttcacatatatatattcatctactcttatatttatttcttattgttacaactgttcataatagaaaattgcatagttgtgttttctcatgcattcttatgtccctacaattacatagaataatgaagaattatcacaacaatagctatctggccaactctgtataaaaacatactccctcggtttttagttaacatttttagtgtaagagcattagccagcgtcaaataaaaaataagaggtagtactattttctgggcggtcgtccattcaacaaggtacaaaatgcagtgaatttattaactaattatatttgtttgttaaacccctttccatgttgtactccctaacacatatgctctcaagctttgtggcctacaacaatggtatttactgcgatagaagccatgccccagattttttcgcaacctgcactgctattttttctatgtgaagtttttttatcaaacattgttgtcgatgtcataacagatgagttatacatatctccaaagttgctactacacattactcacccttccttattttccttcacctcctcgcccaagaatatccgcttcatctagttttgactattcattttattgatcatttgtgcacacatggccacattcctatatatgattaacatgcgtcgtttgtttttttgccatcatagtgctccgtgctccatattcttatgagttcgaatggaattttagtatgtagctaatggagtagctaataaaaatatcatcttttcatacaatagctaattaccactaacttcttcaaaactatttgttcccaacttaaaggataactcgaggattgaagcgacacattgaagagttatagtttcatataaactgggttaagttgtgcaattttctcttcattttttagagcagacacttacattattgttttttcttcactatacgaggaattacacaactattgtttctctttcctctctgtcaataaccattccattactccagtgatcatcctattcgctctgaaagaaaaaagaacctcactgtaagatagatatatttctcggccctctgttgcgggcggcgactggcacaggacgagggaatgcgtggaccttgggttcatcggcctcgctttcaactctgactgcaacattctatccgaggtcgttacagaccgtcctgcaaagacctgtgtcgtgcgaagaactaggcttctccggcttcgccctctgctatgactgcaacacgctctctaatttcatcaaggaccgaggtacagacggttgaatgctgttgcaacacatgctgctacaacgttcattgattttttccactttactgctactcagggatattgtttcctccagaacctttaattttgtgtactataatacataatagtccttcgaccatttatatatgagcatgtatatttttt

SEQ ID NO: 38914 - DNA, 1669 bp, Zea Mays
cgccgcggccgcccccgcccctggccccgccaggggatccacgccgaggacgactacccgtacctcatggaagaaggctgttgcaaagagaaacaagttcgcacacaaaaatcttcacatgtgaactggatgatactaggatgcagggttctaatcctttgctctggcgtgcgtgtttagccccaagttgatgtcgtcactataactgggtacgaggatgtcctagagaacagcgagatcagcctgctgaaagcgttggcccatcagcctgtcagcatcggcataactgcagggagtagggacttccagttctacagagggggggtgtttgacggggcctgcagcgtcgagctccaccatgagctgacggccgtcgggtacggctcgtcgtatggccagaactacatcaccatgaagaactcgtggggcaagaactggggggagcaaggctacgtcaggataaagatgggcaccgggaagccagagggtgtctgcggaatctataccatggcctcctatcccttgaaaaatgcaacacgctggggtacctaatttttttgtaatgagtttgttcgaaagtattatttttaatataatccacatggcaagatgcctttttaccattgctgtcaagatcccatacttgatttcccaaaatccatgttacactcaccactccagcacgataggaacaactatatattgtgatctatctacacgactgtcttggaaggcggtatataattgcgcggccaagtggtaaccaaagtatgggcgatgtccggagagtaagaacgaggcgacacagtatggactcgatatgaccgagcaacaatatcttgagcattcgattccatggatagctgccaatgatgctgcttggcgtgcgttttgtcgttactgggcttcggctgaattcaaggcaaagtctgtgcgacacagttctaatcatggaaccgagtcatatcacaagtatggaggtgatgatcactttcgtttggcaaaacgaatggaagctagcactggtgcagtgcctagtgatgttcaaatataccttagggggcacagaggaccagatcctgcaaatctagatgtgttgtacagccaaaagcaacagattgtgtggtacacaatgtttgctaacgtcatcgactcgagccaggtgagggttcagcgtggaggttcgtcgtggtctgctgctcgtagctcccgtctctccactcaagatccagcagaagtggaacaactgcgagaagaacttaggcgacatcaggatttcttgaagcaacaagctgcgcaacatgaatattatgctacacagattcaacaacagcaaaacactcatacaacaactagcacaggctcaagggatacacgtcctggtgcccccccaccaccacctcatgttcattatccttggtcttcacctccacctacacctacatctccatctaccgaacatcaggtgctcgttagatttggcggccgtggccctgaccacgaccaggctaaggcggcggcgaggagcggctgtcgccgtgatggggacgctcatcaacgggttcgtgctgaggaatgccattcttcttggcttgatggatgtctatggattgtggttcttgtgctgctggcttgctgccttcggatggaggggaaactgttggtataa

SEQ ID NO: 38915 - DNA, 1489 bp, Zea Mays
gccgcggccgcccccgcccctggccccgccaggggatccacgccgaggacgactacccgtacctcatggaagaaggctgttgcaaagagaaacaagttcgcacacaaaaatcttcacatgtgaactggatgatactaggatgcagggttctaatcctttgctctggcgtgcgtgtttagccccaagttgatgtcgtcactataactgggtacgaggatgtcctagagaacagcgagatcagcctgctgaaagcgttggcccatcagcctgtcagcatcggcataactgcagggagtagggacttccagttctacagagggggggtgtttgacggggcctgcagcgtcgagctccaccatgagctgacggccgtcgggtacggctcgtcgtatggccagaactacatcaccatgaagaactcgtggggcaagaactggggggagcaaggctacgtcaggataaagatgggcaccgggaagccagagggtgtctgcggaatctataccatggcctcctatcccttgaaaaatgcaacacgctggggtgttaatcaagtattgctaacgaaggattcactatgtttggtagtgaagggcgatgtccggagagtaagaacgaggcgacacagtatggactcgatatgaccgagcaacaatatcttgagcattcgattccatggatagctgccaatgatgctgcttggcgtgcgttttgtcgttactgggcttcggctgaattcaaggcaaagtctgtgcgacacagttctaatcatggaaccgagtcatatcacaagtatggaggtgatgatcactttcgtttggcaaaacgaatggaagctagcactggtgcagtgcctagtgatgttcaaatataccttagggggcacagaggaccagatcctgcaaatctagatgtgttgtacagccaaaagcaacagattgtgtggtacacaatgtttgctaacgtcatcgactcgagccaggtgagggttcagcgtggaggttcgtcgtggtctgctgctcgtagctcccgtctctccactcaagatccagcagaagtggaacaactgcgagaagaacttaggcgacatcaggatttcttgaagcaacaagctgcgcaacatgaatattatgctacacagattcaacaacagcaaaacactcatacaacaactagcacaggctcaagggatacacgtcctggtgcccccccaccaccacctcatgttcattatccttggtcttcacctccacctacacctacatctccatctaccgaacatcaggtgctcgttagatttggcggccgtggccctgaccacgaccaggctaaggcggcggcgaggagcggctgtcgccgtgatggggacgctcatcaacgggttcgtgctgaggaatgccattcttcttggcttgatggatgtctatggattgtggttcttgtgctgctggcttgctgccttcggatggaggggaaactgttggtataa

SEQ ID NO: 38916 - DNA, 1663 bp, Zea Mays
gccgcggccgcccccgcccctggccccgccaggggatccacgccgaggacgactacccgtacctcatggaagaaggctgttgcaaagagaaacaagttcgcacacaaaaatcttcacatgtgaactggatgatactaggatgcagggttctaatcctttgctctggcgtgcgtgtttagccccaagttgatgtcgtcactataactgggtacgaggatgtcctagagaacagcgagatcagcctgctgaaagcgttggcccatcagcctgtcagcatcggcataactgcagggagtagggacttccagttctacagagggggggtgtttgacggggcctgcagcgtcgagctccaccatgagctgacggccgtcgggtacggctcgtcgtatggccagaactacatcaccatgaagaactcgtggggcaagaactggggggagcaaggctacgtcaggataaagatgggcaccgggaagccagagggtgtctgcggaatctataccatggcctcctatcccttgaaaaatgcaacacgctggggtacctaatttttttgtaatgagtttgttcgaaagtattatttttaatataatccacatggcaagatgcctttttaccattgctgtcaagatcccatacttgatttcccaaaatccatgttacactcaccactccagcacgataggaacaactatatattgtgatctatctacacgactgtcttggaaggcggtatataattgcgcggccaagtggtaaccaaaggcgatgtccggagagtaagaacgaggcgacacagtatggactcgatatgaccgagcaacaatatcttgagcattcgattccatggatagctgccaatgatgctgcttggcgtgcgttttgtcgttactgggcttcggctgaattcaaggcaaagtctgtgcgacacagttctaatcatggaaccgagtcatatcacaagtatggaggtgatgatcactttcgtttggcaaaacgaatggaagctagcactggtgcagtgcctagtgatgttcaaatataccttagggggcacagaggaccagatcctgcaaatctagatgtgttgtacagccaaaagcaacagattgtgtggtacacaatgtttgctaacgtcatcgactcgagccaggtgagggttcagcgtggaggttcgtcgtggtctgctgctcgtagctcccgtctctccactcaagatccagcagaagtggaacaactgcgagaagaacttaggcgacatcaggatttcttgaagcaacaagctgcgcaacatgaatattatgctacacagattcaacaacagcaaaacactcatacaacaactagcacaggctcaagggatacacgtcctggtgcccccccaccaccacctcatgttcattatccttggtcttcacctccacctacacctacatctccatctaccgaacatcaggtgctcgttagatttggcggccgtggccctgaccacgaccaggctaaggcggcggcgaggagcggctgtcgccgtgatggggacgctcatcaacgggttcgtgctgaggaatgccattcttcttggcttgatggatgtctatggattgtggttcttgtgctgctggcttgctgccttcggatggaggggaaactgttggtataa

SEQ ID NO: 38917 - DNA, 1865 bp, Zea Mays
gccgcggccgcccccgcccctggccccgccaggggatccacgccgaggacgactacccgtacctcatggaagaaggctgttgcaaagagaaacaagttcgcacacaaaaatcttcacatgtgaactggatgatactaggatgcagggttctaatcctttgctctggcgtgcgtgtttagccccaagttgatgtcgtcactataactgggtacgaggatgtcctagagaacagcgagatcagcctgctgaaagcgttggcccatcagcctgtcagcatcggcataactgcagggagtagggacttccagttctacagagggggggtgtttgacggggcctgcagcgtcgagctccaccatgagctgacggccgtcgggtacggctcgtcgtatggccagaactacatcaccatgaagaactcgtggggcaagaactggggggagcaaggctacgtcaggataaagatgggcaccgggaagccagagggtgtctgcggaatctataccatggcctcctatcccttgaaaaatgcaacacgctggggtacctaatttttttgtaatgagtttgttcgaaagtattatttttaatataatccacatggcaagatgcctttttaccattgctgtcaagatcccatacttgatttcccaaaatccatgttacactcaccactccagcacgataggaacaactatatattgtgatctatctacacgactgtcttggaaggcggtatataattgcgcggccaagtggtaaccaaatgaagggcgatgtccggagagtaagaacgaggcgacacagtatggactcgatatgaccgagcaacaatatcttgagcattcgattccatggatagctgccaatgatgctgcttggcgtgcgttttgtcgttactgggcttcggctgaattcaaggcaaagtctgtgcgacacagttctaatcatggaaccgagtcatatcacaagtatggaggtgatgatcactttcgtttggcaaaacgaatggaagctagcactggtgcagtgcctagtgatgttcaaatataccttagggggcacagaggaccagatcctgcaaatctagatgtgttgtacagccaaaagcaacagattgtgtggctgcatatggtgaggcgatgtctagtcagcatggaccaaactatgattggaggacctcacatattgatcctcaggttgtgtatgcaagtggtggaaaagctcatggaaggtgcagactctacatatcttatattgtttcattggttgagtgcaatacatatattcttaatctgtcgtgatgttacttgttttgtaggtacacaatgtttgctaacgtcatcgactcgagccaggtgagggttcagcgtggaggttcgtcgtggtctgctgctcgtagctcccgtctctccactcaagatccagcagaagtggaacaactgcgagaagaacttaggcgacatcaggatttcttgaagcaacaagctgcgcaacatgaatattatgctacacagattcaacaacagcaaaacactcatacaacaactagcacaggctcaagggatacacgtcctggtgcccccccaccaccacctcatgttcattatccttggtcttcacctccacctacacctacatctccatctaccgaacatcaggtgctcgttagatttggcggccgtggccctgaccacgaccaggctaaggcggcggcgaggagcggctgtcgccgtgatggggacgctcatcaacgggttcgtgctgaggaatgccattcttcttggcttgatggatgtctatggattgtggttcttgtgctgctggcttgctgccttcggatggaggggaaactgttggtataa

SEQ ID NO: 38918 - DNA, 1439 bp, Zea Mays
gccgcggccgcccccgcccctggccccgccaggggatccacgccgaggacgactacccgtacctcatggaagaaggctgttgcaaagagaaacaagttcgcacacaaaaatcttcacatgtgaactggatgatactaggatgcagggttctaatcctttgctctggcgtgcgtgtttagccccaagttgatgtcgtcactataactgggtacgaggatgtcctagagaacagcgagatcagcctgctgaaagcgttggcccatcagcctgtcagcatcggcataactgcagggagtagggacttccagttctacagagggggggtgtttgacggggcctgcagcgtcgagctccaccatgagctgacggccgtcgggtacggctcgtcgtatggccagaactacatcaccatgaagaactcgtggggcaagaactggggggagcaaggctacgtcaggataaagatgggcaccgggaagccagagggtgtctgcggaatctataccatggcctcctatcccttgaaaaatgcaacacgctgggggcgatgtccggagagtaagaacgaggcgacacagtatggactcgatatgaccgagcaacaatatcttgagcattcgattccatggatagctgccaatgatgctgcttggcgtgcgttttgtcgttactgggcttcggctgaattcaaggcaaagtctgtgcgacacagttctaatcatggaaccgagtcatatcacaagtatggaggtgatgatcactttcgtttggcaaaacgaatggaagctagcactggtgcagtgcctagtgatgttcaaatataccttagggggcacagaggaccagatcctgcaaatctagatgtgttgtacagccaaaagcaacagattgtgtggtacacaatgtttgctaacgtcatcgactcgagccaggtgagggttcagcgtggaggttcgtcgtggtctgctgctcgtagctcccgtctctccactcaagatccagcagaagtggaacaactgcgagaagaacttaggcgacatcaggatttcttgaagcaacaagctgcgcaacatgaatattatgctacacagattcaacaacagcaaaacactcatacaacaactagcacaggctcaagggatacacgtcctggtgcccccccaccaccacctcatgttcattatccttggtcttcacctccacctacacctacatctccatctaccgaacatcaggtgctcgttagatttggcggccgtggccctgaccacgaccaggctaaggcggcggcgaggagcggctgtcgccgtgatggggacgctcatcaacgggttcgtgctgaggaatgccattcttcttggcttgatggatgtctatggattgtggttcttgtgctgctggcttgctgccttcggatggaggggaaactgttggtataa

SEQ ID NO: 38919 - DNA, 1444 bp, Zea Mays
gccgcggccgcccccgcccctggccccgccaggggatccacgccgaggacgactacccgtacctcatggaagaaggctgttgcaaagagaaacaagttcgcacacaaaaatcttcacatgtgaactggatgatactaggatgcagggttctaatcctttgctctggcgtgcgtgtttagccccaagttgatgtcgtcactataactgggtacgaggatgtcctagagaacagcgagatcagcctgctgaaagcgttggcccatcagcctgtcagcatcggcataactgcagggagtagggacttccagttctacagagggggggtgtttgacggggcctgcagcgtcgagctccaccatgagctgacggccgtcgggtacggctcgtcgtatggccagaactacatcaccatgaagaactcgtggggcaagaactggggggagcaaggctacgtcaggataaagatgggcaccgggaagccagagggtgtctgcggaatctataccatggcctcctatcccttgaaaaatgcaacacgctgggtgaagggcgatgtccggagagtaagaacgaggcgacacagtatggactcgatatgaccgagcaacaatatcttgagcattcgattccatggatagctgccaatgatgctgcttggcgtgcgttttgtcgttactgggcttcggctgaattcaaggcaaagtctgtgcgacacagttctaatcatggaaccgagtcatatcacaagtatggaggtgatgatcactttcgtttggcaaaacgaatggaagctagcactggtgcagtgcctagtgatgttcaaatataccttagggggcacagaggaccagatcctgcaaatctagatgtgttgtacagccaaaagcaacagattgtgtggtacacaatgtttgctaacgtcatcgactcgagccaggtgagggttcagcgtggaggttcgtcgtggtctgctgctcgtagctcccgtctctccactcaagatccagcagaagtggaacaactgcgagaagaacttaggcgacatcaggatttcttgaagcaacaagctgcgcaacatgaatattatgctacacagattcaacaacagcaaaacactcatacaacaactagcacaggctcaagggatacacgtcctggtgcccccccaccaccacctcatgttcattatccttggtcttcacctccacctacacctacatctccatctaccgaacatcaggtgctcgttagatttggcggccgtggccctgaccacgaccaggctaaggcggcggcgaggagcggctgtcgccgtgatggggacgctcatcaacgggttcgtgctgaggaatgccattcttcttggcttgatggatgtctatggattgtggttcttgtgctgctggcttgctgccttcggatggaggggaaactgttggtataa

SEQ ID NO: 38920 - DNA, 1668 bp, Zea Mays
gccgcggccgcccccgcccctggccccgccaggggatccacgccgaggacgactacccgtacctcatggaagaaggctgttgcaaagagaaacaagttcgcacacaaaaatcttcacatgtgaactggatgatactaggatgcagggttctaatcctttgctctggcgtgcgtgtttagccccaagttgatgtcgtcactataactgggtacgaggatgtcctagagaacagcgagatcagcctgctgaaagcgttggcccatcagcctgtcagcatcggcataactgcagggagtagggacttccagttctacagagggggggtgtttgacggggcctgcagcgtcgagctccaccatgagctgacggccgtcgggtacggctcgtcgtatggccagaactacatcaccatgaagaactcgtggggcaagaactggggggagcaaggctacgtcaggataaagatgggcaccgggaagccagagggtgtctgcggaatctataccatggcctcctatcccttgaaaaatgcaacacgctggggtacctaatttttttgtaatgagtttgttcgaaagtattatttttaatataatccacatggcaagatgcctttttaccattgctgtcaagatcccatacttgatttcccaaaatccatgttacactcaccactccagcacgataggaacaactatatattgtgatctatctacacgactgtcttggaaggcggtatataattgcgcggccaagtggtaaccaaatgaagggcgatgtccggagagtaagaacgaggcgacacagtatggactcgatatgaccgagcaacaatatcttgagcattcgattccatggatagctgccaatgatgctgcttggcgtgcgttttgtcgttactgggcttcggctgaattcaaggcaaagtctgtgcgacacagttctaatcatggaaccgagtcatatcacaagtatggaggtgatgatcactttcgtttggcaaaacgaatggaagctagcactggtgcagtgcctagtgatgttcaaatataccttagggggcacagaggaccagatcctgcaaatctagatgtgttgtacagccaaaagcaacagattgtgtggtacacaatgtttgctaacgtcatcgactcgagccaggtgagggttcagcgtggaggttcgtcgtggtctgctgctcgtagctcccgtctctccactcaagatccagcagaagtggaacaactgcgagaagaacttaggcgacatcaggatttcttgaagcaacaagctgcgcaacatgaatattatgctacacagattcaacaacagcaaaacactcatacaacaactagcacaggctcaagggatacacgtcctggtgcccccccaccaccacctcatgttcattatccttggtcttcacctccacctacacctacatctccatctaccgaacatcaggtgctcgttagatttggcggccgtggccctgaccacgaccaggctaaggcggcggcgaggagcggctgtcgccgtgatggggacgctcatcaacgggttcgtgctgaggaatgccattcttcttggcttgatggatgtctatggattgtggttcttgtgctgctggcttgctgccttcggatggaggggaaactgttggtataa

SEQ ID NO: 38921 - DNA, 4095 bp, Zea Mays
gctagctggttcggcttctctctcccgtcttcgcttcctccccagtccgcaccccccacagacacagagagagagagagagcgtgcgtaccaaacaaaatcccatcgcgagacaacaaaaccaggccaacggattcttttggctgcggtggcggtgctgtggctggtgccccccttgctgcatcgccggctcgccgccgacatcggctcgcgcgtaccctagccggagccggagtcgctccccgcagcccccctcgtttgtctcggccaggtgtggcgcctgaccgcgcagctcgattcgccggattcgagctcctttgcgacggggaacctgcgggcgccgcggaggggatgctcgcacgtccctgctagattcccgcggatctcgcgggcttgctggtggtgaaacgatggctaggtgagtacaagccgcgcgtgatctcctagtggttggtgcgagcggtggacggccaagatgatgccgtcgggcccgccgaacccgatggggcccggtcagccagtgagcggtgcggcagcgtcgctactacggacgagctccagcttgctcagtggcggtggccagcctgggatggctggaggtggtggtggcggcatgctttcttcacagtcgcccttctcctcgcttgtctccccgctcacacagtttggcggcaatggtcttcttggaggcgcctcgaatgtctcctccctgctgaaccggacgacgttcaggaatggtggccctatgccaggtccggggtcgatgcagggtggtgggatgcagatgagtacactccagcagagagctgggttggatggtgccagcgatttcattagcacgggagggtcagaccctctctcattcccgtcttcctcacaggttaatttggtcaatcagatgggatcagataatctgcaagtgacttcacagcagcaacagcagatggatgcagtgcaggatatgcagcagcagcagcagctaccaatgtcttacagccagcaacagttgccggcacaacactcgcagcagctccagcagccacaggctacagtgaagttggagaatggaggaagcatggttagcatcaaatcagagcagcagatgggacagcctgaacagaatggtcctgcccagatgatgcgaagtgctggttgtgtgaaacttgagccacagcagttgcaagcccagatgatgaggagtttaagttcagtcaagatggagcaacagagttcagattcatcagccttcttgcagcagcagcagcagcaacaacaacatcatttgttgcagctgacaaagcagattcgaaattgtccagaccttgtatcaatgggtggaccaaacacaactgcaaaccctcaagctgctgctgctgctgctgctcaactgaccctcttgcagcagcaacggctcctgcatatgcaacagcagcaccaacagcaacagattctaaagaacttgcctttgcaaagaaaccagttgcaacagcaacagcagcatcaacaacagcagcaacaacagcagttacttcgtcaacagagtctaaacatgagaactccaggaaagtcatctccttatgagccaggaacttgtgcaaagagattgactcattacatgtatcatcaacaaaacagaccacaagataacaacattgagtactggagaaactttgtcaatgagtattttgctccaaatgctaaaaagagatggtgtgtgtcactttatggaagcggtcgtcaaactactggagttttccctcaggatgtatggcactgtgagatttgtaatcggaaacctggccgtggttttgaaacaacggttgaggtgctaccacgactatgccaaattaaatatgccagtggtaccctggaagaacttttgtacattgacatgccacatgagtcccagaatacgtcaggccagattattttggactacacgaaagcaatccaagaaagtgtttttgagcaattgcgtgtcgtacgagagggacatctacggatagttttcaatccagaccttaagatcgcatcttgggagttctgtgctaggcgtcatgaagaacttattccacggagatctataataccacaggttagtaatcttggcgcagttgtacaaaagtatcaggctgccgcacagaactcaacgagtttgtctcctcaggacatgcagaataattgtaactcgtttgttgcatgtgcccgacaattggcgaaagcactggaggttcctttagtaaatgatttaggatacacaaaacgatatgttcgctgccttcagattgccgaggtcgtaaactgtatgaaggatttaattgatcacagcaggcagactggatctggacccattgatagcctgcataactttccgcggaggactccaggggttagcactcttcaaccgcagcagcaaactgaggagaagcaggccattccccagagttcaaaccagagtggccaaaattctgctcctatggctggtgtgcagccttctgcctctgccaatggtgacgtgacatcaaataattctctcagttgtgcaccttctacatctgcgccttcaccatcagttgttggactcctgcaaaattcaatgaattcgagacaagatcatccaatgagcggcactaatggtggcccatataatggaggcaatgtggctattccgaaggtgaactctacaagctcactgcagtcaaatccgtctacctctttcccttccccagcaccgacaacatccaataacagcatgatgcatgctcctcaaaacacaaatcagctgagctccccaactacatcatcaagcatacctcccatgcagccacttgatactcaacctcaggaggctgagccaagcgactcgcaaagctcggttcagaagatcttgcaagatctgatgtcatcctgtgttggccactcaggtaatgatacgaagacaccaaatggactaacccatggtgttaatggggttaattgcttagttggcaatgctgtcacgaataactcgggaatgggaggaatgggatttggcgccatgaatgggttcggtcatgggatgagaacggcaatgacaaacaatccgatggcaatgggtgcaaggatgggaatgaaccacagtgcacatgacctatcgcaattgggtcagttacaccagcagcagcagcagcatcaacagcagcatgacataggaaaccagctgttgggtggatttaggtcagcgagcagcttcaataacattcaatatgactggaaaccctcacaatagagcagccagaaaccatagagtttcagtgtgatgatgcatctggcttcgctggcaatgcgtgtggagcatccacatttatggtgccataacctccccttggcccaatagcatttgggcctttgcattaatgccgccatcaaagggtaccataagcgatagcaagcatcccggctggtacatgtaagtctaactgtcagtttagctatctcgtgtgtagctccctgagttttacaacattagtcgattttaccgggagttgcaataccatcatgtgtcacattgtttgtccactctttacccccttcaatgctgtgaaaagaaaggctaagtagctgtagcatgttatagtaggtgtatgtggggtaattcctcattagctcttagatctagtctttcctctgtctatttatacggttatcattgacatattgcggaatggagagccagacttacaggatttgtcactgaaactgtccgagttgggtgcctgtcacttactgcttgctccagttatctgagtgaggaagatactctgaaagaattagagcctctctgcactttttaccatctgtcagatcctattgtgctttgtggtacggaaatgaagttgtccctcgccttttttcctcgttggatgacatgtatcttatcctctgcaattcctaagactactggtgctgatatcctcttatcctcgcgtttggagaattctctttgtagctttactgtgctgcactgttgtataattggcacactgactagatcgaagtaccaccatggaatggatgttctcctagtcttgttgctttatactctctcctccgtctt

SEQ ID NO: 38922 - DNA, 3501 bp, Zea Mays
gctagctggttcggcttctctctcccgtcttcgcttcctccccagtccgcaccccccacagacacagagagagagagagagcgtgcgtaccaaacaaaatcccatcgcgagacaacaaaaccaggccaacggattcttttggctgcggtggcggtgctgtggctggtgccccccttgctgcatcgccggctcgccgccgacatcggctcgcgcgtaccctagccggagccggagtcgctccccgcagcccccctcgtttgtctcggccaggtgtggcgcctgaccgcgcagctcgattcgccggattcgagctcctttgcgacggggaacctgcgggcgccgcggaggggatgctcgcacgtccctgctagattcccgcggatctcgcgggcttgctggtggtgaaacgatggctaggtgagtacaagccgcgcgtgatctcctagtggttggtgcgagcggtggacggccaagatgatgccgtcgggcccgccgaacccgatggggcccggtcagccagtgagcggtgcggcagcgtcgctactacggacgagctccagcttgctcagtggcggtggccagcctgggatggctggaggtggtggtggcggcatgctttcttcacagtcgcccttctcctcgcttgtctccccgctcacacagtttggcggcaatggtcttcttggaggcgcctcgaatgtctcctccctgctgaaccggacgacgttcaggaatggtggccctatgccaggtccggggtcgatgcagggtggtgggatgcagatgagtacactccagcagagagctgggttggatggtgccagcgatttcattagcacgggagggtcagaccctctctcattcccgtcttcctcacaggttaatttggtcaatcagatgggatcagataatctgcaagtgacttcacagcagcaacagcagatggatgcagtgcaggatatgcagcagcagcagcagctaccaatgtcttacagccagcaacagttgccggcacaacactcgcagcagctccagcagccacaggctacagtgaagttggagaatggaggaagcatggttagcatcaaatcagagcagcagatgggacagcctgaacagaatggtcctgcccagatgatgcgaagtgctggttgtgtgaaacttgagccacagcagttgcaagcccagatgatgaggagtttaagttcagtcaagatggagcaacagagttcagattcatcagccttcttgcagcagcagcagcagcaacaacaacatcatttgttgcagctgacaaagcagattcgaaattgtccagaccttgtatcaatgggtggaccaaacacaactgcaaaccctcaagctgctgctgctgctgctgctcaactgaccctcttgcagcagcaacggctcctgcatatgcaacagcagcaccaacagcaacagattctaaagaacttgcctttgcaaagaaaccagttgcaacagcaacagcagcatcaacaacagcagcaacaacagcagttacttcgtcaacagagtctaaacatgagaactccaggaaagtcatctccttatgagccaggaacttgtgcaaagagattgactcattacatgtatcatcaacaaaacagaccacaagataacaacattgagtactggagaaactttgtcaatgagtattttgctccaaatgctaaaaagagatggtgtgtgtcactttatggaagcggtcgtcaaactactggagttttccctcaggatgtatggcactgtgagatttgtaatcggaaacctggccgtggttttgaaacaacggttgaggtgctaccacgactatgccaaattaaatatgccagtggtaccctggaagaacttttgtacattgacatgccacatgagtcccagaatacgtcaggccagattattttggactacacgaaagcaatccaagaaagtgtttttgagcaattgcgtgtcgtacgagagggacatctacggatagttttcaatccagaccttaagatcgcatcttgggagttctgtgctaggcgtcatgaagaacttattccacggagatctataataccacaggttagtaatcttggcgcagttgtacaaaagtatcaggctgccgcacagaactcaacgagtttgtctcctcaggacatgcagaataattgtaactcgtttgttgcatgtgcccgacaattggcgaaagcactggaggttcctttagtaaatgatttaggatacacaaaacgatatgttcgctgccttcagattgccgaggtcgtaaactgtatgaaggatttaattgatcacagcaggcagactggatctggacccattgatagcctgcataactttccgcggaggactccaggggttagcactcttcaaccgcagcagcaaactgaggagaagcaggccattccccagagttcaaaccagagtggccaaaattctgctcctatggctggtgtgcagccttctgcctctgccaatggtgacgtgacatcaaataattctctcagttgtgcaccttctacatctgcgccttcaccatcagttgttggactcctgcaaaattcaatgaattcgagacaagatcatccaatgagcggcactaatggtggcccatataatggaggcaatgtggctattccgaaggtgaactctacaagctcactgcagtcaaatccgtctacctctttcccttccccagcaccgacaacatccaataacagcatgatgcatgctcctcaaaacacaaatcagctgagctccccaactacatcatcaagcatacctcccatgcagccacttgatactcaacctcaggaggctgagccaagcgactcgcaaagctcggttcagaagatcttgcaagatctgatgtcatcctgtgttggccactcaggtaatgatacgaagacaccaaatggactaacccatggtgttaatggggttaattgcttagttggcaatgctgtcacgaataactcgggaatgggaggaatgggatttggcgccatgaatgggttcggtcatgggatgagaacggcaatgacaaacaatccgatggcaatgggtgcaaggatgggaatgaaccacagtgcacatgacctatcgcaattgggtcagttacaccagcagcagcagcagcatcaacagcagcatgacataggaaaccagctgttgggtggatttaggtcagcgagcagcttcaataacattcaatatgactggaaaccctcacaatagagcagccagaaaccatagagtttcagtgtgatgatgcatctggcttcgctggcaatgcgtgtggagcatccacatttatggtgccataacctccccttggcccaatagcatttgggcctttgcattaatgccgccatcaaagggtaccataagcgatagcaagcatcccggctggtacatccggaacaagttctcaatggaagggccaatggatatgacttcatcagccaggcc

SEQ ID NO: 38923 - DNA, 3725 bp, Zea Mays
gctagattcccgcggatctcgcgggcttgctggtggtgaaacgatggctaggtgagtacaagccgcgcgtgatctcctagtggttggtgcgagcggtggacggccaagatgatgccgtcgggcccgccgaacccgatggggcccggtcagccagtgagcggtgcggcagcgtcgctactacggacgagctccagcttgctcagtggcggtggccagcctgggatggctggaggtggtggtggcggcatgctttcttcacagtcgcccttctcctcgcttgtctccccgctcacacagtttggcggcaatggtcttcttggaggcgcctcgaatgtctcctccctgctgaaccggacgacgttcaggaatggtggccctatgccaggtccggggtcgatgcagggtggtgggatgcagatgagtacactccagcagagagctgggttggatggtgccagcgatttcattagcacgggagggtcagaccctctctcattcccgtcttcctcacaggttaatttggtcaatcagatgggatcagataatctgcaagtgacttcacagcagcaacagcagatggatgcagtgcaggatatgcagcagcagcagcagctaccaatgtcttacagccagcaacagttgccggcacaacactcgcagcagctccagcagccacaggctacagtgaagttggagaatggaggaagcatggttagcatcaaatcagagcagcagatgggacagcctgaacagaatggtcctgcccagatgatgcgaagtgctggttgtgtgaaacttgagccacagcagttgcaagcccagatgatgaggagtttaagttcagtcaagatggagcaacagagttcagattcatcagccttcttgcagcagcagcagcagcaacaacaacatcatttgttgcagctgacaaagcagattcgaaattgtccagaccttgtatcaatgggtggaccaaacacaactgcaaaccctcaagctgctgctgctgctgctgctcaactgaccctcttgcagcagcaacggctcctgcatatgcaacagcagcaccaacagcaacagattctaaagaacttgcctttgcaaagaaaccagttgcaacagcaacagcagcatcaacaacagcagcaacaacagcagttacttcgtcaacagagtctaaacatgagaactccaggaaagtcatctccttatgagccaggaacttgtgcaaagagattgactcattacatgtatcatcaacaaaacagaccacaagataacaacattgagtactggagaaactttgtcaatgagtattttgctccaaatgctaaaaagagatggtgtgtgtcactttatggaagcggtcgtcaaactactggagttttccctcaggatgtatggcactgtgagatttgtaatcggaaacctggccgtggttttgaaacaacggttgaggtgctaccacgactatgccaaattaaatatgccagtggtaccctggaagaacttttgtacattgacatgccacatgagtcccagaatacgtcaggccagattattttggactacacgaaagcaatccaagaaagtgtttttgagcaattgcgtgtcgtacgagagggacatctacggatagttttcaatccagaccttaagatcgcatcttgggagttctgtgctaggcgtcatgaagaacttattccacggagatctataataccacaggttagtaatcttggcgcagttgtacaaaagtatcaggctgccgcacagaactcaacgagtttgtctcctcaggacatgcagaataattgtaactcgtttgttgcatgtgcccgacaattggcgaaagcactggaggttcctttagtaaatgatttaggatacacaaaacgatatgttcgctgccttcagattgccgaggtcgtaaactgtatgaaggatttaattgatcacagcaggcagactggatctggacccattgcctgcataactttccgcggaggactccaggggttagcactcttcaaccgcagcagcaaactgaggagaagcaggccattccccagagttcaaaccagagtggccaaaattctgctcctatggctggtgtgcagccttctgcctctgccaatggtgacgtgacatcaaataattctctcagttgtgcaccttctacatctgcgccttcaccatcagttgttggactcctgcaaaattcaatgaattcgagacaagatcatccaatgagcggcactaatggtggcccatataatggaggcaatgtggctattccgaaggtgaactctacaagctcactgcagtcaaatccgtctacctctttcccttccccagcaccgacaacatccaataacagcatgatgcatgctcctcaaaacacaaatcagctgagctccccaactacatcatcaagcatacctcccatgcagccacttgatactcaacctcaggaggctgagccaagcgactcgcaaagctcggttcagaagatcttgcaagatctgatgtcatcctgtgttggccactcaggtaatgatacgaagacaccaaatggactaacccatggtgttaatggggttaattgcttagttggcaatgctgtcacgaataactcgggaatgggaggaatgggatttggcgccatgaatgggttcggtcatgggatgagaacggcaatgacaaacaatccgatggcaatgggtgcaaggatgggaatgaaccacagtgcacatgacctatcgcaattgggtcagttacaccagcagcagcagcagcatcaacagcagcatgacataggaaaccagctgttgggtggatttaggtcagcgagcagcttcaataacattcaatatgactggaaaccctcacaatagagcagccagaaaccatagagtttcagtgtgatgatgcatctggcttcgctggcaatgcgtgtggagcatccacatttatggtgccataacctccccttggcccaatagcatttgggcctttgcattaatgccgccatcaaagggtaccataagcgatagcaagcatcccggctggtacatgtaagtctaactgtcagtttagctatctcgtgtgtagctccctgagttttacaacattagtcgattttaccgggagttgcaataccatcatgtgtcacattgtttgtccactctttacccccttcaatgctgtgaaaagaaaggctaagtagctgtagcatgttatagtaggtgtatgtggggtaattcctcattagctcttagatctagtctttcctctgtctatttatacggttatcattgacatattgcggaatggagagccagacttacaggatttgtcactgaaactgtccgagttgggtgcctgtcacttactgcttgctccagttatctgagtgaggaagatactctgaaagaattagagcctctctgcactttttaccatctgtcagatcctattgtgctttgtggtacggaaatgaagttgtccctcgccttttttcctcgttggatgacatgtatcttatcctctgcaattcctaagactactggtgctgatatcctcttatcctcgcgtttggagaattctctttgtagctttactgtgctgcactgttgtataattggcacactgactagatcgaagtaccaccatggaatggatgttctcctagtcttgttgctttatactctctcctccgtctt

SEQ ID NO: 38924 - DNA, 3630 bp, Zea Mays
gctagattcccgcggatctcgcgggcttgctggtggtgaaacgatggctaggtgagtacaagccgcgcgtgatctcctagtggttggtgcgagcggtggacggccaagatgatgccgtcgggcccgccgaacccgatggggcccggtcagccagtgagcggtgcggcagcgtcgctactacggacgagctccagcttgctcagtggcggtggccagcctgggatggctggaggtggtggtggcggcatgctttcttcacagtcgcccttctcctcgcttgtctccccgctcacacagtttggcggcaatggtcttcttggaggcgcctcgaatgtctcctccctgctgaaccggacgacgttcaggaatggtggccctatgccaggtccggggtcgatgcagggtggtgggatgcagatgagtacactccagcagagagctgggttggatggtgccagcgatttcattagcacgggagggtcagaccctctctcattcccgtcttcctcacaggttaatttggtcaatcagatgggatcagataatctgcaagtgacttcacagcagcaacagcagatggatgcagtgcaggatatgcagcagcagcagcagctaccaatgtcttacagccagcaacagttgccggcacaacactcgcagcagctccagcagccacaggctacagtgaagttggagaatggaggaagcatggttagcatcaaatcagagcagcagatgggacagcctgaacagaatggtcctgcccagatgatgcgaagtgctggttgtgtgaaacttgagccacagcagttgcaagcccagatgatgaggagtttaagttcagtcaagatggagcaacagagttcagattcatcagccttcttgcagcagcagcagcagcaacaacaacatcatttgttgcagctgacaaagcagattcgaaattgtccagaccttgtatcaatgggtggaccaaacacaactgcaaaccctcaagctgctgctgctgctgctgctcaactgaccctcttgcagcagcaacggctcctgcatatgcaacagcagcaccaacagcaacagattctaaagaacttgcctttgcaaagaaaccagttgcaacagcaacagcagcatcaacaacagcagcaacaacagcagttacttcgtcaacagagtctaaacatgagaactccaggaaagtcatctccttatgagccaggaacttgtgcaaagagattgactcattacatgtatcatcaacaaaacagaccacaagataacaacattgagtactggagaaactttgtcaatgagtattttgctccaaatgctaaaaagagatggtgtgtgtcactttatggaagcggtcgtcaaactactggagttttccctcaggatgtatggcactgtgagatttgtaatcggaaacctggccgtggttttgaaacaacggttgaggtgctaccacgactatgccaaattaaatatgccagtggtaccctggaagaacttttgtacattgacatgccacatgagtcccagaatacgtcaggccagattattttggactacacgaaagcaatccaagaaagtgtttttgagcaattgcgtgtcgtacgagagggacatctacggatagttttcaatccagaccttaagatcgcatcttgggagttctgtgctaggcgtcatgaagaacttattccacggagatctataataccacaggtttgttgcatgtgcccgacaattggcgaaagcactggaggttcctttagtaaatgatttaggatacacaaaacgatatgttcgctgccttcagattgccgaggtcgtaaactgtatgaaggatttaattgatcacagcaggcagactggatctggacccattgcctgcataactttccgcggaggactccaggggttagcactcttcaaccgcagcagcaaactgaggagaagcaggccattccccagagttcaaaccagagtggccaaaattctgctcctatggctggtgtgcagccttctgcctctgccaatggtgacgtgacatcaaataattctctcagttgtgcaccttctacatctgcgccttcaccatcagttgttggactcctgcaaaattcaatgaattcgagacaagatcatccaatgagcggcactaatggtggcccatataatggaggcaatgtggctattccgaaggtgaactctacaagctcactgcagtcaaatccgtctacctctttcccttccccagcaccgacaacatccaataacagcatgatgcatgctcctcaaaacacaaatcagctgagctccccaactacatcatcaagcatacctcccatgcagccacttgatactcaacctcaggaggctgagccaagcgactcgcaaagctcggttcagaagatcttgcaagatctgatgtcatcctgtgttggccactcaggtaatgatacgaagacaccaaatggactaacccatggtgttaatggggttaattgcttagttggcaatgctgtcacgaataactcgggaatgggaggaatgggatttggcgccatgaatgggttcggtcatgggatgagaacggcaatgacaaacaatccgatggcaatgggtgcaaggatgggaatgaaccacagtgcacatgacctatcgcaattgggtcagttacaccagcagcagcagcagcatcaacagcagcatgacataggaaaccagctgttgggtggatttaggtcagcgagcagcttcaataacattcaatatgactggaaaccctcacaatagagcagccagaaaccatagagtttcagtgtgatgatgcatctggcttcgctggcaatgcgtgtggagcatccacatttatggtgccataacctccccttggcccaatagcatttgggcctttgcattaatgccgccatcaaagggtaccataagcgatagcaagcatcccggctggtacatgtaagtctaactgtcagtttagctatctcgtgtgtagctccctgagttttacaacattagtcgattttaccgggagttgcaataccatcatgtgtcacattgtttgtccactctttacccccttcaatgctgtgaaaagaaaggctaagtagctgtagcatgttatagtaggtgtatgtggggtaattcctcattagctcttagatctagtctttcctctgtctatttatacggttatcattgacatattgcggaatggagagccagacttacaggatttgtcactgaaactgtccgagttgggtgcctgtcacttactgcttgctccagttatctgagtgaggaagatactctgaaagaattagagcctctctgcactttttaccatctgtcagatcctattgtgctttgtggtacggaaatgaagttgtccctcgccttttttcctcgttggatgacatgtatcttatcctctgcaattcctaagactactggtgctgatatcctcttatcctcgcgtttggagaattctctttgtagctttactgtgctgcactgttgtataattggcacactgactagatcgaagtaccaccatggaatggatgttctcctagtcttgttgctttatactctctcctccgtctt

SEQ ID NO: 38925 - DNA, 3710 bp, Zea Mays
gatctcgcgggcttgctggtggtgaaacgatggctaggtgagtacaagccgcgcgtgatctcctagtggttggtgcgagcggtggacggccaagatgatgccgtcgggcccgccgaacccgatggggcccggtcagccagtgagcggtgcggcagcgtcgctactacggacgagctccagcttgctcagtggcggtggccagcctgggatggctggaggtggtggtggcggcatgctttcttcacagtcgcccttctcctcgcttgtctccccgctcacacagtttggcggcaatggtcttcttggaggcgcctcgaatgtctcctccctgctgaaccggacgacgttcaggaatggtggccctatgccaggtccggggtcgatgcagggtggtgggatgcagatgagtacactccagcagagagctgggttggatggtgccagcgatttcattagcacgggagggtcagaccctctctcattcccgtcttcctcacaggttaatttggtcaatcagatgggatcagataatctgcaagtgacttcacagcagcaacagcagatggatgcagtgcaggatatgcagcagcagcagcagctaccaatgtcttacagccagcaacagttgccggcacaacactcgcagcagctccagcagccacaggctacagtgaagttggagaatggaggaagcatggttagcatcaaatcagagcagcagatgggacagcctgaacagaatggtcctgcccagatgatgcgaagtgctggttgtgtgaaacttgagccacagcagttgcaagcccagatgatgaggagtttaagttcagtcaagatggagcaacagagttcagattcatcagccttcttgcagcagcagcagcagcaacaacaacatcatttgttgcagctgacaaagcagattcgaaattgtccagaccttgtatcaatgggtggaccaaacacaactgcaaaccctcaagctgctgctgctgctgctgctcaactgaccctcttgcagcagcaacggctcctgcatatgcaacagcagcaccaacagcaacagattctaaagaacttgcctttgcaaagaaaccagttgcaacagcaacagcagcatcaacaacagcagcaacaacagcagttacttcgtcaacagagtctaaacatgagaactccaggaaagtcatctccttatgagccaggaacttgtgcaaagagattgactcattacatgtatcatcaacaaaacagaccacaagataacaacattgagtactggagaaactttgtcaatgagtattttgctccaaatgctaaaaagagatggtgtgtgtcactttatggaagcggtcgtcaaactactggagttttccctcaggatgtatggcactgtgagatttgtaatcggaaacctggccgtggttttgaaacaacggttgaggtgctaccacgactatgccaaattaaatatgccagtggtaccctggaagaacttttgtacattgacatgccacatgagtcccagaatacgtcaggccagattattttggactacacgaaagcaatccaagaaagtgtttttgagcaattgcgtgtcgtacgagagggacatctacggatagttttcaatccagaccttaagatcgcatcttgggagttctgtgctaggcgtcatgaagaacttattccacggagatctataataccacagtaatcttggcgcagttgtacaaaagtatcaggctgccgcacagaactcaacgagtttgtctcctcaggacatgcagaataattgtaactcgtttgttgcatgtgcccgacaattggcgaaagcactggaggttcctttagtaaatgatttaggatacacaaaacgatatgttcgctgccttcagattgccgaggtcgtaaactgtatgaaggatttaattgatcacagcaggcagactggatctggacccattgatagcctgcataactttccgcggaggactccaggggttagcactcttcaaccgcagcagcaaactgaggagaagcaggccattccccagagttcaaaccagagtggccaaaattctgctcctatggctggtgtgcagccttctgcctctgccaatggtgacgtgacatcaaataattctctcagttgtgcaccttctacatctgcgccttcaccatcagttgttggactcctgcaaaattcaatgaattcgagacaagatcatccaatgagcggcactaatggtggcccatataatggaggcaatgtggctattccgaaggtgaactctacaagctcactgcagtcaaatccgtctacctctttcccttccccagcaccgacaacatccaataacagcatgatgcatgctcctcaaaacacaaatcagctgagctccccaactacatcatcaagcatacctcccatgcagccacttgatactcaacctcaggaggctgagccaagcgactcgcaaagctcggttcagaagatcttgcaagatctgatgtcatcctgtgttggccactcaggtaatgatacgaagacaccaaatggactaacccatggtgttaatggggttaattgcttagttggcaatgctgtcacgaataactcgggaatgggaggaatgggatttggcgccatgaatgggttcggtcatgggatgagaacggcaatgacaaacaatccgatggcaatgggtgcaaggatgggaatgaaccacagtgcacatgacctatcgcaattgggtcagttacaccagcagcagcagcagcatcaacagcagcatgacataggaaaccagctgttgggtggatttaggtcagcgagcagcttcaataacattcaatatgactggaaaccctcacaatagagcagccagaaaccatagagtttcagtgtgatgatgcatctggcttcgctggcaatgcgtgtggagcatccacatttatggtgccataacctccccttggcccaatagcatttgggcctttgcattaatgccgccatcaaagggtaccataagcgatagcaagcatcccggctggtacatgtaagtctaactgtcagtttagctatctcgtgtgtagctccctgagttttacaacattagtcgattttaccgggagttgcaataccatcatgtgtcacattgtttgtccactctttacccccttcaatgctgtgaaaagaaaggctaagtagctgtagcatgttatagtaggtgtatgtggggtaattcctcattagctcttagatctagtctttcctctgtctatttatacggttatcattgacatattgcggaatggagagccagacttacaggatttgtcactgaaactgtccgagttgggtgcctgtcacttactgcttgctccagttatctgagtgaggaagatactctgaaagaattagagcctctctgcactttttaccatctgtcagatcctattgtgctttgtggtacggaaatgaagttgtccctcgccttttttcctcgttggatgacatgtatcttatcctctgcaattcctaagactactggtgctgatatcctcttatcctcgcgtttggagaattctctttgtagctttactgtgctgcactgttgtataattggcacactgactagatcgaagtaccaccatggaatggatgttctcctagtcttgttgctttatactctctcctccgtctt

SEQ ID NO: 38926 - DNA, 3683 bp, Zea Mays
gatctcgcgggcttgctggtggtgaaacgatggctaggtgagtacaagccgcgcgtgatctcctagtggttggtgcgagcggtggacggccaagatgatgccgtcgggcccgccgaacccgatggggcccggtcagccagtgagcggtgcggcagcgtcgctactacggacgagctccagcttgctcagtggcggtggccagcctgggatggctggaggtggtggtggcggcatgctttcttcacagtcgcccttctcctcgcttgtctccccgctcacacagtttggcggcaatggtcttcttggaggcgcctcgaatgtctcctccctgctgaaccggacgacgttcaggaatggtggccctatgccaggtccggggtcgatgcagggtggtgggatgcagatgagtacactccagcagagagctgggttggatggtgccagcgatttcattagcacgggagggtcagaccctctctcattcccgtcttcctcacaggttaatttggtcaatcagatgggatcagataatctgcaagtgacttcacagcagcaacagcagatggatgcagtgcaggatatgcagcagcagcagcagctaccaatgtcttacagccagcaacagttgccggcacaacactcgcagcagctccagcagccacaggctacagtgaagttggagaatggaggaagcatggttagcatcaaatcagagcagcagatgggacagcctgaacagaatggtcctgcccagatgatgcgaagtgctggttgtgtgaaacttgagccacagcagttgcaagcccagatgatgaggagtttaagttcagtcaagatggagcaacagagttcagattcatcagccttcttgcagcagcagcagcagcaacaacaacatcatttgttgcagctgacaaagcagattcgaaattgtccagaccttgtatcaatgggtggaccaaacacaactgcaaaccctcaagctgctgctgctgctgctgctcaactgaccctcttgcagcagcaacggctcctgcatatgcaacagcagcaccaacagcaacagattctaaagaacttgcctttgcaaagaaaccagttgcaacagcaacagcagcatcaacaacagcagcaacaacagcagttacttcgtcaacagagtctaaacatgagaactccaggaaagtcatctccttatgagccaggaacttgtgcaaagagattgactcattacatgtatcatcaacaaaacagaccacaagataacaacattgagtactggagaaactttgtcaatgagtattttgctccaaatgctaaaaagagatggtgtgtgtcactttatggaagcggtcgtcaaactactggagttttccctcaggatgtatggcactgtgagatttgtaatcggaaacctggccgtggttttgaaacaacggttgaggtgctaccacgactatgccaaattaaatatgccagtggtaccctggaagaacttttgtacattgacatgccacatgagtcccagaatacgtcaggccagattattttggactacacgaaagcaatccaagaaagtgtttttgagcaattgcgtgtcgtacgagagggacatctacggatagttttcaatccagaccttaagatcgcatcttgggagttctgtgctaggcgtcatgaagaacttattccacggagatctataataccacaggttagtaatcttggcgcagttgtacaaaagtatcaggctgccgcacagaactcaacgagtttgtctcctcaggacatgcagaataattgtaactccactggaggttcctttagtaaatgatttaggatacacaaaacgatatgttcgctgccttcagattgccgaggtcgtaaactgtatgaaggatttaattgatcacagcaggcagactggatctggacccattgatagcctgcataactttccgcggaggactccaggggttagcactcttcaaccgcagcagcaaactgaggagaagcaggccattccccagagttcaaaccagagtggccaaaattctgctcctatggctggtgtgcagccttctgcctctgccaatggtgacgtgacatcaaataattctctcagttgtgcaccttctacatctgcgccttcaccatcagttgttggactcctgcaaaattcaatgaattcgagacaagatcatccaatgagcggcactaatggtggcccatataatggaggcaatgtggctattccgaaggtgaactctacaagctcactgcagtcaaatccgtctacctctttcccttccccagcaccgacaacatccaataacagcatgatgcatgctcctcaaaacacaaatcagctgagctccccaactacatcatcaagcatacctcccatgcagccacttgatactcaacctcaggaggctgagccaagcgactcgcaaagctcggttcagaagatcttgcaagatctgatgtcatcctgtgttggccactcaggtaatgatacgaagacaccaaatggactaacccatggtgttaatggggttaattgcttagttggcaatgctgtcacgaataactcgggaatgggaggaatgggatttggcgccatgaatgggttcggtcatgggatgagaacggcaatgacaaacaatccgatggcaatgggtgcaaggatgggaatgaaccacagtgcacatgacctatcgcaattgggtcagttacaccagcagcagcagcagcatcaacagcagcatgacataggaaaccagctgttgggtggatttaggtcagcgagcagcttcaataacattcaatatgactggaaaccctcacaatagagcagccagaaaccatagagtttcagtgtgatgatgcatctggcttcgctggcaatgcgtgtggagcatccacatttatggtgccataacctccccttggcccaatagcatttgggcctttgcattaatgccgccatcaaagggtaccataagcgatagcaagcatcccggctggtacatgtaagtctaactgtcagtttagctatctcgtgtgtagctccctgagttttacaacattagtcgattttaccgggagttgcaataccatcatgtgtcacattgtttgtccactctttacccccttcaatgctgtgaaaagaaaggctaagtagctgtagcatgttatagtaggtgtatgtggggtaattcctcattagctcttagatctagtctttcctctgtctatttatacggttatcattgacatattgcggaatggagagccagacttacaggatttgtcactgaaactgtccgagttgggtgcctgtcacttactgcttgctccagttatctgagtgaggaagatactctgaaagaattagagcctctctgcactttttaccatctgtcagatcctattgtgctttgtggtacggaaatgaagttgtccctcgccttttttcctcgttggatgacatgtatcttatcctctgcaattcctaagactactggtgctgatatcctcttatcctcgcgtttggagaattctctttgtagctttactgtgctgcactgttgtataattggcacactgactagatcgaagtaccaccatggaatggatgttctcctagtcttgttgctttatactctctcctccgtctt

SEQ ID NO: 38927 - DNA, 3270 bp, Zea Mays
cacccgcgcacgccgcaaaaacgaatccggaatccctgccggagcacaaatagagaaagatggcggcggccccgtccccctccgtccccgcctgcagcgacctcccggctgccgtatccgccttcgccgacgcgttcgtggactttgccgtgtccggcatcttcttcccgaccttcccgtcctcctcctcgccccctcctcgcccgaagactccgaccaccttcctcccttccttatcccggctcgtcgccatcggagatctccacggggacctgcccaagtccctctccgcgctccgcctcgccggcctcgtgcccccgtcttgcacccccgactccccctccgcctcctcctcatgggccgcggggcccaccctcgccgtccagctcggcgacatcctcgaccgcggcggcgacgagctccgcctcctatacctactccgccgcctctccctctccgcagagagccgcggaggcgcgttcctccccatcctcggcaaccacgaggtcatgaacgtctccggcgacttccgcttcgccacgccgcagggttttcaggagttctccgcctgggcagggtggtaccgcgcggggctcgccatcaagcgccgctgcggcgagcacctcgacccgcagccgaggaacccctttctcggcgtgcccaagtccttccccggcgtcaagccggagttctgggacgggatgcggtcccgcctcgccgccctccgacccgacgggcccattgcgcgccggttcctggccgacctccctaccgtgcttgtagtgggcgactcggtgttcgtccatggagggctcctcgaggccaacgtcgagtacggcctggagcggatcaatgcggaggtcagcgagtggatccgcggcgagggtggcgacaatgccagggcgcccgagtatgtgcgaggccgggacgccgtggtctggctgaggaggttctccgacggcttcgattgtgactgcaagaggctggagggggtgcttgggatgatccctggggccaagagaatggtgatggggcacacaattcagacagtggggatcaatgcagtgtgtagcgcacaggcggtgagggtggatgtggggctgtcaaggggatgcgggaacgggctgcctgaggtgcttgagatcaatgctggtggcactgatgtcagggtgatcacgacgcctccctcagaggcctggatgtataggaagcaagaggtggagaaggctgccgcagcggtcgcggagaagagcgttgaggtgaaggatgggcttgcgttgctggtaagagagagccatgggttaaaagaggtaggagttaaggcttaggctaggattgtttgggtaacccacaattgggattgctttggtgaatttggtaaagaagactagttatgagagagattgtttgtaggaatcattacctgttagtgggttggtatccacaaaagaaaggaagatctaccattatgttttatttttcaagatacaatagtgcattgctgatatatatacctacaattaacggtccaattgtgcagttgtttttgaacttttgtgtagtatatttccccaatgttacttttctgttaatgctgatcatgaacgattttggtctgatttggtgtagagaatcaacagtctctagaacacttttatggctgattggctacagttcggctctgtttttgtcatatcatttagtagccaagttcctactgaagattttagtacggatcctttctaattaagctcactgtttggaaattgtgagttgaagctatcatttgattctttggagcccatggatttgacatcaatgttaagttttcatttgtacaaacaccataatcaatgattgatgattgcacaagcaaataaccagttggagtgctgaagtgacagaccagctgaaacgagtataacacaacagaagtttggtaattatgagaagcatcaaggaaatagtcttctcgtagtgatcatggcaacacttactgacaagttgatgaagttgagggaatttatagcaagatagagagttgttgaggtacttctgaaatggagtgcgcctgcaacgtgtgtgagggtgataggctatgtgcatatcctaacaatcagtgaggagtttgattactacccatatcgatgtgtatgttgtgcggaaaaggaatttgacaagtggatagtattgccatgcggaacagcaagtagacaaggaaaggtatctcgaatgtgatttgcatttgcatcctagctgtaaccccttttttccacaaattttctccccactgggtcgttgaattggtctcgtgttcctatctcgtgtactgtgttcctacctcatcttgtcttgtctccaaactgttttttgtagatgttttccatgtttggtccagcaattttctcacatgctcaatgcacgcggatggcgatgtgatcagacttctcaaggcagtttgcagtgatgtggacacctaaatttatccaccgatttgttgtcttgtgctctgttgtgtctgatgtgatgtgcaatcttttctttttgtttttgcggcggcctagtggaaatctcttcgacagttctattaccttttgttgttggtacatagtccaatttgtgctggcaggtgctctaaatgctcataataaactggaaaaagaacatggtggctgccgaagtttgcgtgggcaatcaggggtttccttctctcgagtcctggcagaagtgttgaagaattgattgagtattcagcacggtggaattttcagagttgcagaacttcgaagcgaaatactgactgaagtgcctgaaaatacaagaatctgaagacgatcagctcggcacattgtcgtggggcggcagcccagagcatggagagttgaaggccatagggataggctcagggttaggattagtggataaagattagattatataagattgagttagttacttaggattagattagataagattgtgttagttacttactttggattagattagataagattgagttagtaacttgtgggcaagtctttgtatctatataaggatgggttgtacctccttaaagaggaatcaatcaatgaatcaataaagaagaattaggtcttgtttcaatctcgcgagataaactttagcagctttttttagctacttttagccatttgtaatctaaacaggagagctaatggtggtaattaaagctaaactttagcacttcaattcatatagctaaagtttagcaggaagctaaagtttatc

SEQ ID NO: 38928 - DNA, 3475 bp, Zea Mays
cacccgcgcacgccgcaaaaacgaatccggaatccctgccggagcacaaatagagaaagatggcggcggccccgtccccctccgtccccgcctgcagcgacctcccggctgccgtatccgccttcgccgacgcgttcgtggactttgccgtgtccggcatcttcttcccgaccttcccgtcctcctcctcgccccctcctcgcccgaagactccgaccaccttcctcccttccttatcccggctcgtcgccatcggagatctccacggggacctgcccaagtccctctccgcgctccgcctcgccggcctcgtgcccccgtcttgcacccccgactccccctccgcctcctcctcatgggccgcggggcccaccctcgccgtccagctcggcgacatcctcgaccgcggcggcgacgagctccgcctcctatacctactccgccgcctctccctctccgcagagagccgcggaggcgcgttcctccccatcctcggcaaccacgaggtcatgaacgtctccggcgacttccgcttcgccacgccgcagggttttcaggagttctccgcctgggcagggtggtaccgcgcggggctcgccatcaagcgccgctgcggcgagcacctcgacccgcagccgaggaacccctttctcggcgtgcccaagtccttccccggcgtcaagccggagttctgggacgggatgcggtcccgcctcgccgccctccgacccgacgggcccattgcgcgccggttcctggccgacctccctaccgtgcttgtagtgggcgactcggtgttcgtccatggagggctcctcgaggccaacgtcgagtacggcctggagcggatcaatgcggaggtcagcgagtggatccgcggcgagggtggcgacaatgccagggcgcccgagtatgtgcgaggccgggacgccgtggtctggctgaggaggttctccgacggcttcgattgtgactgcaagaggctggagggggtgcttgggatgatccctggggccaagagaatggtgatggggcacacaattcagacagtggggatcaatgcagtgtgtagcgcacaggcggtgagggtggatgtggggctgtcaaggggatgcgggaacgggctgcctgaggtgcttgagatcaatgctggtggcactgatgtcagggtgatcacgacgcctccctcagaggcctggatgtataggaagcaagaggtggagaaggctgccgcagcggtcgcggagaagagcgttgaggtgaaggatgggcttgcgttgctggtaagagagagccatgggttaaaagaggtaggagttaaggcttaggctaggattgtttgggtaacccacaattgggattgctttggtgaatttggtaaagaagactagttatgagagagattgtttgtaggaatcattacctgttagtgggttggtatccacaaaagaaaggaagatctaccattatgttttatttttcaagatacaatagtgcattgctgatatatatacctacaattaacggtccaattgtgcagttgtttttgaacttttgtgtagtatatttccccaatgttacttttctgttaatgctgatcatgaacgattttggtctgatttggtgtagagaatcaacagtctctagaacacttttatggctgattggctacagttcggctctgtttttgtcatatcatttagtagccaagttcctactgaagattttagtacggatcctttctaattaagctcactgtttggaaattgtgagttgaagctatcatttgattctttggagcccatggatttgacatcaatgttaagttttcatttgtacaaacaccataatcaatgattgatgattgcacaagcaaataaccagttggagtgctgaagtgacagaccagctgaaacgagtataacacaacagaagtttggtaattatgagaagcatcaaggaaatagtcttctcgtagtgatcatggcaacacttactgacaagttgatgaagttgagggaatttatagcaagatagagagttgttgaggtacttctgaaatggaggtaatggtcattatctccccattctccatatttattgttcaacgtcacactaccaatgctgattgatgtgtagaagttgagatgtgcaaatttctgcagtcgttttagttgaaacatactgcataaccttgtcagacatgatcacatatgaaattctgctaatccagcctaaaatatgtttcctgaaacatgattgctgttccagtgcgcctgcaacgtgtgtgagggtgataggctatgtgcatatcctaacaatcagtgaggagtttgattactacccatatcgatgtgtatgttgtgcggaaaaggaatttgacaagtggatagtattgccatgcggaacagcaagtagacaaggaaaggtatctcgaatgtgatttgcatttgcatcctagctgtaaccccttttttccacaaattttctccccactgggtcgttgaattggtctcgtgttcctatctcgtgtactgtgttcctacctcatcttgtcttgtctccaaactgttttttgtagatgttttccatgtttggtccagcaattttctcacatgctcaatgcacgcggatggcgatgtgatcagacttctcaaggcagtttgcagtgatgtggacacctaaatttatccaccgatttgttgtcttgtgctctgttgtgtctgatgtgatgtgcaatcttttctttttgtttttgcggcggcctagtggaaatctcttcgacagttctattaccttttgttgttggtacatagtccaatttgtgctggcaggtgctctaaatgctcataataaactggaaaaagaacatggtggctgccgaagtttgcgtgggcaatcaggggtttccttctctcgagtcctggcagaagtgttgaagaattgattgagtattcagcacggtggaattttcagagttgcagaacttcgaagcgaaatactgactgaagtgcctgaaaatacaagaatctgaagacgatcagctcggcacattgtcgtggggcggcagcccagagcatggagagttgaaggccatagggataggctcagggttaggattagtggataaagattagattatataagattgagttagttacttaggattagattagataagattgtgttagttacttactttggattagattagataagattgagttagtaacttgtgggcaagtctttgtatctatataaggatgggttgtacctccttaaagaggaatcaatcaatgaatcaataaagaagaattaggtcttgtttcaatctcgcgagataaactttagcagctttttttagctacttttagccatttgtaatctaaacaggagagctaatggtggtaattaaagctaaactttagcacttcaattcatatagctaaagtttagcaggaagctaaagtttatc

SEQ ID NO: 38929 - DNA, 2391 bp, Zea Mays
cacccgcgcacgccgcaaaaacgaatccggaatccctgccggagcacaaatagagaaagatggcggcggccccgtccccctccgtccccgcctgcagcgacctcccggctgccgtatccgccttcgccgacgcgttcgtggactttgccgtgtccggcatcttcttcccgaccttcccgtcctcctcctcgccccctcctcgcccgaagactccgaccaccttcctcccttccttatcccggctcgtcgccatcggagatctccacggggacctgcccaagtccctctccgcgctccgcctcgccggcctcgtgcccccgtcttgcacccccgactccccctccgcctcctcctcatgggccgcggggcccaccctcgccgtccagctcggcgacatcctcgaccgcggcggcgacgagctccgcctcctatacctactccgccgcctctccctctccgcagagagccgcggaggcgcgttcctccccatcctcggcaaccacgaggtcatgaacgtctccggcgacttccgcttcgccacgccgcagggttttcaggagttctccgcctgggcagggtggtaccgcgcggggctcgccatcaagcgccgctgcggcgagcacctcgacccgcagccgaggaacccctttctcggcgtgcccaagtccttccccggcgtcaagccggagttctgggacgggatgcggtcccgcctcgccgccctccgacccgacgggcccattgcgcgccggttcctggccgacctccctaccgtgcttgtagtgggcgactcggtgttcgtccatggagggctcctcgaggccaacgtcgagtacggcctggagcggatcaatgcggaggtcagcgagtggatccgcggcgagggtggcgacaatgccagggcgcccgagtatgtgcgaggccgggacgccgtggtctggctgaggaggttctccgacggcttcgattgtgactgcaagaggctggagggggtgcttgggatgatccctggggccaagagaatggtgatggggcacacaattcagacagtggggatcaatgcagtgtgtagcgcacaggcggtgagggtggatgtggggctgtcaaggggatgcgggaacgggctgcctgaggtgcttgagatcaatgctggtggcactgatgtcagggtgatcacgacgcctccctcagaggcctggatgtataggaagcaagaggtggagaaggctgccgcagcggtcgcggagaagagcgttgaggtgaaggatgggcttgcgttgctggtaagagagagccatgggttaaaagaggtaggagttaaggcttaggctaggattgtttgggtaacccacaattgggattgctttggtgaatttggtaaagaagactagttatgagagagattgtttgtaggaatcattacctgttagtgggttggtatccacaaaagaaaggaagatctaccattatgttttatttttcaagatacaatagtgcattgctgatatatatacctacaattaacggtccaattgtgcagttgtttttgaacttttgtgtagtatatttccccaatgttacttttctgttaatgctgatcatgaacgattttggtctgatttggtgtagagaatcaacagtctctagaacacttttatggctgattggctacagttcggctctgtttttgtcatatcatttagtagccaagttcctactgaagattttagtacggatcctttctaattaagctcactgtttggaaattgtgagttgaagctatcatttgattctttggagcccatggatttgacatcaatgttaagttttcatttgtacaaacaccataatcaatgattgatgattgcacaagcaaataaccagttggagtgctgaagtgacagaccagctgaaacgagtataacacaacagaagtttggtaattatgagaagcatcaaggaaatagtcttctcgtagtgatcatggcaacacttactgacaagttgatgaagttgagggaatttatagcaagatagagagttgttgaggtacttctgaaatggaggtgctctaaatgctcataataaactggaaaaagaacatggtggctgccgaagtttgcgtgggcaatcaggggtttccttctctcgagtcctggcagaagtgttgaagaattgattgagtattcagcacggtggaattttcagagttgcagaacttcgaagcgaaatactgactgaagtgcctgaaaatacaagatctggagcaggctcgatctgctatcctttagctctgtgatctactcgcggcaaaggtggagtcagaccgccgatcagcagcggcaacgcgactgcatgcggttgcatgtggcttcctggcgtggcatcaag

SEQ ID NO: 38930 - DNA, 2457 bp, Zea Mays
gcaaaaacgaatccggaatccctgccggagcacaaatagagaaagatggcggcggccccgtccccctccgtccccgcctgcagcgacctcccggctgccgtatccgccttcgccgacgcgttcgtggactttgccgtgtccggcatcttcttcccgaccttcccgtcctcctcctcgccccctcctcgcccgaagactccgaccaccttcctcccttccttatcccggctcgtcgccatcggagatctccacggggacctgcccaagtccctctccgcgctccgcctcgccggcctcgtgcccccgtcttgcacccccgactccccctccgcctcctcctcatgggccgcggggcccaccctcgccgtccagctcggcgacatcctcgaccgcggcggcgacgagctccgcctcctatacctactccgccgcctctccctctccgcagagagccgcggaggcgcgttcctccccatcctcggcaaccacgaggtcatgaacgtctccggcgacttccgcttcgccacgccgcagggttttcaggagttctccgcctgggcagggtggtaccgcgcggggctcgccatcaagcgccgctgcggcgagcacctcgacccgcagccgaggaacccctttctcggcgtgcccaagtccttccccggcgtcaagccggagttctgggacgggatgcggtcccgcctcgccgccctccgacccgacgggcccattgcgcgccggttcctggccgacctccctaccgtgcttgtagtgggcgactcggtgttcgtccatggagggctcctcgaggccaacgtcgagtacggcctggagcggatcaatgcggaggtcagcgagtggatccgcggcgagggtggcgacaatgccagggcgcccgagtatgtgcgaggccgggacgccgtggtctggctgaggaggttctccgacggcttcgattgtgactgcaagaggctggagggggtgcttgggatgatccctggggccaagagaatggtgatggggcacacaattcagacagtggggatcaatgcagtgtgtagcgcacaggcggtgagggtggatgtggggctgtcaaggggatgcgggaacgggctgcctgaggtgcttgagatcaatgctggtggcactgatgtcagggtgatcacgacgcctccctcagaggcctggatgtataggaagcaagaggtggagaaggctgccgcagcggtcgcggagaagagcgttgaggtgaaggatgggcttgcgttgctggtaagagagagccatgggttaaaagaggtaggagttaaggcttaggctaggattgtttgggtaacccacaattgggattgctttggtgaatttggtaaagaagactagttatgagagagattgtttgtaggaatcattacctgttagtgggttggtatccacaaaagaaaggaagatctaccattatgttttatttttcaagatacaatagtgcattgctgatatatatacctacaattaacggtccaattgtgcagttgtttttgaacttttgtgtagtatatttccccaatgttacttttctgttaatgctgatcatgaacgattttggtctgatttggtgtagagaatcaacagtctctagaacacttttatggctgattggctacagttcggctctgtttttgtcatatcatttagtagccaagttcctactgaagattttagtacggatcctttctaattaagctcactgtttggaaattgtgagttgaagctatcatttgattctttggagcccatggatttgacatcaatgttaagttttcatttgtacaaacaccataatcaatgattgatgattgcacaagcaaataaccagttggagtgctgaagtgacagaccagctgaaacgagtataacacaacagaagtttggtaattatgagaagcatcaaggaaatagtcttctcgtagtgatcatggcaacacttactgacaagttgatgaagttgagggaatttatagcaagatagagagttgttgaggtacttctgaaatggagatgttttccatgtttggtccagcaattttctcacatgctcaatgcacgcggatggcgatgtgatcagacttctcaaggcagtttgcagtgatgtggacacctaaatttatccaccgatttgttgtcttgtgctctgttgtgtctgatgtgatgtgcaatcttttctttttgtttttgcggcggcctagtggaaatctcttcgacagttctattaccttttgttgttggtacatagtccaatttgtgctggcaggtgctctaaatgctcataataaactggaaaaagaacatggtggctgccgaagtttgcgtgggcaatcaggggtttccttctctcgagtcctggcagaagtgttgaagaattgattgagtattcagcacggtggaattttcagagttgcagaa

SEQ ID NO: 38931 - DNA, 2361 bp, Zea Mays
gcaaaaacgaatccggaatccctgccggagcacaaatagagaaagatggcggcggccccgtccccctccgtccccgcctgcagcgacctcccggctgccgtatccgccttcgccgacgcgttcgtggactttgccgtgtccggcatcttcttcccgaccttcccgtcctcctcctcgccccctcctcgcccgaagactccgaccaccttcctcccttccttatcccggctcgtcgccatcggagatctccacggggacctgcccaagtccctctccgcgctccgcctcgccggcctcgtgcccccgtcttgcacccccgactccccctccgcctcctcctcatgggccgcggggcccaccctcgccgtccagctcggcgacatcctcgaccgcggcggcgacgagctccgcctcctatacctactccgccgcctctccctctccgcagagagccgcggaggcgcgttcctccccatcctcggcaaccacgaggtcatgaacgtctccggcgacttccgcttcgccacgccgcagggttttcaggagttctccgcctgggcagggtggtaccgcgcggggctcgccatcaagcgccgctgcggcgagcacctcgacccgcagccgaggaacccctttctcggcgtgcccaagtccttccccggcgtcaagccggagttctgggacgggatgcggtcccgcctcgccgccctccgacccgacgggcccattgcgcgccggttcctggccgacctccctaccgtgcttgtagtgggcgactcggtgttcgtccatggagggctcctcgaggccaacgtcgagtacggcctggagcggatcaatgcggaggtcagcgagtggatccgcggcgagggtggcgacaatgccagggcgcccgagtatgtgcgaggccgggacgccgtggtctggctgaggaggttctccgacggcttcgattgtgactgcaagaggctggagggggtgcttgggatgatccctggggccaagagaatggtgatggggcacacaattcagacagtggggatcaatgcagtgtgtagcgcacaggcggtgagggtggatgtggggctgtcaaggggatgcgggaacgggctgcctgaggtgcttgagatcaatgctggtggcactgatgtcagggtgatcacgacgcctccctcagaggcctggatgtataggaagcaagaggtggagaaggctgccgcagcggtcgcggagaagagcgttgaggtgaaggatgggcttgcgttgctggtaagagagagccatgggttaaaagaggtaggagttaaggcttaggctaggattgtttgggtaacccacaattgggattgctttggtgaatttggtaaagaagactagttatgagagagattgtttgtaggaatcattacctgttagtgggttggtatccacaaaagaaaggaagatctaccattatgttttatttttcaagatacaatagtgcattgctgatatatatacctacaattaacggtccaattgtgcagttgtttttgaacttttgtgtagtatatttccccaatgttacttttctgttaatgctgatcatgaacgattttggtctgatttggtgtagagaatcaacagtctctagaacacttttatggctgattggctacagttcggctctgtttttgtcatatcatttagtagccaagttcctactgaagattttagtacggatcctttctaattaagctcactgtttggaaattgtgagttgaagctatcatttgattctttggagcccatggatttgacatcaatgttaagttttcatttgtacaaacaccataatcaatgattgatgattgcacaagcaaataaccagttggagtgctgaagtgacagaccagctgaaacgagtataacacaacagaagtttggtaattatgagaagcatcaaggaaatagtcttctcgtagtgatcatggcaacacttactgacaagttgatgaagttgagggaatttatagcaagatagagagttgttgaggtacttctgaaatggagtgcgcctgcaacgtgtgtgagggtgataggctatgtgcatatcctaacaatcagtgaggagtttgattactacccatatcgatgtgtatgttgtgcggaaaaggaatttgacaagtggatagtattgccatgcggaacagcaagtagacaaggaaaggtgctctaaatgctcataataaactggaaaaagaacatggtggctgccgaagtttgcgtgggcaatcaggggtttccttctctcgagtcctggcagaagtgttgaagaattgattgagtattcagcacggtggaattttcagagttgcagaa

SEQ ID NO: 38932 - DNA, 1731 bp, Zea Mays
agggatcacccagggagaatagagtttggtcggtctgaggcacatgatgatggccaacgcgaagctccacaagcaggccctgctgccgccgcggagccccttcccgacggcggcgccgtacgccgaccgcggcccaatcgcgcggccgcaggttggcgccacgcaccaccgccacggccaccaccagcgcacgtcgtccgagagcttcatcgaggagcagccgccgtcgtggctcgacgacctgctcaacgagccagagacgcccgcggcgcggcagagcggccgggctgggcaccgcaggtcgtccagtgactcgtttgcgttgtttgacggtggagctgctggtgctggtgcttacgccaatggtttcgaggggatggggagaggaggtgggcaacctgcgccgtggggcggtgtgcaggagtactatgccaagctggccccgattgggagggcacatggccggccgtgggagcaaggcatgccgaattcggcgggcttcaggcatggtggtggcctgccaatgcccacaaaagataaggttggtgggcatcatgggccaccgaaagtgtcgagggagcatgaccatggcatggacaagagaactgatgatgctggccatgatcaaaaggttggagccaaggagggtgtgccgccgaagcatgcacagtcagaggcggacaacaagcgtgctaaacagcaatatgctcagaggtctcgtgtccggaagctgcagtatattgcagagcttgagagtagagtccaggcattacagtcagaaggggtagaagtgtctgctgaaatggagttccttagccagcagaatatcatgctagacctggaaaacaaagccttgaagcaaagagtggagagtctagcacaggaacaacttattaagcgttttcaacaggagatgtttgagcgggaaattggtcgtctcagaacaatatatcagcaacagcagcaacaacaggctcctgctcttgttcgtagtaacagcagggaccttgatgtgcagttcgccaacttgtctctgaaacacaaagaccccaacacgggccgggatgctctctctgggcctcttcgtacttagttctttccatccttccgttcttgtgggttctatcagtggccaccactgtgtctgtcatctccaccaagaaaggagaagtgcacttggattgtgtgaaaaacaccggaaaaaggctaatagctatggatctgatgtttattatttcgggatatgcacctggcggtcatcctcagctcgcgtccattggtgatgctcgaccagtcggcggtgtttagggtttttgtttttagctagatgcttttcaagcatcattgtaccatttttcatgctagggttctaatctgttactacccccgttttcctgaactgtgtgcttcaagcatcttagtcatgtttggattagttctgcgttatcagtgcctcagtggaatgtggagcactaggcagcatcaggtaagttgctttggagatgtgccacatccttgacaactgcatgttctgctattatttcttagtactcaataagctagtgcaaatgaggtattagcgatcttcagatttcaggttgttcttgatgtactcctatgaatatatctcaattgctcaacgtttcctttttatgttaaaatttggctccataattgtatattttgaatcaagcagtgctaaggtatggttgatttaatttattggcggca

SEQ ID NO: 38933 - DNA, 1272 bp, Zea Mays
gttttttaagaaactgtgaatctaatttatataaaccgagtcataaactgatatatatatttggaaccatctcagtttttataaaccatttcttaaaaactgggtggtttcaaatagtccctagcccctaagtgtatcatactcttcgtcttattggatattagaatataatactttggactcttaatagccttagataattaacatgcttattgtgaatgggagacgtcgcccgctttaactaatgcacggaagaagagacatccgtgtcgtttcagatacctactacttgggacgagagatttgaacgtcgcgcgcggtggttataaaattgcattgttcccctgtccacctctttcacttcttcagatctccctggcctctccggaagcaagaacgcctacctgctttaagcaaggatgaagatctttgtgaaaagctcaaccggtcggacagtatgcctcagggtacacccagcagataccgtgcataccgtgaagacaaagattcaggaacagcaataccttgtttatgatggagtgcagctcgaggacgatcgtacactggctgactacggcatcgaacataaatctgtgcttgacctcaaagaaaagatgcaaatctttatagtggaaacactagcaggcacaaccatcactcttgaggttgaaagttcagagactatcgacaacatcaaggaaaggattaaagaaagtgagggctttcccaagggtcagcagtgtctcatatttgacaacaagcagctagaggacaacagcaccttggcggacaacaacatttccgaggggtctaccctcctccttgtcctccgccacatgcttctcagaggaactatgcatatctccatatacatgttctcgggaaaggtagtcactcttgaagttaagaggtcagatacgatcgataatgtcaaattaaagatctatgagaagacccatactcggcacatacagcaaatgataatatttgatgggatcaagctggagggcagcaagacccttgcatactatggcatagaggatggggataccctacatatgatgccctgcttgtgtggctgctaaggttgatgtattgcatggtcatcagtcatctttctttcgtgcattggtgtgtgttatcagtaaaagcagcattgtattgctgcagcctctttccagtactgctggtctatgagtaaaactatcctgagatcatatggtaacagtctcctacgatctgcagttactataaaacgctgctttcttttct

SEQ ID NO: 38934 - DNA, 908 bp, Zea Mays
gtcaaaacagattcagatgaccagacacacaccttgcttgtatcggacaatctcgatgaagatctttgtgaaaagctcaaccggtcggacagtatgcctcagggtacacccagcagataccgtgcataccgtgaagacaaagattcaggaacagcaataccttgtttatgatggagtgcagctcgaggacgatcgtacactggctgactacggcatcgaacataaatctgtgcttgacctcaaagaaaagatgcaaatctttatagtggaaacactagcaggcacaaccatcactcttgaggttgaaagttcagagactatcgacaacatcaaggaaaggattaaagaaagtgagggctttcccaagggtcagcagtgtctcatatttgacaacaagcagctagaggacaacagcaccttggcggacaacaacatttccgaggggtctaccctcctccttgtcctccgccacatgcttctcagaggaactatgcatatctccatatacatgttctcgggaaaggtagtcactcttgaagttaagaggtcagatacgatcgataatgtcaaattaaagatctatgagaagacccatactcggcacatacagcaaatgataatatttgatgggatcaagctggagggcagcaagacccttgcatactatggcatagaggatggggataccctacatatgatgccctgcttgtgtggctgctaaggttgatgtattgcatggtcatcagtcatctttctttcgtgcattggtgtgtgttatcagtaaaagcagcattgtattgctgcagcctctttccagtactgctggtctatgagtaaaactatcctgagatcatatggtaacagtctcctacgatctgcagttactataaaacgctgctttcttttct

SEQ ID NO: 38935 - DNA, 4758 bp, Zea Mays
gtcttccctcctcctgtccagtgtccaggtctcatttgggcccaaaggcagaaccggactcgccacctcctgcgcctcccctcttcctgtccaggcctccagggtttaggctcgccgccgtcccgtcccgtcccgtcccgcctcgcccaccgcgcgccgcgatgcctccttccaagggcaagaagaagaacccatcgacgtcgccgcggccgtccccacgcacgccttcatcttgtccctccgctggctccggaactggcgatggcgagagaagcgtcgacctcccatccatcgccgccgccgccgcggagcagttcccggcgctcgtgccacgcggcggtagtggctactttgctggcatcgttgccgaagtggcccctagggatgggagccgcggcggccgcttggggaggctctggctctccgaggccgctatggtcggcgccgggatgcggcctgggtgctttgtctccgtctcactaatttcgtcaagcagtgatcagttagatggttttccattaattaatttatttgaggagtgcaacagattctttgatcttgatctggacaatgatctcctttatggtgaagctgggaaaaactttgtggttgctacagttctcccctcgcgtgaggttccaaagaatggtatcaagctctcttgggatcttgcttgtgttttgggacacccttttgtaggtcgatcattgtttatttgccccttatgtacacttcaggccccaaagcgtagtgatgatgttcatattttacgggtaatgaaatgcaagaatctttatcttagcctagttccacctaatgttggatcttccaaaggcattgaatcagagtctgactaccatcctgaaagaagcgcaatggttatggagacacctaagaggggtccttcaactccactgcgtaagaaggaatcgcatcactttgcttccaacaatggctcttcaatgtgcttggatccaaccactgcaagatcagcactagcagatgagaaaatcaatgagttgttgcatacttcagcattgtggtggctcaatggtagacacttgcttaaaggaaactttgttcctctctcaatatgcggaaaactgtctctatttgtggtcatgggagcagaaccagatagttcttctcaagatgttttgtatgagaatgggaatacactgtctaatgcagaggattcaactaaatcccaggaaaacccagttttattccttgttgacagaaccacaaaagttcatttatctgattctgtctgcacaaagcagcttgactcagataaaccgggtttaccatcagaacctcacgagtatgatgataaaagaaatgcagatttcaatcattctccaacacttggtgggttatctaaagagtcagcaaccataaaaggaataatttcattttcactagctgatcaaattggtctgccaagatacaaaggtattcttctttatggtccacctggaacagggaagacctctcttgcttcttcctgtgcctatgatgcaggggtcaacctttttacaatcaatggaccagagatcattagtcattattacggagaaagcgagcaatctttgtacgatgttttcacttcagccaagcaagcagcacctgctgtgatatttatcgatgaattggatgcgattgctccatcaaggaaggatgggagtgaggcgttatctattagaatggtagccactctgttaaaactgatggatgagattggccctagtgaccgtgttctcttgattgctgctacgaatcgacctgatagcattgatcctgcattgcgacgtcctggaagattggataaagaaattgaaataggagtgccatccccaggacagaggatggacatacttcgccaccttctaattggagttcatcactctctgaccaatgaagaagttgagtctgttgctctagcaacccatggatttgtgggtgctgatctagcagcagtgtgcaatgaggctgcattgagtgctctccggcgttacatcagcctaaaagaaaattcaattcaacaacttggtcatcctggctgtagtttttataagtgtaatagtcaagatactgaagattcaagctcattatcgtcatctttctcaaagttgaccatgtcatcatatgttgcttgcatgaacggtggtaacataaaaagtagcgagtcttatgatgatacagatgaaataccactatatgtaaccaataaggattttgacaaggctaaaacaaaagttagaccgagtgcgatgcgcgaggttattcttgagcttccgaaggtacgttgggaagatgttggtggtcagtgcagtgtcaaggagcaactgattgaagctatccaattaccacaaaaatgcccagaagcatttgaacgtttagggatccgaccccctagaggattgctaatgataggaccaccaggttgcagcaagactttgatggctcgtgctgcagcttctgaagcaaaattgaatttcctggctgttaagggtcctgaacttttcagcaagtgggtcggtgactcagaaaaggcagtgagatcgctatttgcaaaggcgcgggctaatgcaccagcaatattattttttgatgaaatagatgggcttgcagtaactcgtgggcaagaaaatgatggcacgtctgttgctgatagggtcctcagtcagttgcttgtggaaatggatggtttggaccagagagttggtgttactgttattgcagctacaaatcgccctgacaaaattgatcccgcacttctgaggccaggtcgtttcgatagggtgctggatgtgcaaccacctgatgaagctgaccgtgcagatattttccggatccatacacgcagcatgccatgcagtgccgacatgaatctaaatgaactcgctagactcacagaaggctacactggcgccgacataaagctcatctgcagggaagctgctgttgccgcacttgatgagaggtttgacattcaagaagtagcaatgagacatttcaattctgcgatcgacagaacaaaaccttcagatgtcaagttcttccaagaacttgcaaagcaattccgcagatcgttgacttcactgaggaagcaataattctgagaaagcgttgaggaatgggtcaagcatcaccctctcactccctacatttttgcttggtccagagaatggagttggttaatccatacaagtacacggctagcttagccatctggaatcagttcatccaaagaaataaaacatggggtgacctcattctggatattcatgtgatttctcaaagcaggcgccacatcagtgaacctggcgtgactgaatctgggctggtatctaagaagccttgtcctcgttgctctgcatcttcgaaatttctgcgttgttcctctgacttcaattactatgccactgtagatagtattgctttaaaagttgactagaattttctgttccagaaacctttttgctgctatttattgggggagcaattttctcttttctgactcttctcaacattacactcgagagaaacttgctagacatgtttatagatcgagacagtttcagtgggcctgttttaaccttgtcttatctcttctttggaaggatttgagcattgttgccaacattgttccctgtcatcttgctgtcggtatgtttccctgaaggaagtgatggagatggcacagtttatgctgagggcgatctgatctccttaacattttgcacaactgatgtaactgtaggcctgatttttgtctctgggttactgaacttggtggtagcagtaacatctgcatgttttcttggtgtctttggtccactggagctgtcaactgctgtatgagtagatgtcagatgcgatgttcttccagttttctgacttgagcctgtctctcgtcatactcaatgtggccctctgatttagtcccaagcaagggttgctcgtgcttcttagaggcttttacagtcagagtcctgatatctgaacttgcacactcattttctggtcgatcaggcacaggatccacaggtgaccgttcctcaacttcgcatggactgtcagcaggcgcagtggtatcctcttcaatgtgttcgtcagattcatcaatgtcctggatagctaatggcagcattctgcatcaattggcggagttccagccacaagttcagatgcttcagctgacgaatcttgcacgtggggattgctttcagaatgatcaggtgcttttttcaagtgatgctttcagtgatgaattcaggcttagagcagtactgctaccactttttacaggaatgcttgatcccaaacttgcagctgtcatggcaagagctggtggatgctcgtaggaaatgcgggaccggcttctacttcctctttaacatcaggtgtcatgctgctgccatccataactactagagcagcatttatcaggtcttcacatttgttatgtgagggactaaaatttagttagaggaaccaaacatggtcttagtcttcaactcttcatggtttgagcatgggagaaggggggagtggactataaattgggcgtagaggttgtggatttgtgaacctagaatgaaatagattctgctgttattctcaagaaattgaggcatgaagtctaaaaagacgaatttaaaggaaaaataaataaatgttgcagcagtttaaacagccaactttaatccgaagctaacagcctgctttgaacgttatgggacaaaatgtggc

SEQ ID NO: 38936 - DNA, 3860 bp, Zea Mays
tcttccctcctcctgtccagtgtccaggtctcatttgggcccaaaggcagaaccggactcgccacctcctgcgcctcccctcttcctgtccaggcctccagggtttaggctcgccgccgtcccgtcccgtcccgtcccgcctcgcccaccgcgcgccgcgatgcctccttccaagggcaagaagaagaacccatcgacgtcgccgcggccgtccccacgcacgccttcatcttgtccctccgctggctccggaactggcgatggcgagagaagcgtcgacctcccatccatcgccgccgccgccgcggagcagttcccggcgctcgtgccacgcggcggtagtggctactttgctggcatcgttgccgaagtggcccctagggatgggagccgcggcggccgcttggggaggctctggctctccgaggccgctatggtcggcgccgggatgcggcctgggtgctttgtctccgtctcactaatttcgtcaagcagtgatcagttagatggttttccattaattaatttatttgaggagtgcaacagattctttgatcttgatctggacaatgatctcctttatggtgaagctgggaaaaactttgtggttgctacagttctcccctcgcgtgaggttccaaagaatggtatcaagctctcttgggatcttgcttgtgttttgggacacccttttgtaggtcgatcattgtttatttgccccttatgtacacttcaggccccaaagcgtagtgatgatgttcatattttacgggtaatgaaatgcaagaatctttatcttagcctagttccacctaatgttggatcttccaaaggcattgaatcagagtctgactaccatcctgaaagaagcgcaatggttatggagacacctaagaggggtccttcaactccactgcgtaagaaggaatcgcatcactttgcttccaacaatggctcttcaatgtgcttggatccaaccactgcaagatcagcactagcagatgagaaaatcaatgagttgttgcatacttcagcattgtggtggctcaatggtagacacttgcttaaaggaaactttgttcctctctcaatatgcggaaaactgtctctatttgtggtcatgggagcagaaccagatagttcttctcaagatgttttgtatgagaatgggaatacactgtctaatgcagaggattcaactaaatcccaggaaaacccagttttattccttgttgacagaaccacaaaagttcatttatctgattctgtctgcacaaagcagcttgactcagataaaccgggtttaccatcagaacctcacgagtatgatgataaaagaaatgcagatttcaatcattctccaacacttggtgggttatctaaagagtcagcaaccataaaaggaataatttcattttcactagctgatcaaattggtctgccaagatacaaaggtattcttctttatggtccacctggaacagggaagacctctcttgcttcttcctgtgcctatgatgcaggggtcaacctttttacaatcaatggaccagagatcattagtcattattacggagaaagcgagcaatctttgtacgatgttttcacttcagccaagcaagcagcacctgctgtggagtgccatccccaggacagaggatggacatacttcgccaccttctaattggagttcatcactctctgaccaatgaagaagttgagtctgttgctctagcaacccatggatttgtgggtgctgatctagcagcagtgtgcaatgaggctgcattgagtgctctccggcgttacatcagcctaaaagaaaattcaattcaacaacttggtcatcctggctgtagtttttataagtgtaatagtcaagatactgaagattcaagctcattatcgtcatctttctcaaagttgaccatgtcatcatatgttgcttgcatgaacggtggtaacataaaaagtagcgagtcttatgatgatacagatgaaataccactatatgtaaccaataaggattttgacaaggctaaaacaaaagttagaccgagtgcgatgcgcgaggttattcttgagcttccgaaggtacgttgggaagatgttggtggtcagtgcagtgtcaaggagcaactgattgaagctatccaattaccacaaaaatgcccagaagcatttgaacgtttagggatccgaccccctagaggattgctaatgataggaccaccaggttgcagcaagactttgatggctcgtgctgcagcttctgaagcaaaattgaatttcctggctgttaagggtcctgaacttttcagcaagtgggtcggtgactcagaaaaggcagtgagatcgctatttgcaaaggcgcgggctaatgcaccagcaatattattttttgatgaaatagatgggcttgcagtaactcgtgggcaagaaaatgatggcacgtctgttgctgatagggtcctcagtcagttgcttgtggaaatggatggtttggaccagagagttggtgttactgttattgcagctacaaatcgccctgacaaaattgatcccgcacttctgaggccaggtcgtttcgatagggtgctggatgtgcaaccacctgatgaagctgaccgtgcagatattttccggatccatacacgcagcatgccatgcagtgccgacatgaatctaaatgaactcgctagactcacagaaggctacactggcgccgacataaagctcatctgcagggaagctgctgttgccgcacttgatgagaggtttgacattcaagaagtagcaatgagacatttcaattctgcgatcgacagaacaaaaccttcagatgtcaagttcttccaagaacttgcaaagcaattccgcagatcgttgacttcactgaggaagcaataattctgagaaagcgttgaggaatgggtcaagcatcaccctctcactccctacatttttgcttggtccagagaatggagttggttaatccatacaagtacacggctagcttagccatctggaatcagttcatccaaagaaataaaacatggggtgacctcattctggatattcatgtgatttctcaaagcaggcgccacatcagtgaacctggcgtgactgaatctgggctggcacaggatccacaggtgaccgttcctcaacttcgcatggactgtcagcaggcgcagtggtatcctcttcaatgtgttcgtcagattcatcaatgtcctggatagctaatggcagcattctgcatcaattggcggagttccagccacaagttcagatgcttcagctgacgaatcttgcacgtggggattgctttcagaatgatcaggtgcttttttcaagtgatgctttcagtgatgaattcaggcttagagcagtactgctaccactttttacaggaatgcttgatcccaaacttgcagctgtcatggcaagagctggtggatgctcgtaggaaatgcgggaccggcttctacttcctctttaacatcaggtgtcatgctgctgccatccataactactagagcagcatttatcaggtcttcacatttgttatgtgagggactaaaatttagttagaggaaccaaacatggtcttagtcttcaactcttcatggtttgagcatgggagaaggggggagtggactataaattgggcgtagaggttgtggatttgtgaacctagaatgaaatagattctgctgttattctcaagaaattgaggcatgaagtctaaaaagacgaatttaaaggaaaaataaataaatgttgcagcagtttaaacagccaactttaatccgaagctaacagcctgctttgaacgttatgggacaaaatgtggc

SEQ ID NO: 38937 - DNA, 4680 bp, Zea Mays
ctcctgtccagtgtccaggtctcatttgggcccaaaggcagaaccggactcgccacctcctgcgcctcccctcttcctgtccaggcctccagggtttaggctcgccgccgtcccgtcccgtcccgtcccgcctcgcccaccgcgcgccgcgatgcctccttccaagggcaagaagaagaacccatcgacgtcgccgcggccgtccccacgcacgccttcatcttgtccctccgctggctccggaactggcgatggcgagagaagcgtcgacctcccatccatcgccgccgccgccgcggagcagttcccggcgctcgtgccacgcggcggtagtggctactttgctggcatcgttgccgaagtggcccctagggatgggagccgcggcggccgcttggggaggctctggctctccgaggccgctatggtcggcgccgggatgcggcctgggtgctttgtctccgtctcactaatttcgtcaagcagtgatcagttagatggttttccattaattaatttatttgaggagtgcaacagattctttgatcttgatctggacaatgatctcctttatggtgaagctgggaaaaactttgtggttgctacagttctcccctcgcgtgaggttccaaagaatggtatcaagctctcttgggatcttgcttgtgttttgggacacccttttgtaggtcgatcattgtttatttgccccttatgtacacttcaggccccaaagcgtagtgatgatgttcatattttacgggtaatgaaatgcaagaatctttatcttagcctagttccacctaatgttggatcttccaaaggcattgaatcagagtctgactaccatcctgaaagaagcgcaatggttatggagacacctaagaggggtccttcaactccactgcgtaagaaggaatcgcatcactttgcttccaacaatggctcttcaatgtgcttggatccaaccactgcaagatcagcactagcagatgagaaaatcaatgagttgttgcatacttcagcattgtggtggctcaatggtagacacttgcttaaaggaaactttgttcctctctcaatatgcggaaaactgtctctatttgtggtcatgggagcagaaccagatagttcttctcaagatgttttgtatgagaatgggaatacactgtctaatgcagaggattcaactaaatcccaggaaaacccagttttattccttgttgacagaaccacaaaagttcatttatctgattctgtctgcacaaagcagcttgactcagataaaccgggtttaccatcagaacctcacgagtatgatgataaaagaaatgcagatttcaatcattctccaacacttggtgggttatctaaagagtcagcaaccataaaaggaataatttcattttcactagctgatcaaattggtctgccaagatacaaaggtattcttctttatggtccacctggaacagggaagacctctcttgcttcttcctgtgcctatgatgcaggggtcaacctttttacaatcaatggaccagagatcattagtcattattacggagaaagcgagcaatctttgtacgatgttttcacttcagccaagcaagcagcacctgctgtgatatttatcgatgaattggatgcgattgctccatcaaggaaggatgggagtgaggcgttatctattagaatggtagccactctgttaaaactgatggatgagattggccctagtgaccgtgttctcttgattgctgctacgaatcgacctgatagcattgatcctgcattgcgacgtcctggaagattggataaagaaattgaaataggagtgccatccccaggacagaggatggacatacttcgccaccttctaattggagttcatcactctctgaccaatgaagaagttgagtctgttgctctagcaacccatggatttgtgggtgctgatctagcagcagtgtgcaatgaggctgcattgagtgctctccggcgttacatcagcctaaaagaaaattcaattcaacaacttggtcatcctggctgtagtttttataagtgtaatagtcaagatactgaagattcaagctcattatcgtcatctttctcaaagttgaccatgtcatcatatgttgcttgcatgaacggtggtaacataaaaagtagcgagtcttatgatgatacagatgaaataccactatatgtaaccaataaggattttgacaaggctaaaacaaaagttagaccgagtgcgatgcgcgaggttattcttgagcttccgaaggtacgttgggaagatgttggtggtcagtgcagtgtcaaggagcaactgattgaagctatccaattaccacaaaaatgcccagaagcatttgaacgtttagggatccgaccccctagaggattgctaatgataggaccaccaggttgcagcaagactttgatggctcgtgctgcagcttctgaagcaaaattgaatttcctggctgttaagggtcctgaacttttcagcaagtgggtcggtgactcagaaaaggcagtgagatcgctatttgcaaaggcgcgggctaatgcaccagcaatattattttttgatgaaatagatgggcttgcagtaactcgtgggcaagaaaatgatggcacgtctgttgctgatagggtcctcagtcagttgcttgtggaaatggatggtttggaccagagagttggtgttactgttattgcagctacaaatcgccctgacaaaattgatcccgcacttctgaggccaggtcgtttcgatagggtgctggatgtgcaaccacctgatgaagctgaccgtgcagatattttccggatccatacacgcagcatgccatgcagtgccgacatgaatctaaatgaactcgctagactcacagaaggctacactggcgccgacataaagctcatctgcagggaagctgctgttgccgcacttgatgagaggtttgacattcaagaagtagcaatgagacatttcaattctgcgatcgacagaacaaaaccttcagatgtcaagttcttccaagaacttgcaaagcaattccgcagatcgttgacttcactgaggaagcaataattctgagaaagcgttgaggaatgggtcaagcatcaccctctcactccctacatttttgcttggtccagagaatggagttggttaatccatacaagtacacggctagcttagccatctggaatcagttcatccaaagaaataaaacatggggtgacctcattctggatattcatgtgatttctcaaagcaggcgccacatcagtgaacctggcgtgactgaatctgggctggtatctaagaagccttgtcctcgttgctctgcatcttcgaaatttctgcgttgttcctctgacttcaattactatgccactgtagatagtattgctttaaaagttgactagaattttctgttccagaaacctttttgctgctatttattgggggagcaattttctcttttctgactcttctcaacattacactcgagagaaacttgctagacatgtttatagatcgagacagtttcagtgggcctgttttaaccttgtcttatctcttctttggaaggatttgagcattgttgccaacattgttccctgtcatcttgctgtcggtatgtttccctgaaggaagtgatggagatggcacagtttatgctgagggcgatctgatctccttaacattttgcacaactgatgtaactgtaggcctgatttttgtctctgggttactgaacttggtggtagcagtaacatctgcatgttttcttggtgtctttggtccactggagctgtcaactgctgtatgagtagatgtcagatgcgatgttcttccagttttctgacttgagcctgtctctcgtcatactcaatgtggccctctgatttagtcccaagcaagggttgctcgtgcttcttagaggcttttacagtcagagtcctgatatctgaacttgcacactcattttctggtcgatcaggcacaggatccacaggtgaccgttcctcaacttcgcatggactgtcagcaggcgcagtggtatcctcttcaatgtgttcgtcagattcatcaatgtcctggatagctaatggcagcattctgcatcaattggcggagttccagccacaagttcagatgcttcagctgacgaatcttgcacgtggggattgctttcagaatgatcagaggaatgcttgatcccaaacttgcagctgtcatggcaagagctggtggatgctcgtaggaaatgcgggaccggcttctacttcctctttaacatcaggtgtcatgctgctgccatccataactactagagcagcatttatcaggtcttcacatttgttatgtgagggactaaaatttagttagaggaaccaaacatggtcttagtcttcaactcttcatggtttgagcatgggagaaggggggagtggactataaattgggcgtagaggttgtggatttgtgaacctagaatgaaatagattctgctgttattctcaagaaattgaggcatgaagtctaaaaagacgaatttaaaggaaaaataaataaatgttgcagcagtttaaacagccaactttaatccgaagctaacagcctgctttgaacgttatgggacaaaatgtggc

SEQ ID NO: 38938 - DNA, 4520 bp, Zea Mays
ctcatttgggcccaaaggcagaaccggactcgccacctcctgcgcctcccctcttcctgtccaggcctccagggtttaggctcgccgccgtcccgtcccgtcccgtcccgcctcgcccaccgcgcgccgcgatgcctccttccaagggcaagaagaagaacccatcgacgtcgccgcggccgtccccacgcacgccttcatcttgtccctccgctggctccggaactggcgatggcgagagaagcgtcgacctcccatccatcgccgccgccgccgcggagcagttcccggcgctcgtgccacgcggcggtagtggctactttgctggcatcgttgccgaagtggcccctagggatgggagccgcggcggccgcttggggaggctctggctctccgaggccgctatggtcggcgccgggatgcggcctgggtgctttgtctccgtctcactaatttcgtcaagcagtgatcagttagatggttttccattaattaatttatttgaggagtgcaacagattctttgatcttgatctggacaatgatctcctttatggtgaagctgggaaaaactttgtggttgctacagttctcccctcgcgtgaggttccaaagaatggtatcaagctctcttgggatcttgcttgtgttttgggacacccttttgtaggtcgatcattgtttatttgccccttatgtacacttcaggccccaaagcgtagtgatgatgttcatattttacgggtaatgaaatgcaagaatctttatcttagcctagttccacctaatgttggatcttccaaaggcattgaatcagagtctgactaccatcctgaaagaagcgcaatggttatggagacacctaagaggggtccttcaactccactgcgtaagaaggaatcgcatcactttgcttccaacaatggctcttcaatgtgcttggatccaaccactgcaagatcagcactagcagatgagaaaatcaatgagttgttgcatacttcagcattgtggtggctcaatggtagacacttgcttaaaggaaactttgttcctctctcaatatgcggaaaactgtctctatttgtggtcatgggagcagaaccagatagttcttctcaagatgttttgtatgagaatgggaatacactgtctaatgcagaggattcaactaaatcccaggaaaacccagttttattccttgttgacagaaccacaaaagttcatttatctgattctgtctgcacaaagcagcttgactcagataaaccgggtttaccatcagaacctcacgagtatgatgataaaagaaatgcagatttcaatcattctccaacacttggtgggttatctaaagagtcagcaaccataaaaggaataatttcattttcactagctgatcaaattggtctgccaagatacaaaggtattcttctttatggtccacctggaacagggaagacctctcttgcttcttcctgtgcctatgatgcaggggtcaacctttttacaatcaatggaccagagatcattagtcattattacggagaaagcgagcaatctttgtacgatgttttcacttcagccaagcaagcagcacctgctgtggagtgccatccccaggacagaggatggacatacttcgccaccttctaattggagttcatcactctctgaccaatgaagaagttgagtctgttgctctagcaacccatggatttgtgggtgctgatctagcagcagtgtgcaatgaggctgcattgagtgctctccggcgttacatcagcctaaaagaaaattcaattcaacaacttggtcatcctggctgtagtttttataagtgtaatagtcaagatactgaagattcaagctcattatcgtcatctttctcaaagttgaccatgtcatcatatgttgcttgcatgaacggtggtaacataaaaagtagcgagtcttatgatgatacagatgaaataccactatatgtaaccaataaggattttgacaaggctaaaacaaaagttagaccgagtgcgatgcgcgaggttattcttgagcttccgaaggtacgttgggaagatgttggtggtcagtgcagtgtcaaggagcaactgattgaagctatccaattaccacaaaaatgcccagaagcatttgaacgtttagggatccgaccccctagaggattgctaatgataggaccaccaggttgcagcaagactttgatggctcgtgctgcagcttctgaagcaaaattgaatttcctggctgttaagggtcctgaacttttcagcaagtgggtcggtgactcagaaaaggcagtgagatcgctatttgcaaaggcgcgggctaatgcaccagcaatattattttttgatgaaatagatgggcttgcagtaactcgtgggcaagaaaatgatggcacgtctgttgctgatagggtcctcagtcagttgcttgtggaaatggatggtttggaccagagagttggtgttactgttattgcagctacaaatcgccctgacaaaattgatcccgcacttctgaggccaggtcgtttcgatagggtgctggatgtgcaaccacctgatgaagctgaccgtgcagatattttccggatccatacacgcagcatgccatgcagtgccgacatgaatctaaatgaactcgctagactcacagaaggctacactggcgccgacataaagctcatctgcagggaagctgctgttgccgcacttgatgagaggtttgacattcaagaagtagcaatgagacatttcaattctgcgatcgacagaacaaaaccttcagatgtcaagttcttccaagaacttgcaaagcaattccgcagatcgttgacttcactgaggaagcaataattctgagaaagcgttgaggaatgggtcaagcatcaccctctcactccctacatttttgcttggtccagagaatggagttggttaatccatacaagtacacggctagcttagccatctggaatcagttcatccaaagaaataaaacatggggtgacctcattctggatattcatgtgatttctcaaagcaggcgccacatcagtgaacctggcgtgactgaatctgggctggtatctaagaagccttgtcctcgttgctctgcatcttcgaaatttctgcgttgttcctctgacttcaattactatgccactgtagatagtattgctttaaaagttgactagaattttctgttccagaaacctttttgctgctatttattgggggagcaattttctcttttctgactcttctcaacattacactcgagagaaacttgctagacatgtttatagatcgagacagtttcagtgggcctgttttaaccttgtcttatctcttctttggaaggatttgagcattgttgccaacattgttccctgtcatcttgctgtcggtatgtttccctgaaggaagtgatggagatggcacagtttatgctgagggcgatctgatctccttaacattttgcacaactgatgtaactgtaggcctgatttttgtctctgggttactgaacttggtggtagcagtaacatctgcatgttttcttggtgtctttggtccactggagctgtcaactgctgtatgagtagatgtcagatgcgatgttcttccagttttctgacttgagcctgtctctcgtcatactcaatgtggccctctgatttagtcccaagcaagggttgctcgtgcttcttagaggcttttacagtcagagtcctgatatctgaacttgcacactcattttctggtcgatcaggcacaggatccacaggtgaccgttcctcaacttcgcatggactgtcagcaggcgcagtggtatcctcttcaatgtgttcgtcagattcatcaatgtcctggatagctaatggcagcattctgcatcaattggcggagttccagccacaagttcagatgcttcagctgacgaatcttgcacgtggggattgctttcagaatgatcaggtgcttttttcaagtgatgctttcagtgatgaattcaggcttagagcagtactgctaccactttttacaggaatgcttgatcccaaacttgcagctgtcatggcaagagctggtggatgctcgtaggaaatgcgggaccggcttctacttcctctttaacatcaggtgtcatgctgctgccatccataactactagagcagcatttatcaggtcttcacatttgttatgtgagggactaaaatttagttagaggaaccaaacatggtcttagtcttcaactcttcatggtttgagcatgggagaaggggggagtggactataaattgggcgtagaggttgtggatttgtgaacctagaatgaaatagattctgctgttattctcaagaaattgaggcatgaagtctaaaaagacgaatttaaaggaaaaataaataaatgttgcagcagtttaaacagccaactttaatccgaagctaacagcctgctttgaacgttatgggacaaaatgtggc

SEQ ID NO: 38939 - DNA, 4143 bp, Zea Mays
ccacctcctgcgcctcccctcttcctgtccaggcctccagggtttaggctcgccgccgtcccgtcccgtcccgtcccgcctcgcccaccgcgcgccgcgatgcctccttccaagggcaagaagaagaacccatcgacgtcgccgcggccgtccccacgcacgccttcatcttgtccctccgctggctccggaactggcgatggcgagagaagcgtcgacctcccatccatcgccgccgccgccgcggagcagttcccggcgctcgtgccacgcggcggtagtggctactttgctggcatcgttgccgaagtggcccctagggatgggagccgcggcggccgcttggggaggctctggctctccgaggccgctatggtcggcgccgggatgcggcctgggtgctttgtctccgtctcactaatttcgtcaagcagtgatcagttagatggttttccattaattaatttatttgaggagtgcaacagattctttgatcttgatctggacaatgatctcctttatggtgaagctgggaaaaactttgtggttgctacagttctcccctcgcgtgaggttccaaagaatggtatcaagctctcttgggatcttgcttgtgttttgggacacccttttgtaggtcgatcattgtttatttgccccttatgtacacttcaggccccaaagcgtagtgatgatgttcatattttacgggtaatgaaatgcaagaatctttatcttagcctagttccacctaatgttggatcttccaaaggcattgaatcagagtctgactaccatcctgaaagaagcgcaatggttatggagacacctaagaggggtccttcaactccactgcgtaagaaggaatcgcatcactttgcttccaacaatggctcttcaatgtgcttggatccaaccactgcaagatcagcactagcagatgagaaaatcaatgagttgttgcatacttcagcattgtggtggctcaatggtagacacttgcttaaaggaaactttgttcctctctcaatatgcggaaaactgtctctatttgtggtcatgggagcagaaccagatagttcttctcaagatgttttgtatgagaatgggaatacactgtctaatgcagaggattcaactaaatcccaggaaaacccagttttattccttgttgacagaaccacaaaagttcatttatctgattctgtctgcacaaagcagcttgactcagataaaccgggtttaccatcagaacctcacgagtatgatgataaaagaaatgcagatttcaatcattctccaacacttggtgggttatctaaagagtcagcaaccataaaaggaataatttcattttcactagctgatcaaattggtctgccaagatacaaaggtattcttctttatggtccacctggaacagggaagacctctcttgcttcttcctgtgcctatgatgcaggggtcaacctttttacaatcaatggaccagagatcattagtcattattacggagaaagcgagcaatctttgtacgatgttttcacttcagccaagcaagcagcacctgctgtggagtgccatccccaggacagaggatggacatacttcgccaccttctaattggagttcatcactctctgaccaatgaagaagttgagtctgttgctctagcaacccatggatttgtgggtgctgatctagcagcagtgtgcaatgaggctgcattgagtgctctccggcgttacatcagcctaaaagaaaattcaattcaacaacttggtcatcctggctgtagtttttataagtgtaatagtcaagatactgaagattcaagctcattatcgtcatctttctcaaagttgaccatgtcatcatatgttgcttgcatgaacggtggtaacataaaaagtagcgagtcttatgatgatacagatgaaataccactatatgtaaccaataaggattttgacaaggctaaaacaaaagttagaccgagtgcgatgcgcgaggttattcttgagcttccgaaggtacgttgggaagatgttggtggtcagtgcagtgtcaaggagcaactgattgaagctatccaattaccacaaaaatgcccagaagcatttgaacgtttagggatccgaccccctagaggattgctaatgataggaccaccaggttgcagcaagactttgatggctcgtgctgcagcttctgaagcaaaattgaatttcctggctgttaagggtcctgaacttttcagcaagtgggtcggtgactcagaaaaggcagtgagatcgctatttgcaaaggcgcgggctaatgcaccagcaatattattttttgatgaaatagatgggcttgcagtaactcgtgggcaagaaaatgatggcacgtctgttgctgatagggtcctcagtcagttgcttgtggaaatggatggtttggaccagagagttggtgttactgttattgcagctacaaatcgccctgacaaaattgatcccgcacttctgaggccaggtcgtttcgatagggtgctggatgtgcaaccacctgatgaagctgaccgtgcagatattttccggatccatacacgcagcatgccatgcagtgccgacatgaatctaaatgaactcgctagactcacagaaggctacactggcgccgacataaagctcatctgcagggaagctgctgttgccgcacttgatgagaggtttgacattcaagaagtagcaatgagacatttcaattctgcgatcgacagaacaaaaccttcagatgtcaagttcttccaagaacttgcaaagcaattccgcagatcgttgacttcactgaggaagcaataattctgagaaagcgttgaggaatgggtcaagcatcaccctctcactccctacatttttgcttggtccagagaatggagttggttaatccatacaagtacacggctagcttagccatctggaatcagttcatccaaagaaataaaacatggggtgacctcattctggatattcatgtgatttctcaaagcaggcgccacatcagtgaacctggcgtgactgaatctgggctggatttgagcattgttgccaacattgttccctgtcatcttgctgtcggtatgtttccctgaaggaagtgatggagatggcacagtttatgctgagggcgatctgatctccttaacattttgcacaactgatgtaactgtaggcctgatttttgtctctgggttactgaacttggtggtagcagtaacatctgcatgttttcttggtgtctttggtccactggagctgtcaactgctgtatgagtagatgtcagatgcgatgttcttccagttttctgacttgagcctgtctctcgtcatactcaatgtggccctctgatttagtcccaagcaagggttgctcgtgcttcttagaggcttttacagtcagagtcctgatatctgaacttgcacactcattttctggtcgatcaggcacaggatccacaggtgaccgttcctcaacttcgcatggactgtcagcaggcgcagtggtatcctcttcaatgtgttcgtcagattcatcaatgtcctggatagctaatggcagcattctgcatcaattggcggagttccagccacaagttcagatgcttcagctgacgaatcttgcacgtggggattgctttcagaatgatcagaggaatgcttgatcccaaacttgcagctgtcatggcaagagctggtggatgctcgtaggaaatgcgggaccggcttctacttcctctttaacatcaggtgtcatgctgctgccatccataactactagagcagcatttatcaggtcttcacatttgttatgtgagggactaaaatttagttagaggaaccaaacatggtcttagtcttcaactcttcatggtttgagcatgggagaaggggggagtggactataaattgggcgtagaggttgtggatttgtgaacctagaatgaaatagattctgctgttattctcaagaaattgaggcatgaagtctaaaaagacgaatttaaaggaaaaataaataaatgttgcagcagtttaaacagccaactttaatccgaagctaacagcctgctttgaacgttatgggacaaaatgtggc

SEQ ID NO: 38940 - DNA, 3991 bp, Zea Mays
ccctcttcctgtccaggcctccagggtttaggctcgccgccgtcccgtcccgtcccgtcccgcctcgcccaccgcgcgccgcgatgcctccttccaagggcaagaagaagaacccatcgacgtcgccgcggccgtccccacgcacgccttcatcttgtccctccgctggctccggaactggcgatggcgagagaagcgtcgacctcccatccatcgccgccgccgccgcggagcagttcccggcgctcgtgccacgcggcggtagtggctactttgctggcatcgttgccgaagtggcccctagggatgggagccgcggcggccgcttggggaggctctggctctccgaggccgctatggtcggcgccgggatgcggcctgggtgctttgtctccgtctcactaatttcgtcaagcagtgatcagttagatggttttccattaattaatttatttgaggagtgcaacagattctttgatcttgatctggacaatgatctcctttatggtgaagctgggaaaaactttgtggttgctacagttctcccctcgcgtgaggttccaaagaatggtatcaagctctcttgggatcttgcttgtgttttgggacacccttttgtaggtcgatcattgtttatttgccccttatgtacacttcaggccccaaagcgtagtgatgatgttcatattttacgggtaatgaaatgcaagaatctttatcttagcctagttccacctaatgttggatcttccaaaggcattgaatcagagtctgactaccatcctgaaagaagcgcaatggttatggagacacctaagaggggtccttcaactccactgcgtaagaaggaatcgcatcactttgcttccaacaatggctcttcaatgtgcttggatccaaccactgcaagatcagcactagcagatgagaaaatcaatgagttgttgcatacttcagcattgtggtggctcaatggtagacacttgcttaaaggaaactttgttcctctctcaatatgcggaaaactgtctctatttgtggtcatgggagcagaaccagatagttcttctcaagatgttttgtatgagaatgggaatacactgtctaatgcagaggattcaactaaatcccaggaaaacccagttttattccttgttgacagaaccacaaaagttcatttatctgattctgtctgcacaaagcagcttgactcagataaaccgggtttaccatcagaacctcacgagtatgatgataaaagaaatgcagatttcaatcattctccaacacttggtgggttatctaaagagtcagcaaccataaaaggaataatttcattttcactagctgatcaaattggtctgccaagatacaaaggtattcttctttatggtccacctggaacagggaagacctctcttgcttcttcctgtgcctatgatgcaggggtcaacctttttacaatcaatggaccagagatcattagtcattattacggagaaagcgagcaatctttgtacgatgttttcacttcagccaagcaagcagcacctgctgtgatatttatcgatgaattggatgcgattgctccatcaaggaaggatgggagtgaggcgttatctattagaatggtagccactctgttaaaactgatggatgagattggccctagtgaccgtgttctcttgattgctgctacgaatcgacctgatagcattgatcctgcattgcgacgtcctggaagattggataaagaaattgaaataggagtgccatccccaggacagaggatggacatacttcgccaccttctaattggagttcatcactctctgaccaatgaagaagttgagtctgttgctctagcaacccatggatttgtgggtgctgatctagcagcagtgtgcaatgaggctgcattgagtgctctccggcgttacatcagcctaaaagaaaattcaattcaacaacttggtcatcctggctgtagtttttataagtgtaatagtcaagatactgaagattcaagctcattatcgtcatctttctcaaagttgaccatgtcatcatatgttgcttgcatgaacggtggtaacataaaaagtagcgagtcttatgatgatacagatgaaataccactatatgtaaccaataaggattttgacaaggctaaaacaaaagttagaccgagtgcgatgcgcgaggttattcttgagcttccgaaggtacgttgggaagatgttggtggtcagtgcagtgtcaaggagcaactgattgaagctatccaattaccacaaaaatgcccagaagcatttgaacgtttagggatccgaccccctagaggattgctaatgataggaccaccaggttgcagcaagactttgatggctcgtgctgcagcttctgaagcaaaattgaatttcctggctgttaagggtcctgaacttttcagcaagtgggtcggtgactcagaaaaggcagtgagatcgctatttgcaaaggcgcgggctaatgcaccagcaatattattttttgatgaaatagatgggcttgcagtaactcgtgggcaagaaaatgatggcacgtctgttgctgatagggtcctcagtcagttgcttgtggaaatggatggtttggaccagagagttggtgttactgttattgcagctacaaatcgccctgacaaaattgatcccgcacttctgaggccaggtcgtttcgatagggtgctggatgtgcaaccacctgatgaagctgaccgtgcagatattttccggatccatacacgcagcatgccatgcagtgccgacatgaatctaaatgaactcgctagactcacagaaggctacactggcgccgacataaagctcatctgcagggaagctgctgttgccgcacttgatgagaggtttgacattcaagaagtagcaatgagacatttcaattctgcgatcgacagaacaaaaccttcagatgtcaagttcttccaagaacttgcaaagcaattccgcagatcgttgacttcactgaggaagcaataattctgagaaagcgttgaggaatgggtcaagcatcaccctctcactccctacatttttgcttggtccagagaatggagttggttaatccatacaagtacacggctagcttagccatctggaatcagttcatccaaagaaataaaacatggggtgacctcattctggatattcatgtgatttctcaaagcaggcgccacatcagtgaacctggcgtgactgaatctgggctggcacaggatccacaggtgaccgttcctcaacttcgcatggactgtcagcaggcgcagtggtatcctcttcaatgtgttcgtcagattcatcaatgtcctggatagctaatggcagcattctgcatcaattggcggagttccagccacaagttcagatgcttcagctgacgaatcttgcacgtggggattgctttcagaatgatcaggtgcttttttcaagtgatgctttcagtgatgaattcaggcttagagcagtactgctaccactttttacaggaatgcttgatcccaaacttgcagctgtcatggcaagagctggtggatgctcgtaggaaatgcgggaccggcttctacttcctctttaacatcaggtgtcatgctgctgccatccataactactagagcagcatttatcaggtcttcacatttgttatgtgagggactaaaatttagttagaggaaccaaacatggtcttagtcttcaactcttcatggtttgagcatgggagaaggggggagtggactataaattgggcgtagaggttgtggatttgtgaacctagaatgaaatagattctgctgttattctcaagaaattgaggcatgaagtctaaaaagacgaatttaaaggaaaaataaataaatgttgcagcagtttaaacagccaactttaatccgaagctaacagcctgctttgaacgttatgggacaaaatgtggc

SEQ ID NO: 38941 - DNA, 3702 bp, Zea Mays
caggcctccagggtttaggctcgccgccgtcccgtcccgtcccgtcccgcctcgcccaccgcgcgccgcgatgcctccttccaagggcaagaagaagaacccatcgacgtcgccgcggccgtccccacgcacgccttcatcttgtccctccgctggctccggaactggcgatggcgagagaagcgtcgacctcccatccatcgccgccgccgccgcggagcagttcccggcgctcgtgccacgcggcggtagtggctactttgctggcatcgttgccgaagtggcccctagggatgggagccgcggcggccgcttggggaggctctggctctccgaggccgctatggtcggcgccgggatgcggcctgggtgctttgtctccgtctcactaatttcgtcaagcagtgatcagttagatggttttccattaattaatttatttgaggagtgcaacagattctttgatcttgatctggacaatgatctcctttatggtgaagctgggaaaaactttgtggttgctacagttctcccctcgcgtgaggttccaaagaatggtatcaagctctcttgggatcttgcttgtgttttgggacacccttttgtaggtcgatcattgtttatttgccccttatgtacacttcaggccccaaagcgtagtgatgatgttcatattttacgggtaatgaaatgcaagaatctttatcttagcctagttccacctaatgttggatcttccaaaggcattgaatcagagtctgactaccatcctgaaagaagcgcaatggttatggagacacctaagaggggtccttcaactccactgcgtaagaaggaatcgcatcactttgcttccaacaatggctcttcaatgtgcttggatccaaccactgcaagatcagcactagcagatgagaaaatcaatgagttgttgcatacttcagcattgtggtggctcaatggtagacacttgcttaaaggaaactttgttcctctctcaatatgcggaaaactgtctctatttgtggtcatgggagcagaaccagatagttcttctcaagatgttttgtatgagaatgggaatacactgtctaatgcagaggattcaactaaatcccaggaaaacccagttttattccttgttgacagaaccacaaaagttcatttatctgattctgtctgcacaaagcagcttgactcagataaaccgggtttaccatcagaacctcacgagtatgatgataaaagaaatgcagatttcaatcattctccaacacttggtgggttatctaaagagtcagcaaccataaaaggaataatttcattttcactagctgatcaaattggtctgccaagatacaaaggtattcttctttatggtccacctggaacagggaagacctctcttgcttcttcctgtgcctatgatgcaggggtcaacctttttacaatcaatggaccagagatcattagtcattattacggagaaagcgagcaatctttgtacgatgttttcacttcagccaagcaagcagcacctgctgtggagtgccatccccaggacagaggatggacatacttcgccaccttctaattggagttcatcactctctgaccaatgaagaagttgagtctgttgctctagcaacccatggatttgtgggtgctgatctagcagcagtgtgcaatgaggctgcattgagtgctctccggcgttacatcagcctaaaagaaaattcaattcaacaacttggtcatcctggctgtagtttttataagtgtaatagtcaagatactgaagattcaagctcattatcgtcatctttctcaaagttgaccatgtcatcatatgttgcttgcatgaacggtggtaacataaaaagtagcgagtcttatgatgatacagatgaaataccactatatgtaaccaataaggattttgacaaggctaaaacaaaagttagaccgagtgcgatgcgcgaggttattcttgagcttccgaaggtacgttgggaagatgttggtggtcagtgcagtgtcaaggagcaactgattgaagctatccaattaccacaaaaatgcccagaagcatttgaacgtttagggatccgaccccctagaggattgctaatgataggaccaccaggttgcagcaagactttgatggctcgtgctgcagcttctgaagcaaaattgaatttcctggctgttaagggtcctgaacttttcagcaagtgggtcggtgactcagaaaaggcagtgagatcgctatttgcaaaggcgcgggctaatgcaccagcaatattattttttgatgaaatagatgggcttgcagtaactcgtgggcaagaaaatgatggcacgtctgttgctgatagggtcctcagtcagttgcttgtggaaatggatggtttggaccagagagttggtgttactgttattgcagctacaaatcgccctgacaaaattgatcccgcacttctgaggccaggtcgtttcgatagggtgctggatgtgcaaccacctgatgaagctgaccgtgcagatattttccggatccatacacgcagcatgccatgcagtgccgacatgaatctaaatgaactcgctagactcacagaaggctacactggcgccgacataaagctcatctgcagggaagctgctgttgccgcacttgatgagaggtttgacattcaagaagtagcaatgagacatttcaattctgcgatcgacagaacaaaaccttcagatgtcaagttcttccaagaacttgcaaagcaattccgcagatcgttgacttcactgaggaagcaataattctgagaaagcgttgaggaatgggtcaagcatcaccctctcactccctacatttttgcttggtccagagaatggagttggttaatccatacaagtacacggctagcttagccatctggaatcagttcatccaaagaaataaaacatggggtgacctcattctggatattcatgtgatttctcaaagcaggcgccacatcagtgaacctggcgtgactgaatctgggctggcacaggatccacaggtgaccgttcctcaacttcgcatggactgtcagcaggcgcagtggtatcctcttcaatgtgttcgtcagattcatcaatgtcctggatagctaatggcagcattctgcatcaattggcggagttccagccacaagttcagatgcttcagctgacgaatcttgcacgtggggattgctttcagaatgatcagaggaatgcttgatcccaaacttgcagctgtcatggcaagagctggtggatgctcgtaggaaatgcgggaccggcttctacttcctctttaacatcaggtgtcatgctgctgccatccataactactagagcagcatttatcaggtcttcacatttgttatgtgagggactaaaatttagttagaggaaccaaacatggtcttagtcttcaactcttcatggtttgagcatgggagaaggggggagtggactataaattgggcgtagaggttgtggatttgtgaacctagaatgaaatagattctgctgttattctcaagaaattgaggcatgaagtctaaaaagacgaatttaaaggaaaaataaataaatgttgcagcagtttaaacagccaactttaatccgaagctaacagcctgctttgaacgttatgggacaaaatgtggc

SEQ ID NO: 38942 - DNA, 4069 bp, Zea Mays
atgcctccttccaagggcaagaagaagaacccatcgacgtcgccgcggccgtccccacgcacgccttcatcttgtccctccgctggctccggaactggcgatggcgagagaagcgtcgacctcccatccatcgccgccgccgccgcggagcagttcccggcgctcgtgccacgcggcggtagtggctactttgctggcatcgttgccgaagtggcccctagggatgggagccgcggcggccgcttggggaggctctggctctccgaggccgctatggtcggcgccgggatgcggcctgggtgctttgtctccgtctcactaatttcgtcaagcagtgatcagttagatggttttccattaattaatttatttgaggagtgcaacagattctttgatcttgatctggacaatgatctcctttatggtgaagctgggaaaaactttgtggttgctacagttctcccctcgcgtgaggttccaaagaatggtatcaagctctcttgggatcttgcttgtgttttgggacacccttttgtaggtcgatcattgtttatttgccccttatgtacacttcaggccccaaagcgtagtgatgatgttcatattttacgggtaatgaaatgcaagaatctttatcttagcctagttccacctaatgttggatcttccaaaggcattgaatcagagtctgactaccatcctgaaagaagcgcaatggttatggagacacctaagaggggtccttcaactccactgcgtaagaaggaatcgcatcactttgcttccaacaatggctcttcaatgtgcttggatccaaccactgcaagatcagcactagcagatgagaaaatcaatgagttgttgcatacttcagcattgtggtggctcaatggtagacacttgcttaaaggaaactttgttcctctctcaatatgcggaaaactgtctctatttgtggtcatgggagcagaaccagatagttcttctcaagatgttttgtatgagaatgggaatacactgtctaatgcagaggattcaactaaatcccaggaaaacccagttttattccttgttgacagaaccacaaaagttcatttatctgattctgtctgcacaaagcagcttgactcagataaaccgggtttaccatcagaacctcacgagtatgatgataaaagaaatgcagatttcaatcattctccaacacttggtgggttatctaaagagtcagcaaccataaaaggaataatttcattttcactagctgatcaaattggtctgccaagatacaaaggtattcttctttatggtccacctggaacagggaagacctctcttgcttcttcctgtgcctatgatgcaggggtcaacctttttacaatcaatggaccagagatcattagtcattattacggagaaagcgagcaatctttgagtgccatccccaggacagaggatggacatacttcgccaccttctaattggagttcatcactctctgaccaatgaagaagttgagtctgttgctctagcaacccatggatttgtgggtgctgatctagcagcagtgtgcaatgaggctgcattgagtgctctccggcgttacatcagcctaaaagaaaattcaattcaacaacttggtcatcctggctgtagtttttataagtgtaatagtcaagatactgaagattcaagctcattatcgtcatctttctcaaagttgaccatgtcatcatatgttgcttgcatgaacggtggtaacataaaaagtagcgagtcttatgatgatacagatgaaataccactatatgtaaccaataaggattttgacaaggctaaaacaaaagttagaccgagtgcgatgcgcgaggttattcttgagcttccgaaggtacgttgggaagatgttggtggtcagtgcagtgtcaaggagcaactgattgaagctatccaattaccacaaaaatgcccagaagcatttgaacgtttagggatccgaccccctagaggattgctaatgataggaccaccaggttgcagcaagactttgatggctcgtgctgcagcttctgaagcaaaattgaatttcctggctgttaagggtcctgaacttttcagcaagtgggtcggtgactcagaaaaggcagtgagatcgctatttgcaaaggcgcgggctaatgcaccagcaatattattttttgatgaaatagatgggcttgcagtaactcgtgggcaagaaaatgatggcacgtctgttgctgatagggtcctcagtcagttgcttgtggaaatggatggtttggaccagagagttggtgttactgttattgcagctacaaatcgccctgacaaaattgatcccgcacttctgaggccaggtcgtttcgatagggtgctggatgtgcaaccacctgatgaagctgaccgtgcagatattttccggatccatacacgcagcatgccatgcagtgccgacatgaatctaaatgaactcgctagactcacagaaggctacactggcgccgacataaagctcatctgcagggaagctgctgttgccgcacttgatgagaggtttgacattcaagaagtagcaatgagacatttcaattctgcgatcgacagaacaaaaccttcagatgtcaagttcttccaagaacttgcaaagcaattccgcagatcgttgacttcactgaggaagcaataattctgagaaagcgttgaggaatgggtcaagcatcaccctctcactccctacatttttgcttggtccagagaatggagttggttaatccatacaagtacacggctagcttagccatctggaatcagttcatccaaagaaataaaacatggggtgacctcattctggatattcatgtgatttctcaaagcaggcgccacatcagtgaacctggcgtgactgaatctgggctggatttgagcattgttgccaacattgttccctgtcatcttgctgtcggtatgtttccctgaaggaagtgatggagatggcacagtttatgctgagggcgatctgatctccttaacattttgcacaactgatgtaactgtaggcctgatttttgtctctgggttactgaacttggtggtagcagtaacatctgcatgttttcttggtgtctttggtccactggagctgtcaactgctgtatgagtagatgtcagatgcgatgttcttccagttttctgacttgagcctgtctctcgtcatactcaatgtggccctctgatttagtcccaagcaagggttgctcgtgcttcttagaggcttttacagtcagagtcctgatatctgaacttgcacactcattttctggtcgatcaggcacaggatccacaggtgaccgttcctcaacttcgcatggactgtcagcaggcgcagtggtatcctcttcaatgtgttcgtcagattcatcaatgtcctggatagctaatggcagcattctgcatcaattggcggagttccagccacaagttcagatgcttcagctgacgaatcttgcacgtggggattgctttcagaatgatcaggtgcttttttcaagtgatgctttcagtgatgaattcaggcttagagcagtactgctaccactttttacaggaatgcttgatcccaaacttgcagctgtcatggcaagagctggtggatgctcgtaggaaatgcgggaccggcttctacttcctctttaacatcaggtgtcatgctgctgccatccataactactagagcagcatttatcaggtcttcacatttgttatgtgagggactaaaatttagttagaggaaccaaacatggtcttagtcttcaactcttcatggtttgagcatgggagaaggggggagtggactataaattgggcgtagaggttgtggatttgtgaacctagaatgaaatagattctgctgttattctcaagaaattgaggcatgaagtctaaaaagacgaatttaaaggaaaaataaataaatgttgcagcagtttaaacagccaactttaatccgaagctaacagcctgctttgaacgttatgggacaaaatgtggc

SEQ ID NO: 38943 - DNA, 3663 bp, Zea Mays
gtagaagccgcacccgcagcgaacaaagtagctgaacaaaagcatcagagtgcaacattggtcctcaggcctaggcagcagcctcatttcttgaacgggcactgtttcaaatgccaaagggcagctcaggatcaggtctcactaatttcgtcaagcagtgatcagttagatggttttccattaattaatttatttgaggagtgcaacagattctttgatcttgatctggacaatgatctcctttatggtgaagctgggaaaaactttgtggttgctacagttctcccctcgcgtgaggttccaaagaatggtatcaagctctcttgggatcttgcttgtgttttgggacacccttttgtaggtcgatcattgtttatttgccccttatgtacacttcaggccccaaagcgtagtgatgatgttcatattttacgggtaatgaaatgcaagaatctttatcttagcctagttccacctaatgttggatcttccaaaggcattgaatcagagtctgactaccatcctgaaagaagcgcaatggttatggagacacctaagaggggtccttcaactccactgcgtaagaaggaatcgcatcactttgcttccaacaatggctcttcaatgtgcttggatccaaccactgcaagatcagcactagcagatgagaaaatcaatgagttgttgcatacttcagcattgtggtggctcaatggtagacacttgcttaaaggaaactttgttcctctctcaatatgcggaaaactgtctctatttgtggtcatgggagcagaaccagatagttcttctcaagatgttttgtatgagaatgggaatacactgtctaatgcagaggattcaactaaatcccaggaaaacccagttttattccttgttgacagaaccacaaaagttcatttatctgattctgtctgcacaaagcagcttgactcagataaaccgggtttaccatcagaacctcacgagtatgatgataaaagaaatgcagatttcaatcattctccaacacttggtgggttatctaaagagtcagcaaccataaaaggaataatttcattttcactagctgatcaaattggtctgccaagatacaaaggtattcttctttatggtccacctggaacagggaagacctctcttgcttcttcctgtgcctatgatgcaggggtcaacctttttacaatcaatggaccagagatcattagtcattattacggagaaagcgagcaatctttgtacgatgttttcacttcagccaagcaagcagcacctgctgtgatatttatcgatgaattggatgcgattgctccatcaaggaaggatgggagtgaggcgttatctattagaatggtagccactctgttaaaactgatggatgagattggccctagtgaccgtgttctcttgattgctgctacgaatcgacctgatagcattgatcctgcattgcgacgtcctggaagattggataaagaaattgaaataggagtgccatccccaggacagaggatggacatacttcgccaccttctaattggagttcatcactctctgaccaatgaagaagttgagtctgttgctctagcaacccatggatttgtgggtgctgatctagcagcagtgtgcaatgaggctgcattgagtgctctccggcgttacatcagcctaaaagaaaattcaattcaacaacttggtcatcctggctgtagtttttataagtgtaatagtcaagatactgaagattcaagctcattatcgtcatctttctcaaagttgaccatgtcatcatatgttgcttgcatgaacggtggtaacataaaaagtagcgagtcttatgatgatacagatgaaataccactatatgtaaccaataaggattttgacaaggctaaaacaaaagttagaccgagtgcgatgcgcgaggttattcttgagcttccgaaggtacgttgggaagatgttggtggtcagtgcagtgtcaaggagcaactgattgaagctatccaattaccacaaaaatgcccagaagcatttgaacgtttagggatccgaccccctagaggattgctaatgataggaccaccaggttgcagcaagactttgatggctcgtgctgcagcttctgaagcaaaattgaatttcctggctgttaagggtcctgaacttttcagcaagtgggtcggtgactcagaaaaggcagtgagatcgctatttgcaaaggcgcgggctaatgcaccagcaatattattttttgatgaaatagatgggcttgcagtaactcgtgggcaagaaaatgatggcacgtctgttgctgatagggtcctcagtcagttgcttgtggaaatggatggtttggaccagagagttggtgttactgttattgcagctacaaatcgccctgacaaaattgatcccgcacttctgaggccaggtcgtttcgatagggtgctggatgtgcaaccacctgatgaagctgaccgtgcagatattttccggatccatacacgcagcatgccatgcagtgccgacatgaatctaaatgaactcgctagactcacagaaggctacactggcgccgacataaagctcatctgcagggaagctgctgttgccgcacttgatgagaggtttgacattcaagaagtagcaatgagacatttcaattctgcgatcgacagaacaaaaccttcagatgtcaagttcttccaagaacttgcaaagcaattccgcagatcgttgacttcactgaggaagcaataattctgagaaagcgttgaggaatgggtcaagcatcaccctctcactccctacatttttgcttggtccagagaatggagttggttaatccatacaagtacacggctagcttagccatctggaatcagttcatccaaagaaataaaacatggggtgacctcattctggatattcatgtgatttctcaaagcaggcgccacatcagtgaacctggcgtgactgaatctgggctggcacaggatccacaggtgaccgttcctcaacttcgcatggactgtcagcaggcgcagtggtatcctcttcaatgtgttcgtcagattcatcaatgtcctggatagctaatggcagcattctgcatcaattggcggagttccagccacaagttcagatgcttcagctgacgaatcttgcacgtggggattgctttcagaatgatcagaggaatgcttgatcccaaacttgcagctgtcatggcaagagctggtggatgctcgtaggaaatgcgggaccggcttctacttcctctttaacatcaggtgtcatgctgctgccatccataactactagagcagcatttatcaggtcttcacatttgttatgtgagggactaaaatttagttagaggaaccaaacatggtcttagtcttcaactcttcatggtttgagcatgggagaaggggggagtggactataaattgggcgtagaggttgtggatttgtgaacctagaatgaaatagattctgctgttattctcaagaaattgaggcatgaagtctaaaaagacgaatttaaaggaaaaataaataaatgttgcagcagtttaaacagccaactttaatccgaagctaacagcctgctttgaacgttatgggacaaaatgtggc

SEQ ID NO: 38944 - DNA, 2165 bp, Zea Mays
atgtggctctcttgcacatcatatttccatctttttacagaatcttgtttggaatcattgctcctcccttccccatctcattcaccccatggatctataaatcttggtcattccacccatcaaccactgtatagacctgcaccatcatctaaattctaccggcatacttattctcccaccataaacccctcctcaaccctcactctctcgctccctgtgcgcgcggcacacaccactcttctccttgttagcagagggctagctagctcatcccccacagtccttatgctgaatctagcaccatttgagacgccgcctcttggaaggcaggagagaccaactaataccatcgtcaccgcaacagcggccatcgccaggggaaacgaagaaagctccagcaacacttgcctccagcacggacatctggacctcagccttggcatctccttgtctcatggcggcggcggcggcggcggcagctgcgacgcgtccagctgtggcggaaacaagcaggatagctatggcggtgggcagggcagccgtgacgacaaggacaacaacgtccgtcgcatgaccagctgcatcggcggcaccgccactgccaacgtgattaccgcagggcacagcagccttgctggtgatttgacagcagcaccaggaggaggaggtggtggcggctgggcagcggcgttcatgccgagcccgaccgggttcatgcatccatggagcctcgccgcacggcagcagaaggctgctgccgagcaagaccggacgcctcctgccacttacctgtcaagcagtgatgaccgcgtggtcacttcgccgtcggccgtcggctggccgccggtgcacacctcgcggcgcaacatcgtcagcgccatgcacgtaataaccaacaagcagaccgctggcgcctccagcgccgtcgccggaaacggcggcacaccacccggaagcacgacgacagccacgcacaccggcggcggcgagacgaacggggcggcggcggcggcgctggcggcacggccagcgctggcggccagcagcatgttcgccaaggtgcacatggagggctacgcgatcggcaggaaggtcaacctcagggcccaggacggctacgactccctctcaaggacgctcaccaatatggcaaccaacttcttctgccccgcagactgttcaggcgcggcagaaaaagacgctccaaagagtgacaagttcatattcctgtacgaagacttcgagggcgaccgaatgttggttggtgacgtcccatgggagtaagtgccatccataatatacgatcgtcgcttgccatctgcccaactacatattttatagttactatcacatgtcatggttcaatataatatagtaatattgttgttgttgttaatgctgttgtgcatatatagatgccctggaatatatatattggattcttggcctgcatgcattaatgttgctgctgcaagatgacaaactgaccatatatgttgtaaacttgtagatccacaatgtgccgagtccactaaaattttggactactggaaaatatattgtacagtattactttgcacgtgtcaaataatattaaacagtatactattttctatgtgctgcatatatagaatagaacatgtaatatatatatgtcttgtaccaaagtgtgggaaaatagtataatgccgtttgctgtgcatattttctgcgcagattgttccttgcgtctgctaaaggattgtacatcgtccgaaaacccagcatcaggcgacaaaggtcggggtgaaggtgacagaaactataaagccgaagaaccaacgaccaacggctgatgatgcaggcactctcttcaagcaagtgtggtcgcaaggacaggagcatataaatatatatgcactacatgctaggacatcttcttggttttggcatatatatagctccgaattacatttcttctgctggtactatatatttaatagtaaggtagttagtagagctatgtgagttatgttgtactgttggtgtttcctgatatcaatgtgcatatagttttgatcgctttgtaatggggggaaaaatctacaaaaggccggaagaaacatgctcacattggtctcaacaagtcaacggtgataaataaggcagatatattatgacttgtt

SEQ ID NO: 38945 - DNA, 1617 bp, Zea Mays
atgtggctctcttgcacatcatatttccatctttttacagaatcttgtttggaatcattgctcctcccttccccatctcattcaccccatggatctataaatcttggtcattccacccatcaaccactgtatagacctgcaccatcatctaaattctaccggcatacttattctcccaccataaacccctcctcaaccctcactctctcgctccctgtgcgcgcggcacacaccactcttctccttgttagcagagggctagctagctcatcccccacagtccttatgctgaatctagcaccatttgagacgccgcctcttggaaggcaggagagaccaactaataccatcgtcaccgcaacagcggccatcgccaggggaaacgaagaaagctccagcaacacttgcctccagcacggacatctggacctcagccttggcatctccttgtctcatggcggcggcggcggcggcggcagctgcgacgcgtccagctgtggcggaaacaagcaggatagctatggcggtgggcagggcagccgtgacgacaaggacaacaacgtccgtcgcatgaccagctgcatcggcggcaccgccactgccaacgtgattaccgcagggcacagcagccttgctggtgatttgacagcagcaccaggaggaggaggtggtggcggctgggcagcggcgttcatgccgagcccgaccgggttcatgcatccatggagcctcgccgcacggcagcagaaggctgctgccgagcaagaccggacgcctcctgccacttacctgtcaagcagtgatgaccgcgtggtcacttcgccgtcggccgtcggctggccgccggtgcacacctcgcggcgcaacatcgtcagcgccatgcacgtaataaccaacaagcagaccgctggcgcctccagcgccgtcgccggaaacggcggcacaccacccggaagcacgacgacagccacgcacaccggcggcggcgagacgaacggggcggcggcggcggcgctggcggcacggccagcgctggcggccagcagcatgttcgccaaggtgcacatggagggctacgcgatcggcaggaaggtcaacctcagggcccaggacggctacgactccctctcaaggacgctcaccaatatggcaaccaacttcttctgccattgttccttgcgtctgctaaaggattgtacatcgtccgaaaacccagcatcaggcgacaaaggtcggggtgaaggtgacagaaactataaagccgaagaaccaacgaccaacggctgatgatgcaggcactctcttcaagcaagtgtggtcgcaaggacaggagcatataaatatatatgcactacatgctaggacatcttcttggttttggcatatatatagctccgaattacatttcttctgctggtactatatatttaatagtaaggtagttagtagagctatgtgagttatgttgtactgttggtgtttcctgatatcaatgtgcatatagttttgatcgctttgtaatggggggaaaaatctacaaaaggccggaagaaacatgctcacattggtctcaacaagtcaacggtgataaataaggcagatatattatgacttgtt

SEQ ID NO: 38946 - DNA, 897 bp, Zea Mays
aacagagagcttactaggagtctgacactaatctcttatggatgagatgaagagtacaaatacttctattgcgcctgaggttgaggtgcatcctggattctcaccatcgaggtttgtgaaggtttttatgcaaggtgaagttgttgggaggaagataaatctggccactcaccagaactatgcctcgttgtccttcgctttaaaaagattaggcaacaactattctatgccatcatgcgagcttaatgggttagtaaacaatgaagttgatggggcatcagatgacaacaacttcattcttttctatgatacgatggatggtgaccgtttattcgttggggaagtcccatgggagattttcgtcatttctgtcaagaggatctacattgttcgtgttccacaggaacaagagaacgacaacggagaggaagaagacagagagaatggtgaagacaatgctgctgtttctgctactgccctagatggagatgatatcccagctaatgacgacgacgacgacgttgttgatgacggagatgctacggccactactcctgctgatggaggtttctgaggagtcgtagccaactcaaaatatgaagaaaacaaataaataagcagcatgcaagcatggttgtgtttggagcttggttgctgcttcatatagccaacacaagtttcaaatccagcactgtagtttcaactacacacacgcttgttttccatggcgttgaactatttctagttaactcatcataatgcaacttggacaccgaataagttgaaccttatcatgctataacctgtgttctacagaggtttagcgacgatgtagctcttggaagcttcttgtggcctcaagaaaacgtgcttctaactgttttcctttatttttac

SEQ ID NO: 38947 - DNA, 1267 bp, Zea Mays
gacacaggttgtatggtccttgatgaacaaacaatacctggggtcatagattgtctgcatgcatgctagatgagaaaaaaatagccagccgggggtgtttggattcacagcagatggttgagaagcgcaatgcgcaaaaactgacataaagcaagcagatgtttggattcacaccctgatcaggcctgatggaaagaagaaggcttacgtgaagcttctcctgtaatttcaagcttttggaggatcatgcttttcttctagattttatcttcagttgtccttcctgaaaatgaaaagccaattactgaaagcggagatgaaatctcttatgaaagagcaaaggcaaaaagtccaatatctttattatcgggactacgaaggagatcaattgactgcatctaaactatgagatgtgtgcaagattgggtttgttgtatttggagttcctcatagaaaaatcatacatatgctctagagttcctcatagatttggtgctcgcgatctgccatggatttgatttaagatttgggagatctgtcgtgttcgcgctgcgagattcgattttttatgcatgttttattcacgagattgcaagaacgggactgctaggcaagatgagtatacctgaaatttaggtctagaaattcactgctatcagtctcaggaataggctaggttgaacttatacatgagatatccacaggtccaggtgcattgtttgaatttgattagaagtgtgtaatgttagttcttataaaaaagcaactcaaaaagggccaaagtttggatgtaccttctgggttattgacgcagatatctttatcactatatgtgcttggtttgctcagtggcacatttaatctagagaatttcagtttccctctataaaatggtggagcagaatgacttctaaatctactacacttggaagttttgggtctctgatttagtccagagttgtgttgattcaacaaatcttgaataatcaggttgccatttgccatattcaaagaaggaacattcaaatgacaaccattatcacctgctgtctcaggagaaatattgactgacaacctcatgtcaacattttcaggataatgcatttgcttataccctaacttgtaatcaatactggcaacattgtcatccaggcggcatgaattagtgatccttccagagaaacagactatgcaaaacaaatgtcatattaataatctagaaacagcttcgagatgggttttatctattgatgaggaacctgttaag

SEQ ID NO: 38948 - DNA, 1236 bp, Zea Mays
gcaaaaactgacataaagcaagcagatgtttggattcacaccctgatcaggcctgatggaaagaagaaggcttacgtgaagcttctcctgtaatttcaagcttttggaggatcatgcttttcttctagattttatcttcagttgtccttcctgaaaatgaaaagccaattactgaaagcggagatgaaatctcttatgaaagagcaaaggcaaaaagtccaatatctttattatcgggactacgaaggagatcaatagcccatgctaagtttggatcaagtcatcacgagagaaaggaatttattggagcacctataaaattggatgtggaagctcatgctcgcattcagaagcatagtgactgcatctaaactatgagatgtgtgcaagattgggtttgttgtatttggagttcctcatagaaaaatcatacatatgctctagagttcctcatagatttggtgctcgcgatctgccatggatttgatttaagatttgggagatctgtcgtgttcgcgctgcgagattcgattttttatgcatgttttattcacgagattgcaagaacgggactgctaggcaagatgagtatacctgaaatttaggtctagaaattcactgctatcagtctcaggaataggctaggttgaacttatacatgagatatccacaggtccaggtgcattgtttgaatttgattagaagtgtgtaatgttagttcttataaaaaagcaactcaaaaagggccaaagtttggatgtaccttctgggttattgacgcagatatctttatcactatatgtgcttggtttgctcagtggcacatttaatctagagaatttcagtttccctctataaaatggtggagcagaatgacttctaaatctactacacttggaagttttgggtctctgatttagtccagagttgtgttgattcaacaaatcttgaataatcaggttgccatttgccatattcaaagaaggaacattcaaatgacaaccattatcacctgctgtctcaggagaaatattgactgacaacctcatgtcaacattttcaggataatgcatttgcttataccctaacttgtaatcaatactggcaacattgtcatccaggcggcatgaattagtgatccttccagagaaacagactatgcaaaacaaatgtcatattaataatctagaaacagcttcgagatgggttttatctattgatgaggaacctgttaag

SEQ ID NO: 38949 - DNA, 2042 bp, Zea Mays
ctggtgtctaggcatgggcgtcgcctatgagacggccaagagtggcgtcggtgttgcctccatgggcgtcatgcgcctcaagcttgtcatgaagtccatcatcctcgttgtcatggccagagtccttggcatctatgatctcatcatcgccgccatcatctctgccgggatcaaccccaaggccaagccctacttcttagacggctacacacacctctccttcgaactcgcatgcagccttgctggcctcgctgccggcacggccatcagcatcgtcagagacaccagagttaggtattgtactactctgattgcagtgtgtatgcttgaacatatatgaataagcaaagctgcaacattttttcatcagaaaataagcaagccaaactgatctagaatacactgtttttgataaattaagcagcaacaaagaagtctatgtgccccttcttcaatagcaaggtattgttgtgcattgggttagatgatatgtttatgtgatcgttacagtgttgggtcttgaggttatggctaaatagtcaatcatcaaaatggcagttacctcacaactttgtaagaaaaacaggttatgtgatcttaggtaacttctgaaattttgttgcttagtgtagcagattaccagggttaccttacctttttgcccttttaaactgatactaataatgtatcattcaatgcaggtaatttcaagcttttggaggatcatgcttttcttctagattttatcttcagttgtccttgtaagggttgtgtcaatggtagtggtgaattatctagaagcaacaaagcagcagtcaacatatttaaattgccagatatagagttaggcttagttttagttaaaatattagtggtgaattatctaggcatacatccagtccacaccctcaacctaccgagttaggctcagttttagttaaacagcgtctcggttgcttgtgcctactgatggcttttcttaaaattatatcaacgacatcttaggttttggaaggtggtgcagttgtcatgactcttagagatcatagtattccttctaatggggatatcaatgaaagtaaagtttcttatttgttattattatattcttgttggtgcagcctgaaaatgaaaagccaattactgaaagcggagatgaaatctcttatgaaagagcaaaggcaaaaagtccaatatctttattatcgggactacgaaggagatcaattgactgcatctaaactatgagatgtgtgcaagattgggtttgttgtatttggagttcctcatagaaaaatcatacatatgctctagagttcctcatagatttggtgctcgcgatctgccatggatttgatttaagattgcaagaacgggactgctaggcaagatgagtatacctgaaatttaggtctagaaattcactgctatcagtctcaggaataggctaggttgaacttatacatgagatatccacaggtccaggtgcattgtttgaatttgattagaagtgtgtaatgttagttcttataaaaaagcaactcaaaaagggccaaagtttggatgtaccttctgggttattgacgcagatatctttatcactatatgtgcttggtttgctcagtggcacatttaatctagagaatttcagtttccctctataaaatggtggagcagaatgacttctaaatctactacacttggaagttttgggtctctgatttagtccagagttgtgttgattcaacaaatcttgaataatcaggttgccatttgccatattcaaagaaggaacattcaaatgacaaccattatcacctgctgtctcaggagaaatattgactgacaacctcatgtcaacattttcaggataatgcatttgcttataccctaacttgtaatcaatactggcaacattgtcatccaggcggcatgaattagtgatccttccagagaaacagactatgcaaaacaaatgtcatattaataatctagaaacagcttcgagatgggttttatctattgatgaggaacctgttaag

SEQ ID NO: 38950 - DNA, 798 bp, Zea Mays
ggaatatccattttgtcaactgggcttaggggcacgagttggctttacttgacgtctgcatatgtacttgccttctacaagtagttaggttgttactaggttgtaagtgggtaacctgtcacatatttcaacatcgtggtcgttttatatttgttcaaccaacagtactgtatactgtcctaatggtgatgctttcttgtataatctttggtcacatgtcccttaatgttctgcagatacaatggtgcgccaaactgctatggttgtcaaatgtttactgctgatgtactataagaacagcagaggccgtagctatcgtaggcagggtcaaatgttgacgattgtggaatattttctacttttgtaccgtgcattattgcctacacctgtgtggtaccgttttttcctgaacaaggagtatggaagcctattttcgtctctaaccactggcttgtatctcactttcaagttgacatctgttgtggaaaagattggaaaaggatggtgcgtagctgcaaaagagaggacatcttgcttgtgtgctcgcaagaaggatgcaaaggatctgtgatgatcagctgctgttttgggttcttgtcatgtaacatctcctatttttaaagagcaaaactgaaaatgcagttccggtcttgttgatgaaccgctagagacttaatgattttatatggtgctgtcggttgtctgttgtcttatatcttactgtatatggtaatcatctttgtttttctagatcttcatgtaattgttgctattcaattgttttttaaatggttgaaa

SEQ ID NO: 38951 - DNA, 360 bp, Zea Mays
tttactgctgatgtactataagaacagcagaggccgtagctatcgtaggcagattggaaaaggatggtgcgtagctgcaaaagagaggacatcttgcttgtgtgctcgcaagaaggatgcaaaggatctgtgatgatcagctgctgttttgggttcttgtcatgtaacatctcctatttttaaagagcaaaactgaaaatgcagttccggtcttgttgatgaaccgctagagacttaatgattttatatggtgctgtcggttgtctgttgtcttatatcttactgtatatggtaatcatctttgtttttctagatcttcatgtaattgttgctattcaattgttttttaaatggttgaaa

SEQ ID NO: 38952 - DNA, 1177 bp, Zea Mays
tctattctatctagatctcactctttatttcaaacctttaagccataaatagtgaaaaacatctatacgcagattctcctggagatgagcttattcactcattcggaccaagacgacgaacttcgaatttcctcaattttcacgcgagcaccttccgcctcttcgcagcggccgcctgcgccatccatgtcgtcgcccttctccgccgcttccgtggccgcggggtcagaggcggcagccggcacgaggaagctgcctgtgctgctgttcgacgtcatggacaccctcgtccgggacccgttctaccaccacatccccggcttctttcaaatgtccatgaaggaactactagaagccaagcatccaacggcttggtcagaatttgagaaaggactgattgatgagaatgagctggccaaaaagttcttcaaggatggcagatcgtttgatttgcaaggtctaaaagagtgcatggtgagagcatatgaatacattgatggcgtcgaagatattctttgctgtttgaagaaaaataattatgaaatgcatgcttttacaaattatccagtatggtaccaattaattgaggataagctaaagctctcaaagtatttatcttggacattttgttcttgtagaactggaaagcgcaaaccttcgcccgagttttatcttcaagctgcagatcaactcaacgttgatccagcaagctgcgtttttattgatgataggatgataaacattgaagcagctcttagtgtaggaatggttgggttgcagtttaaaagtgctgaggcactacagaaggacttgtgtgctctgggagttgaattatctcctcttgtttgtgaaggtgaagcacaagtacaataaggtcgtgtgtgccctatcttatcttatgctcaaccaaactacaatacgaatgtacataatgtatggtgcccttgctttgtgagctatgtcaataaattattgtgctaatctgaatcgtctatcaaatataactgatatgttaactgcacatattctctcctatgaagagctttttgttgtcagttagtagaggtgaatttgttttatcacaaacatgtgctgtcaagcctcagccaataggccctgtaacttcaattcaggttaatgttcgtcgagtttgaggagtttttatcaaaagttataa

SEQ ID NO: 38953 - DNA, 1042 bp, Zea Mays
tctattctatctagatctcactctttatttcaaacctttaagccataaatagtgaaaaacatctatacgcagattctcctggagatgagcttattcactcattcggaccaagacgacgaacttcgaatttcctcaattttcacgcgagcacctcggccgcctgcgccatccatgtcgtcgcccttctccgccgcttccgtggccgcggggtcagaggcggcagccggcacgaggaagctgcctgtgctgctgttcgacgtcatggacaccctcgtccgggacccgttctaccaccacatccccggcttctttcaaatgtccatgaaggaactactagaagccaagcatccaacggcttggtcagaatttgagaaaggactgattgatgagaatgagctggccaaaaagttcttcaaggatggcagatcgtttgatttgcaaggtctaaaagagtgcatggtgagagcatatgaatacattgatggcgtcgaagatattctttgctgtttgaagaaaaataattatgaaatgcatgcttttacaaattatccagtatggtaccaattaattgaggataagctaaagctctcaaagtatttatcttggacattttgttcttgtagaactggaatggttgggttgcagtttaaaagtgctgaggcactacagaaggacttgtgtgctctgggagttgaattatctcctcttgtttgtgaaggtgaagcacaagtacaataaggtcgtgtgtgccctatcttatcttatgctcaaccaaactacaatacgaatgtacataatgtatggtgcccttgctttgtgagctatgtcaataaattattgtgctaatctgaatcgtctatcaaatataactgatatgttaactgcacatattctctcctatgaagagctttttgttgtcagttagtagaggtgaatttgttttatcacaaacatgtgctgtcaagcctcagccaataggccctgtaacttcaattcaggttaatgttcgtcgagtttgaggagtttttatcaaaagttataa

SEQ ID NO: 38954 - DNA, 1074 bp, Zea Mays
tctattctatctagatctcactctttatttcaaacctttaagccataaatagtgaaaaacatctatacgcagattctcctggagatgagcttattcactcattcggaccaagacgacgaacttcgaatttcctcaattttcacgcgagcacctcggccgcctgcgccatccatgtcgtcgcccttctccgccgcttccgtggccgcggggtcagaggcggcagccggcacgaggaagctgcctgtgctgctgttcgacgtcatggacaccctcgtccgggacccgttctaccaccacatccccggcttctttcaaatgtccatgaaggaactactagaagccaagcatccaacggcttggtcagaatttgagaaaggactgattgatgagaatgagctggccaaaaagttcttcaaggatggcagatcgtttgatttgcaaggtctaaaagagtgcatggtgagagcatatgaatacattgatggcgtcgaagatattctttgctgtttgaagaaaaataattatgaaatgcatgcttttacaaattatccagtatggtaccaattaattgaggataagctaaagctctcaaagtatttatcttggacattttgttcttgtagaactggatgataaacattgaagcagctcttagtgtaggaatggttgggttgcagtttaaaagtgctgaggcactacagaaggacttgtgtgctctgggagttgaattatctcctcttgtttgtgaaggtgaagcacaagtacaataaggtcgtgtgtgccctatcttatcttatgctcaaccaaactacaatacgaatgtacataatgtatggtgcccttgctttgtgagctatgtcaataaattattgtgctaatctgaatcgtctatcaaatataactgatatgttaactgcacatattctctcctatgaagagctttttgttgtcagttagtagaggtgaatttgttttatcacaaacatgtgctgtcaagcctcagccaataggccctgtaacttcaattcaggttaatgttcgtcgagtttgaggagtttttatcaaaagttataa

SEQ ID NO: 38955 - DNA, 1197 bp, Zea Mays
tctattctatctagatctcactctttatttcaaacctttaagccataaatagtgaaaaacatctatacgcagattctcctggagatgagcttattcactcattcggaccaagacgacgaacttcgaatttcctcaattttcacgcgagcacctgtttgtatcgccggcggatcggatatattttctcgcggccgcctgcgccatccatgtcgtcgcccttctccgccgcttccgtggccgcggggtcagaggcggcagccggcacgaggaagctgcctgtgctgctgttcgacgtcatggacaccctcgtccgggacccgttctaccaccacatccccggcttctttcaaatgtccatgaaggaactactagaagccaagcatccaacggcttggtcagaatttgagaaaggactgattgatgagaatgagctggccaaaaagttcttcaaggatggcagatcgtttgatttgcaaggtctaaaagagtgcatggtgagagcatatgaatacattgatggcgtcgaagatattctttgctgtttgaagaaaaataattatgaaatgcatgcttttacaaattatccagtatggtaccaattaattgaggataagctaaagctctcaaagtatttatcttggacattttgttcttgtagaactggaaagcgcaaaccttcgcccgagttttatcttcaagctgcagatcaactcaacgttgatccagcaagctgcgtttttattgatgataggatgataaacattgaagcagctcttagtgtaggaatggttgggttgcagtttaaaagtgctgaggcactacagaaggacttgtgtgctctgggagttgaattatctcctcttgtttgtgaaggtgaagcacaagtacaataaggtcgtgtgtgccctatcttatcttatgctcaaccaaactacaatacgaatgtacataatgtatggtgcccttgctttgtgagctatgtcaataaattattgtgctaatctgaatcgtctatcaaatataactgatatgttaactgcacatattctctcctatgaagagctttttgttgtcagttagtagaggtgaatttgttttatcacaaacatgtgctgtcaagcctcagccaataggccctgtaacttcaattcaggttaatgttcgtcgagtttgaggagtttttatcaaaagttataa

SEQ ID NO: 38956 - DNA, 695 bp, Zea Mays
tctattctatctagatctcactctttatttcaaacctttaagccataaatagtgaaaaacatctatacgcagattctcctggagatgagcttattcactcattcggaccaagacgacgaacttcgaatttcctcaattttcacgcgagcacctcggccgcctgcgccatccatgtcgtcgcccttctccgccgcttccgtggccgcggggtcagaggcggcagccggcacgaggaagctgcctgtgctgctgttcgacgtcatggacaccctcgtccgggacccgttctaccaccacatccccggcttctttcaaatgtccatgaaggaactactagaagccaagcatccaacggcttggtcagaatttgagaaaggactgattgatgagaatgagctggccaaaaagttcttcaaggatggcagatcgtttgatttgcaaggtctaaaagagtgcatggtgagagcatatgaatacattgatggcgtcgaagatattctttgctgtttgaagaaaaataattatgaaatgcatgcttttacaaattatccagtatggtaccaattaattgaggataagctaaagctctcaaagtatttatcttggacattttgttcttgtagaactggcggcacatggtctggagataactattcgccatgaaagagagtatgactgtaggaatgcgcctattg

SEQ ID NO: 38957 - DNA, 3173 bp, Zea Mays
cagcgaagaggcaacacgcgaacgagaacgacgaagccaaagcaacacaccagcgcgcacgcacgcgcagcgtccggcgggcatcaccacctcctgtcctcctccctcctgccccgatccgccctccccgccgctcgccgcacccgatgtcggccgccgacccttccgcggctccggccgcggccgccgacccggacggccctgactccgtgcggctcacctggaatacctggccacggtcaaaggtcgaggccagccgctgcgtcgtgccgctcgccgccaccatctcgcccactcgcgtcccggatccctccgcggcatccccgccgccgctcccttaccctccgctccgctgcaagcctccctgttccgcgctcctcaaccccttcgcgcgcgtagacttcgctgccaagatctggatctgcccgctctgcttctcccggaaccactttcccccgcactatgctgccatatctgagtccaacgtccccgccgagctcttcccgcagtgctccaccgtcgactacatcgtcggcggagccggcatccctggggtaggcggcgcgccgccgcccccgccgcccgtatttctcttcgtcatcgacacctgcgtcatcgaggaggagctggagtacgttaagatggccatgcggaaggccgtcgcgctcctgccggagcacgcactcgtgggcctcgtcaccttcggcacgcaggtgcacctgcacgagctcggattctccgatctcagcaagatctacgtcttccgggggaccaaggagatctctaaggaccagattttggatcagcttggcctggcgggtgctgggcggccgggcttccccaagatgccacagcaaccgggcgggccacaggtgaatgggatgcatccgccgtccacggccggggtcaacaggttcctgctcccggtgtcagattgtgagattgctctcagcacgttgctggacgagttgcagcctgaccaatggccagtcgaggctgggaaccgtgcgatccgttgcactggtgttgcgctcagtgtagctgctgggttacttggtgcttgcatgcctggaacaggtgcaaggatcatcgcattgctaggtggtccgtgtactgagggacctggaatgattgtttcaaaagatttgtcagaaccagttagatcacataaggatcttgacaaggatgcagctcctcacttccagaaagcagttaaattttatgatggtcttgctaagcagttggtcagtcaaggtcacgtgttagatgtttttgcttctgctctcgatcaggttgggctagctgagatgaaggttgctattgagagaacaggtggccttgttgtcttgtctgaaagttttgggcattccgtattcaaggattctttcaaacgcatttttgagggaggtgaacagtctctaggactttctttcaatggcataattgaaataaactgttcaaaagatattaaagtccaaggtattattggaccatgcacatctttggagaagaaaggagccatgtgctctgacacagttgtcggtcaaggaaatacatcagcatggaaaatgtgtggtctcgatagaaatacttctcttacagtattttttgatgtctcaccgagtgaacgatcgagccagccaggaaaccaaaatccccatttgtatatacaatttgtgacaagttaccaacacccagaaggtcaaatgaggataagagttactacgatatgcaggaaatgggtagatggttccactaataccgagaagtggtatttttatgaaacgcatgctgcaactgcaaatgaaaagactggctcgtggcatttcaatgcatgacctcactagcattttgcgctagggcccaaattatcccatgaattagttgaaggttttgaccaggaaactgcagctgttgtgttggcaagatacatctctttgaaaatggagatggaggaagagttcgatgcaacccggtggcttgatagatctctcatacgtctttgttcaagatttggggattaccggaaggatgatccctcttcatttagcctgcattcaaatttctcattgttccctcagtttatgtttaatcttcggcgttcacaatttgttcaggttttcaataacagtccagatgagacagcttatttcaggatgttactcaatcgtgagagtatcactaactcggttgccatgatccagccttccttgatatcattttcttttgattcacctccatctccggtatttctagatgtggcatcaatagcagcagatcgtatactgctacttgatgcgtactttagtgttgtcatttttcacggaatgacaattgctcagtggagaaacatgggttatcagaaccaacctgagcatgagcaatttgcacaactattacaagcaccacatgaggaggcacaaatgataataaagggtcgatttccagttccaagactagttgtctgcgaccaacatggctcgcaggcaaggtttttgttggctaagctgaatccatcggccacatataactcagctcatgatgttgctcctggttctgacatcattttcaccgatgatgttagcttccaggtcttctgtgagcacctacaaaggctggctgttcagtcttgaggacctacctgtatgcaaagttttctgagatcagacaattttttcgggaaactgccctaaaggaatgtgtaagttgcctacagaggtctattatctacatatatagtatatatacttatttatgttgacatcacccagctttcttctgcaaggtggttgcatgaattgagttgtgtgtcaagttcactttccagaaatcagaaatgtaagatcgcaaggcattataatgcagtgtgcatacaattgagcagcttagatcatgtttgaatgcactaggtctaatagttagctactaaaattagttgaaaacatttagctaatagttcagctattaattatttttagtaaattagctaatagttaagctatctatttgttagctagctaattccactagtattttttagcccacctaagtattagctctagtgcattcaaatactcccttaagcaattgtctctcaagcacatcagtttgtaaatgtgacattttggacgattgacatgctcttcaacattagattttactgctatcttata

SEQ ID NO: 38958 - DNA, 1801 bp, Zea Mays
gaagaggcaacacgcgaacgagaacgacgaagccaaagcaacacaccagcgcgcacgcacgcgcagcgtccggcgggcatcaccacctcctgtcctcctccctcctgccccgatccgccctccccgccgctcgccgcacccgatgtcggccgccgacccttccgcggctccggccgcggccgccgacccggacggccctgactccgtgcggctcacctggaatacctggccacggtcaaaggtcgaggccagccgctgcgtcgtgccgctcgccgccaccatctcgcccactcgcgtcccggatccctccgcggcatccccgccgccgctcccttaccctccgctccgctgcaagcctccctgttccgcgctcctcaaccccttcgcgcgcgtagacttcgctgccaagatctggatctgcccgctctgcttctcccggaaccactttcccccgcactatgctgccatatctgagtccaacgtccccgccgagctcttcccgcagtgctccaccgtcgactacatcgtcggcggagccggcatccctggggtaggcggcgcgccgccgcccccgccgcccgtatttctcttcgtcatcgacacctgcgtcatcgaggaggagctggagtacgttaagatggccatgcggaaggccgtcgcgctcctgccggagcacgcactcgtgggcctcgtcaccttcggcacgcaggtgcacctgcacgagctcggattctccgatctcagcaagatctacgtcttccgggggaccaaggagatctctaaggaccagattttggatcagcttggcctggcgggtgctgggcggccgggcttccccaagatgccacagcaaccgggcgggccacaggtgaatgggatgcatccgccgtccacggccggggtcaacaggttcctgctcccggtgtcagattgtgagattgctctcagcacgttgctggacgagttgcagcctgaccaatggccagtcgaggctgggaaccgtgcgatccgttgcactggtgttgcgctcagtgtagctgctgggttacttggtgcttgcatgcctggaacaggtgcaaggatcatcgcattgctaggtggtccgtgtactgagggacctggaatgattgtttcaaaagatttgtcagaaccagttagatcacataaggatcttgacaaggatgcagctcctcacttccagaaagcagttaaattttatgatggtcttgctaagcagttggtcagtcaaggtcacgtgttagatgtttttgcttctgctctcgatcaggttgggctagctgagatgaaggttgctattgagagaacaggtggccttgttgtcttgtctgaaagttttgggcattccgtattcaaggattctttcaaacgcatttttgagggaggtgaacagtctctaggactttctttcaatggcataattgaaataaactgttcaaaagatattaaagtccaaggtattattggaccatgcacatctttggagaagaaaggagccatgtgctctgacacagttgtcggtcaaggaaatacatcagcatggaaaatgtgtggtctcgatagaaatacttctcttacagtattttttgatgtctcaccgagtgaacgatcgagccagccaggaaaccaaaatccccatttgtatatacaatttgtgacaagttaccaacacccagaaggtcaaatgaggataagagttactacgatatgcaggaaatgggtagatggttccactaataccgagctcaatatttcacggaacgtacttggtgattaatgtttt

SEQ ID NO: 38959 - DNA, 1819 bp, Zea Mays
gaagaggcaacacgcgaacgagaacgacgaagccaaagcaacacaccagcgcgcacgcacgcgcagcgtccggcgggcatcaccacctcctgtcctcctccctcctgccccgatccgccctccccgccgctcgccgcacccgatgtcggccgccgacccttccgcggctccggccgcggccgccgacccggacggccctgactccgtgcggctcacctggaatacctggccacggtcaaaggtcgaggccagccgctgcgtcgtgccgctcgccgccaccatctcgcccactcgcgtcccggatccctccgcggcatccccgccgccgctcccttaccctccgctccgctgcaagcctccctgttccgcgctcctcaaccccttcgcgcgcgtagacttcgctgccaagatctggatctgcccgctctgcttctcccggaaccactttcccccgcactatgctgccatatctgagtccaacgtccccgccgagctcttcccgcagtgctccaccgtcgactacatcgtcggcggagccggcatccctggggtaggcggcgcgccgccgcccccgccgcccgtatttctcttcgtcatcgacacctgcgtcatcgaggaggagctggagtacgttaagatggccatgcggaaggccgtcgcgctcctgccggagcacgcactcgtgggcctcgtcaccttcggcacgcaggtgcacctgcacgagctcggattctccgatctcagcaagatctacgtcttccgggggaccaaggagatctctaaggaccagattttggatcagcttggcctggcgggtgctgggcggccgggcttccccaagatgccacagcaaccgggcgggccacaggtgaatgggatgcatccgccgtccacggccggggtcaacaggttcctgctcccggtgtcagattgtgagattgctctcagcacgttgctggacgagttgcagcctgaccaatggccagtcgaggctgggaaccgtgcgatccgttgcactggtgttgcgctcagtgtagctgctgggttacttggtgcttgcatgcctggaacaggtgcaaggatcatcgcattgctaggtggtccgtgtactgagggacctggaatgattgtttcaaaagatttgtcagaaccagttagatcacataaggatcttgacaaggatgcagctcctcacttccagaaagcagttaaattttatgatggtcttgctaagcagttggtcagtcaaggtcacgtgttagatgtttttgcttctgctctcgatcaggttgggctagctgagatgaaggttgctattgagagaacaggtggccttgttgtcttgtctgaaagttttgggcattccgtattcaaggattctttcaaacgcatttttgagggaggtgaacagtctctaggactttctttcaatggcataattgaaataaactgttcaaaagatattaaagtccaaggtattattggaccatgcacatctttggagaagaaaggagccatgtgctctgacacagttgtcggtcaaggaaatacatcagcatggaaaatgtgtggtctcgatagaaatacttctcttacagtattttttgatgtctcaccgagtgaacgatcgagccagccaggaaaccaaaatccccatttgtatatacaatttgtgacaagttaccaacacccagaaggtcaaatgaggataagagttactacgatatgcaggaaatgggtagatggttccactaataccgagttttgtgtgaatatattggactttcttggatgatatgcaagaagtggtaagtgccag

SEQ ID NO: 38960 - DNA, 3126 bp, Zea Mays
gaagaggcaacacgcgaacgagaacgacgaagccaaagcaacacaccagcgcgcacgcacgcgcagcgtccggcgggcatcaccacctcctgtcctcctccctcctgccccgatccgccctccccgccgctcgccgcacccgatgtcggccgccgacccttccgcggctccggccgcggccgccgacccggacggccctgactccgtgcggctcacctggaatacctggccacggtcaaaggtcgaggccagccgctgcgtcgtgccgctcgccgccaccatctcgcccactcgcgtcccggatccctccgcggcatccccgccgccgctcccttaccctccgctccgctgcaagcctccctgttccgcgctcctcaaccccttcgcgcgcgtagacttcgctgccaagatctggatctgcccgctctgcttctcccggaaccactttcccccgcactatgctgccatatctgagtccaacgtccccgccgagctcttcccgcagtgctccaccgtcgactacatcgtcggcggagccggcatccctggggtaggcggcgcgccgccgcccccgccgcccgtatttctcttcgtcatcgacacctgcgtcatcgaggaggagctggagtacgttaagatggccatgcggaaggccgtcgcgctcctgccggagcacgcactcgtgggcctcgtcaccttcggcacgcaggtgcacctgcacgagctcggattctccgatctcagcaagatctacgtcttccgggggaccaaggagatctctaaggaccagattttggatcagcttggcctggcgggtgctgggcggccgggcttccccaagatgccacagcaaccgggcgggccacaggtgaatgggatgcatccgccgtccacggccggggtcaacaggttcctgctcccggtgtcagattgtgagattgctctcagcacgttgctggacgagttgcagcctgaccaatggccagtcgaggctgggaaccgtgcgatccgttgcactggtgttgcgctcagtgtagctgctgggttacttggtgcttgcatgcctggaacaggtgcaaggatcatcgcattgctaggtggtccgtgtactgagggacctggaatgattgtttcaaaagatttgtcagaaccagttagatcacataaggatcttgacaaggatgcagctcctcacttccagaaagcagttaaattttatgatggtcttgctaagcagttggtcagtcaaggtcacgtgttagatgtttttgcttctgctctcgatcaggttgggctagctgagatgaaggttgctattgagagaacaggtggccttgttgtcttgtctgaaagttttgggcattccgtattcaaggattctttcaaacgcatttttgagggaggtgaacagtctctaggactttctttcaatggcataattgaaataaactgttcaaaagatattaaagtccaaggtattattggaccatgcacatctttggagaagttgtcggtcaaggaaatacatcagcatggaaaatgtgtggtctcgatagaaatacttctcttacagtattttttgatgtctcaccgagtgaacgatcgagccagccaggaaaccaaaatccccatttgtatatacaatttgtgacaagttaccaacacccagaaggtcaaatgaggataagagttactacgatatgcaggaaatgggtagatggttccactaataccgaggaattagttgaaggttttgaccaggaaactgcagctgttgtgttggcaagatacatctctttgaaaatggagatggaggaagagttcgatgcaacccggtggcttgatagatctctcatacgtctttgttcaagatttggggattaccggaaggatgatccctcttcatttagcctgcattcaaatttctcattgttccctcagtttatgtttaatcttcggcgttcacaatttgttcaggttttcaataacagtccagatgagacagcttatttcaggatgttactcaatcgtgagagtatcactaactcggttgccatgatccagccttccttgatatcattttcttttgattcacctccatctccggtatttctagatgtggcatcaatagcagcagatcgtatactgctacttgatgcgtactttagtgttgtcatttttcacggaatgacaattgctcagtggagaaacatgggttatcagaaccaacctgagcatgagcaatttgcacaactattacaagcaccacatgaggaggcacaaatgataataaagggtcgatttccagttccaagactagttgtctgcgaccaacatggctcgcaggcaaggtttttgttggctaagctgaatccatcggccacatataactcagctcatgatgttgctcctggttctgacatcattttcaccgatgatgttagcttccaggtcttctgtgagcacctacaaaggctggctgttcagtcttgaggacctacctgtatgcaaaggttgtacaccctatttgatagttgctcataatgcactgggttcttaggttggagttgtgagaatttcccttttctgtttctctttggccatagttttctgagatcagacaattttttcgggaaactgccctaaaggaatgtgtaagttgcctacagaggtctattatctacatatatagtatatatacttatttatgttgacatcacccagctttcttctgcaaggtggttgcatgaattgagttgtgtgtcaagttcactttccagaaatcagaaatgtaagatcgcaaggcattataatgcagtgtgcatacaattgagcagcttagatcatgtttgaatgcactaggtctaatagttagctactaaaattagttgaaaacatttagctaatagttcagctattaattatttttagtaaattagctaatagttaagctatctatttgttagctagctaattccactagtattttttagcccacctaagtattagctctagtgcattcaaatactcccttaagcaattgtctctcaagcacatcagtttgtaaatgtgacattttggacgattgacatgctcttcaacattagattttactgctatcttata

SEQ ID NO: 38961 - DNA, 3123 bp, Zea Mays
gaagaggcaacacgcgaacgagaacgacgaagccaaagcaacacaccagcgcgcacgcacgcgcagcgtccggcgggcatcaccacctcctgtcctcctccctcctgccccgatccgccctccccgccgctcgccgcacccgatgtcggccgccgacccttccgcggctccggccgcggccgccgacccggacggccctgactccgtgcggctcacctggaatacctggccacggtcaaaggtcgaggccagccgctgcgtcgtgccgctcgccgccaccatctcgcccactcgcgtcccggatccctccgcggcatccccgccgccgctcccttaccctccgctccgctgcaagcctccctgttccgcgctcctcaaccccttcgcgcgcgtagacttcgctgccaagatctggatctgcccgctctgcttctcccggaaccactttcccccgcactatgctgccatatctgagtccaacgtccccgccgagctcttcccgcagtgctccaccgtcgactacatcgtcggcggagccggcatccctggggtaggcggcgcgccgccgcccccgccgcccgtatttctcttcgtcatcgacacctgcgtcatcgaggaggagctggagtacgttaagatggccatgcggaaggccgtcgcgctcctgccggagcacgcactcgtgggcctcgtcaccttcggcacgcaggtgcacctgcacgagctcggattctccgatctcagcaagatctacgtcttccgggggaccaaggagatctctaaggaccagattttggatcagcttggcctggcgggtgctgggcggccgggcttccccaagatgccacagcaaccgggcgggccacaggtgaatgggatgcatccgccgtccacggccggggtcaacaggttcctgctcccggtgtcagattgtgagattgctctcagcacgttgctggacgagttgcagcctgaccaatggccagtcgaggctgggaaccgtgcgatccgttgcactggtgttgcgctcagtgtagctgctgggttacttggtgcttgcatgcctggaacaggtgcaaggatcatcgcattgctaggtggtccgtgtactgagggacctggaatgattgtttcaaaagatttgtcagaaccagttagatcacataaggatcttgacaaggatgcagctcctcacttccagaaagcagttaaattttatgatggtcttgctaagcagttggtcagtcaaggtcacgtgttagatgtttttgcttctgctctcgatcaggttgggctagctgagatgaaggttgctattgagagaacaggtggccttgttgtcttgtctgaaagttttgggcattccgtattcaaggattctttcaaacgcatttttgagggagtggcataattgaaataaactgttcaaaagatattaaagtccaaggtattattggaccatgcacatctttggagaagaaaggagccatgtgctctgacacagttgtcggtcaaggaaatacatcagcatggaaaatgtgtggtctcgatagaaatacttctcttacagtattttttgatgtctcaccgagtgaacgatcgagccagccaggaaaccaaaatccccatttgtatatacaatttgtgacaagttaccaacacccagaaggtcaaatgaggataagagttactacgatatgcaggaaatgggtagatggttccactaataccgaggaattagttgaaggttttgaccaggaaactgcagctgttgtgttggcaagatacatctctttgaaaatggagatggaggaagagttcgatgcaacccggtggcttgatagatctctcatacgtctttgttcaagatttggggattaccggaaggatgatccctcttcatttagcctgcattcaaatttctcattgttccctcagtttatgtttaatcttcggcgttcacaatttgttcaggttttcaataacagtccagatgagacagcttatttcaggatgttactcaatcgtgagagtatcactaactcggttgccatgatccagccttccttgatatcattttcttttgattcacctccatctccggtatttctagatgtggcatcaatagcagcagatcgtatactgctacttgatgcgtactttagtgttgtcatttttcacggaatgacaattgctcagtggagaaacatgggttatcagaaccaacctgagcatgagcaatttgcacaactattacaagcaccacatgaggaggcacaaatgataataaagggtcgatttccagttccaagactagttgtctgcgaccaacatggctcgcaggcaaggtttttgttggctaagctgaatccatcggccacatataactcagctcatgatgttgctcctggttctgacatcattttcaccgatgatgttagcttccaggtcttctgtgagcacctacaaaggctggctgttcagtcttgaggacctacctgtatgcaaaggttgtacaccctatttgatagttgctcataatgcactgggttcttaggttggagttgtgagaatttcccttttctgtttctctttggccatagttttctgagatcagacaattttttcgggaaactgccctaaaggaatgtgtaagttgcctacagaggtctattatctacatatatagtatatatacttatttatgttgacatcacccagctttcttctgcaaggtggttgcatgaattgagttgtgtgtcaagttcactttccagaaatcagaaatgtaagatcgcaaggcattataatgcagtgtgcatacaattgagcagcttagatcatgtttgaatgcactaggtctaatagttagctactaaaattagttgaaaacatttagctaatagttcagctattaattatttttagtaaattagctaatagttaagctatctatttgttagctagctaattccactagtattttttagcccacctaagtattagctctagtgcattcaaatactcccttaagcaattgtctctcaagcacatcagtttgtaaatgtgacattttggacgattgacatgctcttcaacattagattttactgctatcttata

SEQ ID NO: 38962 - DNA, 2988 bp, Zea Mays
gaagaggcaacacgcgaacgagaacgacgaagccaaagcaacacaccagcgcgcacgcacgcgcagcgtccggcgggcatcaccacctcctgtcctcctccctcctgccccgatccgccctccccgccgctcgccgcacccgatgtcggccgccgacccttccgcggctccggccgcggccgccgacccggacggccctgactccgtgcggctcacctggaatacctggccacggtcaaaggtcgaggccagccgctgcgtcgtgccgctcgccgccaccatctcgcccactcgcgtcccggatccctccgcggcatccccgccgccgctcccttaccctccgctccgctgcaagcctccctgttccgcgctcctcaaccccttcgcgcgcgtagacttcgctgccaagatctggatctgcccgctctgcttctcccggaaccactttcccccgcactatgctgccatatctgagtccaacgtccccgccgagctcttcccgcagtgctccaccgtcgactacatcgtcggcggagccggcatccctggggtaggcggcgcgccgccgcccccgccgcccgtatttctcttcgtcatcgacacctgcgtcatcgaggaggagctggagtacgttaagatggccatgcggaaggccgtcgcgctcctgccggagcacgcactcgtgggcctcgtcaccttcggcacgcaggtgcacctgcacgagctcggattctccgatctcagcaagatctacgtcttccgggggaccaaggagatctctaaggaccagattttggatcagcttggcctggcgggtgctgggcggccgggcttccccaagatgccacagcaaccgggcgggccacaggtgaatgggatgcatccgccgtccacggccggggtcaacaggttcctgctcccggtgtcagattgtgagattgctctcagcacgttgctggacgagttgcagcctgaccaatggccagtcgaggctgggaaccgtgcgatccgttgcactggtgttgcgctcagtgtagctgctgggttacttggtgcttgcatgcctggaacaggtgcaaggatcatcgcattgctaggtggtccgtgtactgagggacctggaatgattgtttcaaaagatttgtcagaaccagttagatcacataaggatcttgacaaggatgcagctcctcacttccagaaagcagttaaattttatgatggtcttgctaagcagttggtcagtcaaggtcacgtgttagatgtttttgcttctgctctcgatcaggttgggctagctgagatgaaggttgctattgagagaacaggtggccttgttgtcttgtctgaaagttttgggcattccgtattcaaggattctttcaaacgcatttttgagggaggtgaacagtctctaggactttctttcaatggcataattgaaataaactgttcaaaagatattaaagtccaaggtattattggaccatgcacatctttggagaagaaaggagccatgtgctctgacacagttgtcggtcaaggaaatacatcagcatggaaaatgtgtggtctcgatagaaatacttctcttacagtattttttgatgtctcaccgagtgaacgatcgagccagccaggaaaccaaaatccccatttgtatatacaatttgtgacaagttaccaacacccagaaggtcaaatgaggataagagttactacgatatgcaggaaatgggtagatggttccactaataccgaggaattagttgaaggttttgaccaggaaactgcagctgttgtgttggcaagatacatctctttgaaaatggagatggaggaagagttcgatgcaacccggtggcttgatagatctctcatacgtctttgttcaagatttggggattaccggaaggatgatccctcttcatttagcctgcattcaaatttctcattgttccctcagtttatgtttaatcttcggcgttcacaatttgttcaggttttcaataacagtccagatgagacagcttatttcaggatgttactcaatcgtgagagtatcactaactcggttgccatgatccagccttccttgatatcattttcttttgattcacctccatctccggtatttctagatgtggcatcaatagcagcagatcgtatactgctacttgatgcgtactttagtgttgtcatttttcacggaatgacaattgctcagtggagaaacatgggttatcagaaccaacctgagcatgagcaatttgcacaactattacaagcaccacatgaggaggcacaaatgataataaagggtcgatttccagttccaagactagttgtctgcgaccaacatggctcgcaggcaaggtttttgttggctaagctgaatccatcggccacatataactcagctcatgatgttgctcctggttctgacatcattttcaccgatgatgttagcttccaggtcttctgtgagcacctacaaaggctggctgttcagtcttgaggacctacctgtatgcaaagttttctgagatcagacaattttttcgggaaactgccctaaaggaatgtctttcttctgcaaggtggttgcatgaattgagttgtgtgtcaagttcactttccagaaatcagaaatgtaagatcgcaaggcattataatgcagtgtgcatacaattgagcagcttagatcatgtttgaatgcactaggtctaatagttagctactaaaattagttgaaaacatttagctaatagttcagctattaattatttttagtaaattagctaatagttaagctatctatttgttagctagctaattccactagtattttttagcccacctaagtattagctctagtgcattcaaatactcccttaagcaattgtctctcaagcacatcagtttgtaaatgtgacattttggacgattgacatgctcttcaacattagattttactgctatcttata

SEQ ID NO: 38963 - DNA, 3046 bp, Zea Mays
gaagaggcaacacgcgaacgagaacgacgaagccaaagcaacacaccagcgcgcacgcacgcgcagcgtccggcgggcatcaccacctcctgtcctcctccctcctgccccgatccgccctccccgccgctcgccgcacccgatgtcggccgccgacccttccgcggctccggccgcggccgccgacccggacggccctgactccgtgcggctcacctggaatacctggccacggtcaaaggtcgaggccagccgctgcgtcgtgccgctcgccgccaccatctcgcccactcgcgtcccggatccctccgcggcatccccgccgccgctcccttaccctccgctccgctgcaagcctccctgttccgcgctcctcaaccccttcgcgcgcgtagacttcgctgccaagatctggatctgcccgctctgcttctcccggaaccactttcccccgcactatgctgccatatctgagtccaacgtccccgccgagctcttcccgcagtgctccaccgtcgactacatcgtcggcggagccggcatccctggggtaggcggcgcgccgccgcccccgccgcccgtatttctcttcgtcatcgacacctgcgtcatcgaggaggagctggagtacgttaagatggccatgcggaaggccgtcgcgctcctgccggagcacgcactcgtgggcctcgtcaccttcggcacgcaggtgcacctgcacgagctcggattctccgatctcagcaagatctacgtcttccgggggaccaaggagatctctaaggaccagattttggatcagcttggcctggcgggtgctgggcggccgggcttccccaagatgccacagcaaccgggcgggccacaggtgaatgggatgcatccgccgtccacggccggggtcaacaggttcctgctcccggtgtcagattgtgagattgctctcagcacgttgctggacgagttgcagcctgaccaatggccagtcgaggctgggaaccgtgcgatccgttgcactggtgttgcgctcagtgtagctgctgggttacttggtgcttgcatgcctggaacaggtgcaaggatcatcgcattgctaggtggtccgtgtactgagggacctggaatgattgtttcaaaagatttgtcagaaccagttagatcacataaggatcttgacaaggatgcagctcctcacttccagaaagcagttaaattttatgatggtcttgctaagcagttggtcagtcaaggtcacgtgttagatgtttttgcttctgctctcgatcaggttgggctagctgagatgaaggttgctattgagagaacaggtggccttgttgtcttgtctgaaagttttgggcattccgtattcaaggattctttcaaacgcatttttgagggaggtgaacagtctctaggactttctttcaatggcataattgaaataaactgttcaaaagatattaaagtccaaggtattattggaccatgcacatctttggagaagaaaggagccatgtgctctgacacagttgtcggtcaaggaaatacatcagcatggaaaatgtgtggtctcgatagaaatacttctcttacagtattttttgatgtctcaccgagtgaacgatcgagccagccaggaaaccaaaatccccatttgtatatacaatttgtgacaagttaccaacacccagaaggtcaaatgaggataagagttactacgatatgcaggaaatgggtagatggttccactaataccgaggaattagttgaaggttttgaccaggaaactgcagctgttgtgttggcaagatacatctctttgaaaatggagatggaggaagagttcgatgcaacccggtggcttgatagatctctcatacgtctttgttcaagatttggggattaccggaaggatgatccctcttcatttagcctgcattcaaatttctcattgttccctcagtttatgtttaatcttcggcgttcacaatttgttcaggttttcaataacagtccagatgagacagcttatttcaggatgttactcaatcgtgagagtatcactaactcggttgccatgatccagccttccttgatatcattttcttttgattcacctccatctccggtatttctagatgtggcatcaatagcagcagatcgtatactgctacttgatgcgtactttagtgttgtcatttttcacggaatgacaattgctcagtggagaaacatgggttatcagaaccaacctgagcatgaggcaaggtttttgttggctaagctgaatccatcggccacatataactcagctcatgatgttgctcctggttctgacatcattttcaccgatgatgttagcttccaggtcttctgtgagcacctacaaaggctggctgttcagtcttgaggacctacctgtatgcaaaggttgtacaccctatttgatagttgctcataatgcactgggttcttaggttggagttgtgagaatttcccttttctgtttctctttggccatagttttctgagatcagacaattttttcgggaaactgccctaaaggaatgtgtaagttgcctacagaggtctattatctacatatatagtatatatacttatttatgttgacatcacccagctttcttctgcaaggtggttgcatgaattgagttgtgtgtcaagttcactttccagaaatcagaaatgtaagatcgcaaggcattataatgcagtgtgcatacaattgagcagcttagatcatgtttgaatgcactaggtctaatagttagctactaaaattagttgaaaacatttagctaatagttcagctattaattatttttagtaaattagctaatagttaagctatctatttgttagctagctaattccactagtattttttagcccacctaagtattagctctagtgcattcaaatactcccttaagcaattgtctctcaagcacatcagtttgtaaatgtgacattttggacgattgacatgctcttcaacattagattttactgctatcttata

SEQ ID NO: 38964 - DNA, 3117 bp, Zea Mays
gaagaggcaacacgcgaacgagaacgacgaagccaaagcaacacaccagcgcgcacgcacgcgcagcgtccggcgggcatcaccacctcctgtcctcctccctcctgccccgatccgccctccccgccgctcgccgcacccgatgtcggccgccgacccttccgcggctccggccgcggccgccgacccggacggccctgactccgtgcggctcacctggaatacctggccacggtcaaaggtcgaggccagccgctgcgtcgtgccgctcgccgccaccatctcgcccactcgcgtcccggatccctccgcggcatccccgccgccgctcccttaccctccgctccgctgcaagcctccctgttccgcgctcctcaaccccttcgcgcgcgtagacttcgctgccaagatctggatctgcccgctctgcttctcccggaaccactttcccccgcactatgctgccatatctgagtccaacgtccccgccgagctcttcccgcagtgctccaccgtcgactacatcgtcggcggagccggcatccctggggtaggcggcgcgccgccgcccccgccgcccgtatttctcttcgtcatcgacacctgcgtcatcgaggaggagctggagtacgttaagatggccatgcggaaggccgtcgcgctcctgccggagcacgcactcgtgggcctcgtcaccttcggcacgcaggtgcacctgcacgagctcggattctccgatctcagcaagatctacgtcttccgggggaccaaggagatctctaaggaccagattttggatcagcttggcctggcgggtgctgggcggccgggcttccccaagatgccacagcaaccgggcgggccacaggtgaatgggatgcatccgccgtccacggccggggtcaacaggttcctgctcccggtgtcagattgtgagattgctctcagcacgttgctggacgagttgcagcctgaccaatggccagtcgaggctgggaaccgtgcgatccgttgcactggtgttgcgctcagtgtagctgctgggttacttggtgcttgcatgcctggaacaggtgcaaggatcatcgcattgctaggtggtccgtgtactgagggacctggaatgattgtttcaaaagatttgtcagaaccagttagatcacataaggatcttgacaaggatgcagctcctcacttccagaaagcagttaaattttatgatggtcttgctaagcagttggtcagtcaaggtcacgtgttagatgtttttgcttctgctctcgatcaggttgggctagctgagatgaaggttgctattgagagaacaggtggccttgttgtcttgtctgaaagttttgggcattccgtattcaaggattctttcaaacgcatttttgagggaggtgaacagtctctaggactttctttcaatggcataattgaaataaactgttcaaaagatattaaagtccaaggtattattggaccatgcacatctttggagaagaaaggagccatgtgctctgacacagttgtcggtcaaggaaatacatcagcatggaaaatgtgtggtctcgatagaaatacttctcttacagtattttttgatgtctcaccgagtgaacgatcgagccagccaggaaaccaaaatccccatttgtatatacaatttgtgacaagttaccaacacccagaaggtcaaatgaggataagagttactacgatatgcaggaaatgggtagatggttccactaataccgagctgttgtgttggcaagatacatctctttgaaaatggagatggaggaagagttcgatgcaacccggtggcttgatagatctctcatacgtctttgttcaagatttggggattaccggaaggatgatccctcttcatttagcctgcattcaaatttctcattgttccctcagtttatgtttaatcttcggcgttcacaatttgttcaggttttcaataacagtccagatgagacagcttatttcaggatgttactcaatcgtgagagtatcactaactcggttgccatgatccagccttccttgatatcattttcttttgattcacctccatctccggtatttctagatgtggcatcaatagcagcagatcgtatactgctacttgatgcgtactttagtgttgtcatttttcacggaatgacaattgctcagtggagaaacatgggttatcagaaccaacctgagcatgagcaatttgcacaactattacaagcaccacatgaggaggcacaaatgataataaagggtcgatttccagttccaagactagttgtctgcgaccaacatggctcgcaggcaaggtttttgttggctaagctgaatccatcggccacatataactcagctcatgatgttgctcctggttctgacatcattttcaccgatgatgttagcttccaggtcttctgtgagcacctacaaaggctggctgttcagtcttgaggacctacctgtatgcaaaggttgtacaccctatttgatagttgctcataatgcactgggttcttaggttggagttgtgagaatttcccttttctgtttctctttggccatagttttctgagatcagacaattttttcgggaaactgccctaaaggaatgtgtaagttgcctacagaggtctattatctacatatatagtatatatacttatttatgttgacatcacccagctttcttctgcaaggtggttgcatgaattgagttgtgtgtcaagttcactttccagaaatcagaaatgtaagatcgcaaggcattataatgcagtgtgcatacaattgagcagcttagatcatgtttgaatgcactaggtctaatagttagctactaaaattagttgaaaacatttagctaatagttcagctattaattatttttagtaaattagctaatagttaagctatctatttgttagctagctaattccactagtattttttagcccacctaagtattagctctagtgcattcaaatactcccttaagcaattgtctctcaagcacatcagtttgtaaatgtgacattttggacgattgacatgctcttcaacattagattttactgctatcttata

SEQ ID NO: 38965 - DNA, 3067 bp, Zea Mays
gaagaggcaacacgcgaacgagaacgacgaagccaaagcaacacaccagcgcgcacgcacgcgcagcgtccggcgggcatcaccacctcctgtcctcctccctcctgccccgatccgccctccccgccgctcgccgcacccgatgtcggccgccgacccttccgcggctccggccgcggccgccgacccggacggccctgactccgtgcggctcacctggaatacctggccacggtcaaaggtcgaggccagccgctgcgtcgtgccgctcgccgccaccatctcgcccactcgcgtcccggatccctccgcggcatccccgccgccgctcccttaccctccgctccgctgcaagcctccctgttccgcgctcctcaaccccttcgcgcgcgtagacttcgctgccaagatctggatctgcccgctctgcttctcccggaaccactttcccccgcactatgctgccatatctgagtccaacgtccccgccgagctcttcccgcagtgctccaccgtcgactacatcgtcggcggagccggcatccctggggtaggcggcgcgccgccgcccccgccgcccgtatttctcttcgtcatcgacacctgcgtcatcgaggaggagctggagtacgttaagatggccatgcggaaggccgtcgcgctcctgccggagcacgcactcgtgggcctcgtcaccttcggcacgcaggtgcacctgcacgagctcggattctccgatctcagcaagatctacgtcttccgggggaccaaggagatctctaaggaccagattttggatcagcttggcctggcgggtgctgggcggccgggcttccccaagatgccacagcaaccgggcgggccacaggtgaatgggatgcatccgccgtccacggccggggtcaacaggttcctgctcccggtgtcagattgtgagattgctctcagcacgttgctggacgagttgcagcctgaccaatggccagtcgaggctgggaaccgtgcgatccgttgcactggtgttgcgctcagtgtagctgctgggttacttggtgcttgcatgcctggaacaggtgcaaggatcatcgcattgctaggtggtccgtgtactgagggacctggaatgattgtttcaaaagatttgtcagaaccagttagatcacataaggatcttgacaaggatgcagctcctcacttccagaaagcagttaaattttatgatggtcttgctaagcagttggtcagtcaaggtcacgtgttagatgtttttgcttctgctctcgatcaggttgggctagctgagatgaaggttgctattgagagaacaggtggccttgttgtcttgtctgaaagttttgggcattccgtattcaaggattctttcaaacgcatttttgagggaggtgaacagtctctaggactttctttcaatggcataattgaaataaactgttcaaaagatattaaagtccaaggtattattggaccatgcacatctttggagaagaaaggagccatgtgctctgacacagttgtcggtcaaggaaatacatcagcatggaaaatgtgtggtctcgatagaaatacttctcttacagtattttttgatgtctcaccgagtgaacgatcgagccagccaggaaaccaaaatccccatttgtatatacaatttgtgacaagttaccaacacccagaaggtcaaatgaggataagagttactacgatatgcaggaaatgggtagatggttccactaataccgaggaattagttgaaggttttgaccaggaaactgcagctgttgtgttggcaagatacatctctttgaaaatggagatggaggaagagttcgatgcaacccggtggcttgatagatctctcatacgtctttgttcaagatttggggattaccggaaggatgatccctcttcatttagcctgcattcaaatttctcattgttccctcagtttatgtttaatcttcggcgttcacaatttgttcaggttttcaataacagtccagatgagacagcttatttcaggatgttactcaatcgtgagagtatcactaactcggttgccatgatccagccttccttgatatcattttcttttgattcacctccatctccggtatttctagatgtggcatcaatagcagcagatcgtatactgctacttgatgcgtactttagtgttgtcatttttcacggaatgacaattgctcagtggagaaacatgggttatcagaaccaacctgagcatgagcaatttgcacaactattacaagcaccacatgaggaggcacaaatgataataaagggtcgatttccagttccaagactagttgtctgcgaccaacatggctcgcaggcaaggtttttgttggctaagctgaatccatcggccacatataactcagctcatgatgttgctcctggttctgacatcattttcaccgatgatgttagcttccaggtcttctgtgagcacctacaaaggctggctgttcagtcttgaggacctacctgtatgcaaaggttgtacaccctatttgatagttgctcataatgcactgggttcttaggttggagttgtgagaatttcccttttctgtttctctttggccatagttttctgagatcagacaattttttcgggaaactgccctaaaggaatgtgtggttgcatgaattgagttgtgtgtcaagttcactttccagaaatcagaaatgtaagatcgcaaggcattataatgcagtgtgcatacaattgagcagcttagatcatgtttgaatgcactaggtctaatagttagctactaaaattagttgaaaacatttagctaatagttcagctattaattatttttagtaaattagctaatagttaagctatctatttgttagctagctaattccactagtattttttagcccacctaagtattagctctagtgcattcaaatactcccttaagcaattgtctctcaagcacatcagtttgtaaatgtgacattttggacgattgacatgctcttcaacattagattttactgctatcttata

SEQ ID NO: 38966 - DNA, 1174 bp, Zea Mays
aaaccacggaggcaaagtgtgcacagcattatctccacctcaccttttgctttccgttattatatatggacaatccgggcggaccaataaccctatgattcgacagtggagcacacccgagctatatatacatctggatatgcacacacagtgttctgatgcagtgttcaagggaccggaaggattagagggggcagaaggagcgagatgggttccaggaaagcacacggggttttggtacttgttcttctgcttattgttttgcctgcgctctcgatcggtatgcaccgcaggcagattgatttccctgttcaatctgttgttatctttattttctacacatttcttgttttttttcgtcaaattgtacgagcaggtatatatgtaaagagagaaaaaaactcaggaacttgtcaaaatatactcaacatgtgctattggaagtatgtagtagatttttgtcaggcatgcaaaagtgacggatttgattcattagtattctgaaatttgattttgcaggaggaagggagttggcggatgaaaaggatcacaaggagcattccactgcctcttctgaaaagggagcggcgacggctgcaggggtggcgacaaatgattatgggcgctacgatccggctccggcgttttccaagcctcgcttcaagtttatacccaactgactcactgtgctgcttggcttctttgtgccacacgaaggtgaccacgtccgcgttcacgagcttgacgatcaacggctcaacgccacctcggaagaaaaaagagcagcgccagcacgaaactgcgcgcccatggacttggggagcactgcatagtataactcgatcggcgcgatggcgccgaacgcgcccgagagccccatgatcctttcaattcaccaaagccaccttgagaacgtactggggcgccagccacagcgcagacatgcagtgtgtcaggacatcagctaggaaaatacaagacaaggacagtgaggggctgagtcaagaagcagacggcgttcggaggctaggccggcgtgatagaaggcccaatcagtatgtgtctggagctgagtgggtccagtaagaaatagcagtgggctgtggccatgggccgtattgtaatagagacataaatactggtgttgttgacagagaaggggagaagaaattta

SEQ ID NO: 38967 - DNA, 840 bp, Zea Mays
atgattcgacagtggagcacacccgagctatatatacatctggatatgcacacacagtgttctgatgcagtgttcaagggaccggaaggattagagggggcagaaggagcgagatgggttccaggaaagcacacggggttttggaggaagggagttggcggatgaaaaggatcacaaggagcattccactgcctcttctgaaaagggagcggcgacggctgcaggggtggcgacaaatgattatgggcgctacgatccggctccggcgttttccaagcctcgcttcaagtttatacccaactgactcactgtgctgcttggcttctttgtgccacacgaaggtctctaaaaagtatggttttgtcgatgtttaagaagggttttctcagtctacctgatgagaaggttgatgacttatgtgaattgaggagtgatgttgcatctgcatgctagctatatggatggtgaggtctaagaaagattttatcaacttgcgtgggaggttctagctagccgcaggttaagtttgtttaaaaaacatattaatagtatgtatattatgtacatagatgacatatgagaattgagacgtgatccttcatatatgcttactatatatatgcacatgtggcatgtagaaatagccgtgtactgcagagaatgtgtgtaacttgtgtagtatctggtgttgctgcccctacgtacaccctactgaacgtagtcggcttcggttcttcagttctggcgttggatctttgatccggatgccataaagttggttctttcttaacaacaacaagtctacttattttcaatatttatgaaccgtattgatcacaa

SEQ ID NO: 38968 - DNA, 934 bp, Zea Mays
atgattcgacagtggagcacacccgagctatatatacatctggatatgcacacacagtgttctgatgcagtgttcaagggaccggaaggattagagggggcagaaggagcgagatgggttccaggaaagcacacggggttttggtacttgttcttctgcttattgttttgcctgcgctctcgatcggaggaagggagttggcggatgaaaaggatcacaaggggtggcgacaaatgattatgggcgctacgatccggctccggcgttttccaagcctcgcttcaagtttatacccaactgactcactgtgctgcttggcttctttgtgccacacgaaggttagacttattaataatacatgtgctgagttagttagatggtccgaatagcatttcttatttcttatgttctaagttcgactccgccgaagcacaggtctctaaaaagtatggttttgtcgatgtttaagaagggttttctcagtctacctgatgagaaggttgatgacttatgtgaattgaggagtgatgttgcatctgcatgctagctatatggatggtgaggtctaagaaagattttatcaacttgcgtgggaggttctagctagccgcaggttaagtttgtttaaaaaacatattaatagtatgtatattatgtacatagatgacatatgagaattgagacgtgatccttcatatatgcttactatatatatgcacatgtggcatgtagaaatagccgtgtactgcagagaatgtgtgtaacttgtgtagtatctggtgttgctgcccctacgtacaccctactgaacgtagtcggcttcggttcttcagttctggcgttggatctttgatccggatgccataaagttggttctttcttaacaacaacaagtctacttattttcaatatttatgaaccgtattgatcacaa

SEQ ID NO: 38969 - DNA, 1264 bp, Zea Mays
atgattcgacagtggagcacacccgagctatatatacatctggatatgcacacacagtgttctgatgcagtgttcaagggaccggaaggattagagggggcagaaggagcgagatgggttccaggaaagcacacggggttttggtacttgttcttctgcttattgttttgcctgcgctctcgatcggtatgcaccgcaggcagattgatttccctgttcaatctgttgttatctttattttctacacatttcttgttttttttcgtcaaattgtacgagcaggtatatatgtaaagagagaaaaaaactcaggaacttgtcaaaatatactcaacatgtgctattggaagtatgtagtagatttttgtcaggcatgcaaaagtgacggatttgattcattagtattctgaaatttgattttgcaggaggaagggagttggcggatgaaaaggatcacaaggtatgcgtactagactggacagtagcaaagttctgtcacggaatttcctgagagcttgtaatgatctacgaatccatattttgaagtctgggaacgatcttccaaaactcaaaggagctagatcttcttcgaaaagagaacaatcatcgtcatgttcatttcgttgtttaattcaggagcattccactgcctcttctgaaaagggagcggcgacggctgcaggggtggcgacaaatgattatgggcgctacgatccggctccggcgttttccaagcctcgcttcaagtttatacccaactgactcactgtgctgcttggcttctttgtgccacacgaagaagggttttctcagtctacctgatgagaaggttgatgacttatgtgaattgaggagtgatgttgcatctgcatgctagctatatggatggtgaggtctaagaaagattttatcaacttgcgtgggaggttctagctagccgcaggttaagtttgtttaaaaaacatattaatagtatgtatattatgtacatagatgacatatgagaattgagacgtgatccttcatatatgcttactatatatatgcacatgtggcatgtagaaatagccgtgtactgcagagaatgtgtgtaacttgtgtagtatctggtgttgctgcccctacgtacaccctactgaacgtagtcggcttcggttcttcagttctggcgttggatctttgatccggatgccataaagttggttctttcttaacaacaacaagtctacttattttcaatatttatgaaccgtattgatcacaa

SEQ ID NO: 38970 - DNA, 883 bp, Zea Mays
atgattcgacagtggagcacacccgagctatatatacatctggatatgcacacacagtgttctgatgcagtgttcaagggaccggaaggattagagggggcagaaggagcgagatgggttccaggaaagcacacggggttttggtacttgttcttctgcttattgttttgcctgcgctctcgatcggaggaagggagttggcggatgaaaaggatcacaaggagcattccactgcctcttctgaaaagggagcggcgacggctgcaggggtggcgacaaatgattatgggcgctacgatccggctccggcgttttccaagcctcgcttcaagtttatacccaactgactcactgtgctgcttggcttctttgtgccacacgaaggtctctaaaaagtatggttttgtcgatgtttaagaagggttttctcagtctacctgatgagaaggttgatgacttatgtgaattgaggagtgatgttgcatctgcatgctagctatatggatggtgaggtctaagaaagattttatcaacttgcgtgggaggttctagctagccgcaggttaagtttgtttaaaaaacatattaatagtatgtatattatgtacatagatgacatatgagaattgagacgtgatccttcatatatgcttactatatatatgcacatgtggcatgtagaaatagccgtgtactgcagagaatgtgtgtaacttgtgtagtatctggtgttgctgcccctacgtacaccctactgaacgtagtcggcttcggttcttcagttctggcgttggatctttgatccggatgccataaagttggttctttcttaacaacaacaagtctacttattttcaatatttatgaaccgtattgatcacaa

SEQ ID NO: 38971 - DNA, 2088 bp, Zea Mays
ctaaagcacccactaattccgcaccacaacgcgcactctccgacaccaccgccgtcctcgcgacggcacagacggacgcactcgcgcgcgcgcatacatttacgcagcgaggagctcgaggacgacccccacagcaagcagcgatggcgcacgacggctttctcgggggattccacgagctttcctggcctcttgttcatgctgcagccgccggcgccgcgccgttcgatcccctgctggtacatgtgccgcacgcgcttatgggcgccggtgcggggtggcaacacgaggctgcggtgggcgcgatcgtgccgtcgcagtcgcagtcgcaatcgccaccgccaccgccatcgtcgctcgcggcggccgccgtaggaggagcagatgccgttgaggccgccatgatggagcagctcgcgagcaggctcggcgtcagcgtcccgtcgccgccgtcatcgcggtacgtgtcgtgccacagtacgccggtggcgccgtgcgtgctcgccggggacgcggagcgcgccgaaagactgtcgtgcttcccggcctccggtaggaagctctcgcgcgtggccagcagccagtcgcttctccgcgaacaggctccggcgcccgcgcccgcgccctcgcctggcgctgctgctaaacagcacgcgggcgatggggcgtgcgatggcccctgccgcaagcggaaggcgtcgggcacgagcagcaagcagtccaaggccaaggaagcggtcaccacggctccacccgagtcccgggagactgcagagacgagggccaagaaatgcaagctctccacggacgaggagcggaagccggcggccggagagggatggcgtggcagtggcaagggtaaggagctggtggcggcggatgcggagccacccaaggactacatccacgtccgcgcgcgccggggccaagccaccgacagccacagcctcgccgagcgggtgaggagggagaagatcggcgagcgcatgaagctactgcaggacctcgtgccgggctgcagcaaggtgaccgggaaggccgtgatgctggacgagatcataaactacgtgcagtcgctgcaacggcaagtagaggccaacaagatgtgcgccgccgcgacgtcctccatctccatggcacagcagccactgccactgccagcagcctaccacgcgctcgagggctcgagcccggcgttctgctacaccaccacgcccccagctcccggcaccgccgcgcggctgggcgttgctgcgtcggacgccaaagccttcgaaatggctcctccttcgtcggcggccaccgtgaaccacgccggcaccgcggagcggcggccactcgaaggacctgctgatgagaacgcgagtccccaggtacgtacgtacgtacagcaagcttatttgccaagttcgtccatctcgatcgtatcgctagctgtgcgatcgatccactccaaaactgtggacgcgtgacgcgtcaagggcgaagaggtgagaaacctgccgtgaatttcagatgggggggaggagcttgtgggaagagggcgatgatgatctgcagagcctagtcctgatgggattccgggggcgacacgtgatcattggcggcccgatctgattggcggacggacggacggacggacagttcagtttcaccgatcgccacatgacgacggcaggggttaggctccaatcattggacattctccatgattgtacatagcaacaggactgtcacacgctaatcgcctcacacttgagtttccagctcagcagtagcagaggccaagaaaacacacacacacacacaaaaaaaaggcgaaaagaagacgctttgtttgttgcattgcgtttgggcccccgcacgaatttgcagtttgatctaatgtaatgtaatgtaatgatgcttatactctcataaacatcaagttgacgaaactttatatacatgtgaggcaacagctgctggacgatgctttatgggagtttcatgcatgttggtactaccttacatcgttttgttaatgcctgcatcatggccctttaagctaagctaatgcgtgagctggtgcctgtcaaccactctagg

SEQ ID NO: 38972 - DNA, 3509 bp, Zea Mays
aacaagagggagagagagagagggaacagaagcaccgcgcggccggagacgccaaaaatacatcttcccggtccaggcaagaaatcagaattctccgctgaacaatccgtcgcatttgcgccccctttacggcgaatccgacatggggagggcgggatttctcttcctccccctcctgctcctcctcgccttcgccggccccggccccgcctccgcggcgacggccatgaccccggacgcgggcgtcatcttggacctcgccaagtcgctgaccaacccgccgccgtcctggaccggcaccgacgtctgcggcggcgtctccttcagcggcgtcacctgcaacggcgccgcccgcgtcaccggcatcaacctcgccaagctgcatttatccggcaccctttcctcgtccctcgccaatctcaccgcgctccaatcgctgcagctccaaggcaacgcgctggagggcgacctgccctccctggcccagatgggctccctcgagaccctcgttctcgacggcaacgccttctccaccctgccgccggacttcctcgagggtctcccctcgctgctcaagctcagtatggacgacctccctctcgagccatggagcatccccgacgctatcgcggggtgcgcgatgcttcagaccttctcggcctccaatgcctctgtctctggccccttcccggcggttcttgccaacctgacgtcgctacagacgctgcggctgtcgtacaataaccttaccggggtcctgccggtggggttagaggcgttgggctcgctggagacgctgcagctcaacagccagaggtcgaacggcatgctgtcagggccaattgacgttgtggcgaagttgccgagcttgaagacactgtggcttcagtccaactcgttcaccggcccgatcccggagtttgatcccaacacgcagctggagactttcaatgtcagagacaacagcctcaccggaccggtgccaccctctcttgtagggatcacaagccttcaggatgtggcgctgtccaataactttcttcaagggccaaaaccaaaattcgcagctaagactgtggatattgattctgggaacgggttctgtcacgaagaccctgggccatgcgatccactggtgaccactctgcttggggtggcttcagggtttggatacccattgcagctcaagaagtgggcaggcaacaacccatgcgatccatggcctggtctttcctgcatcaaaatggatgtaactcaaatcaaattgcctcgccggaacttgtcagggcttatttcaccggcttttgcgaacttgactagacttcagcggctggatctgtctaacaatcgacttactggggtaataccagatgctttgacgacactgaaaagtctcaattatcttgatgtctcaaataatcgccttactggacaagtgcctgagttcaagcagcatataaagctgatgactgcaggcaactcgtttggggaatcaggtggtgatagtggagggggtggctccaatgttcggtcctcatcttcaaatcctacaggttcacataactcaaagtcaaatgcgggaatgatcgttggaattcttctagttgtcattcttcttgtcatttgtgttgggcttttcctacatcatcgaaggaacaagaatgtggacaagttcagtcctatctcaacaaagagcccttctggtgaatctgaggtgatgaagattcaggtagttgggacaaatggccatagcaacataagtggttctgtaggctcaactgagctttacagtcattcaagtgctgacaacacaagcattgctgacctcttcgagtcccatgggatgcaattaccgatgagtgtgctactaaaggccacaaacaactttgatgaggactacatcttaggtacagggggctttggggtggtttttaaggggactctcaatgacaagctggttgctgtgaagaggtgcgacagtggcactatgggaactaaagggctgcaagaattcatggctgagattgacgttcttaggaagggaggaacactgcgccagcacttgtgtgatcttcagcagagtggttatactcctcttacatggacacagaggatgacaatagctttggatgttgcccgggggatagaatatttgcatggtttggcgcaggagactttcattcatagggatctgaagccttccaacatattgcttgatcaagatttaagagccaaggtttcggactttggattggtcaagcttgcgaaagatacagataagtccatgatgacaagagtagcagggacatttggataccttgcgcctgaatatgccactacaggaaaggtcactacaaaagtagatgtgtatgcatacggtgtgatactgatggagatgattacgggaaggaaagtacttgatgactcattacccgatggcgaaacgcatctcgtaacgagcttccgaaaaaacatgctcgacaaagagaagttcaggaagtttttggaccccaccctggagctcagcgctgaatcttggaacagcctgctggaggtggccgatcttgctcgccattgcacggcgcgggaaccgtaccagcggccagacatgggtcactgcgtgaacaggctttccagcctagtggaccagtggaagccaaccaacattgttgatgatgacgatgaggagggtgggacaagcgagatgggtcttcaccagcacctagaaatatggagatgcgatgatttcactatatcggattcggattcattcagcgcacacaacacatcaaggaagtaccattgacaattagcgaggcttttttttgtcatacatacatataaatgaggaaccatggtgtggcacatcaagaggctccccagtccccacacgtctggatcacgaacagctttgaaggtcaatgtgccagccagtcaggttgtagttagcgcattgaaaacaaggttacttgataatcagcatcttcattcattgaatgtctgctaaccaggctcaaacttgagagggaagtcatgataccagaaaacttgtgctgtatctagcttagcctgtttatacaatttggtcactttggacactgagaaacattttgttcttgaatggtgaagagggaaaagagatgaaagaaaccatagcttcgccgaaggcgagttctggtggttagttttttaggatgtagagggttgccttttgtgtacaaccaaccatgatttcattattatttatctagtatctgtatttgctctgtacaaccaaccgtcaggattgttttcttcaaatacctgaacgtgcgaaacgatgctaccaaaagttcaagttttgcgttagcatgcaatttttttttttcatactggacgtcttgtactggcaagaaccaataaacaaatgtctaagctttagctttgtacagcctgcaaagcaaaagataagatgaatcagagaaatgtccttaggataccaaagaatatttaatgtaacctaacatatc

SEQ ID NO: 38973 - DNA, 2059 bp, Zea Mays
gttctgctctctgactgagcctgagctccccttatccagagaggctagaacaaacctgaatttcatccccaccgtcgcctcgctcgacctccacctctctttcctcccggcagcaatggaggcggcacccaggtgaggcgagcaagcagccagccctggctccccgatggcgtgcctggcgccgcagttcaagtgggcgccgtcggccgccgcccacatgccttcctcgtcctcgtcctcgtcctactccaggtgctccgcgctccgcgtccactgcgccgtcacctccgccgctgtcgtcgaggaccgcaccaacggcagcgcggcgcagctgaggctcgcttacgcggctccggcgattcaggatcttttgaagcttgaggcgatccaagctgagcttatagagtacaatggcggtcagccaaccttctcgcagtgggcaacagcagctggagttgatgagaaaactttgcgcaagcgcttgaattatggtatttattgcaagaacagaatggtaacatctaatgtgagacttgtaatctctattgccagagagtttgaaggccctggaatggacttttatgatcttattcaggaaggaatgcagggccttataaggggagctgaaaaatttgattcatcaaaaggttttaggttctctacgtattctcactggtggatcaaacaagcaatgcgtaaatctgtctcagagcaatcccaaatatttcgcttgcctgctcacatggttgaagcaagctaccgtgtaaaggagtgtacaaaacgacttcgccgtaagcttagaagacgacccaccaatgaagaaattgcagtggacactggtattccaattaaacgagttgaggcagcagtaaacctcccaaaatatagtgtgtcccttgatagcaaaattggttccaccgacatgacatatcaggaggtcacagctgatcccagtgctgagacagctgaagagatgctcaacagaatgtccatgaagaaggacgtacacatggcactagatactctcaccactcgcgagaagcaagttgttgttctgaggtttgggctcgaggatggtcggataagaaccctgcaggagatcggtaacatcatgggtgtgagcagggagagaatccggcagatcgagtctggcgcgttccggaaactaaggagcaagaagaaggtgaaggctttgaaggattatctggtgccagtaggcaattggtgaaccgtttgtttgcagaatttgttttccttttggttcctctttttttttttgaggattctgtacttgtaccattttacgtgggtcctcatgtaaaacacgctatcagaatacttgcatcacaagaggaaagagtagtttagttccgtgggaaatgaagtaaaattcacaatttcttagctgctggttatctcttagaaatgaaatatgtttggacaaaactgtgtaatgcatgaaaactttagaggcgcttcgccatcttaagatgggatctaccctaagcctaaaagaactcatctagttttgtaccacctactaaaacaattctaaaaaaatatataatttatttttcttggctaagttatgtgtttagctactaaccaacaaaagaacaaacttagttcatacataaagaaataaaaaaaagataaatttttgttagggagtaaattgaactagctcaaataggtggaaatgtaaaataaacttaaaaaaatactccatccgttctaatttacaatttgtttgactttttatgctaagttggaccgactcgtcttatttaaaaaatttcataattattgtttagcatataatatactttaagtatgactttgtttttttgttttttattaaaaaaatgaataaaatgagctgatccaacttgatataaaaaatcaaacaaattataatttaggatgaaggaagtactaaaggggtacatggatatcattcataggtaaggcaagagaagtaatttagacgttttagaaatgaaggctgccggtcgttgggctccgtattggggcccaacacgagcgtctaggctagggc

SEQ ID NO: 38974 - DNA, 2616 bp, Zea Mays
tgagcctgagctccccttatccagagaggctagaacaaacctgaatttcatccccaccgtcgcctcgctcgacctccacctctctttcctcccggcagcaatggaggcggcacccaggtgaggcgagcaagcagccagccctggctccccgatggcgtgcctggcgccgcagttcaagtgggcgccgtcggccgccgcccacatgccttcctcgtcctcgtcctcgtcctactccaggtgctccgcgctccgcgtccactgcgccgtcacctccgccgctgtcgtcgaggaccgcaccaacggcagcgcggcgcagctgaggctcgcttacgcggctccggcgattcagagaaactttgaggcaactctggcatcagaagcacttctaaatgaagaggcggtagtagcagcggcagccgcagaggctgttgctcttgccagagcagctgccgaagctgcccaagaagttgttcagatagtacaaagaaacaaccatcagccggtaattagaccaaaaaagtgtgtggacaactacttggcaaatgaaatccttcgcacagagatgcgatcgagcagtcctgacatgtatgctaataatcctttgatggagtatctggactcttatggtatcatggatgctgaagatgaattagatgcttatgcacagtatactgagaacatagctgtgaaatctgctcgtcaatctgagagaaaagctaggagaactagagcagcaataaaagctagcacaaccctccatgcttcacaaaaggttgcattatcctcaaagaagaagcggtccaagggttcctcgtctagtatgaatcctttaggttcgttgtggaagatgaccggtaggagacttcttacagccaaggaagaggttgaattctcagaaggtattcaggatcttttgaagcttgaggcgatccaagctgagcttatagagtacaatggcggtcagccaaccttctcgcagtgggcaacagcagctggagttgatgagaaaactttgcgcaagcgcttgaattatggtatttattgcaagaacagaatggtaacatctaatgtgagacttgtaatctctattgccagagagtttgaaggccctggaatggacttttatgatcttattcaggttttttgttacaggaaggaatgcagggccttataaggggagctgaaaaatttgattcatcaaaaggttttaggttctctacgtattctcactggtggatcaaacaagcaatgcgtaaatctgtctcagagcaatcccaaatatttcgcttgcctgctcacatggttgaagcaagctaccgtgtaaaggagtgtacaaaacgacttcgccgtaagcttagaagacgacccaccaatgaagaaattgcagtggacactggtattccaattaaacgagttgaggcagcagtaaacctcccaaaatatagtgtgtcccttgatagcaaaattggttccaccgacatgacatatcaggaggtcacagctgatcccagtgctgagacagctgaagagatgctcaacagaatgtccatgaagaaggacgtacacatggcactagatactctcaccactcgcgagaagcaagttgttgttctgaggtttgggctcgaggatggtcggataagaaccctgcaggagatcggtaacatcatgggtgtgagcagggagagaatccggcagatcgagtctggcgcgttccggaaactaaggagcaagaagaaggtgaaggctttgaaggattatctggtgccagtaggcaattggtgaaccgtttgtttgcagaatttgttttccttttggttcctctttttttttttgaggattctgtacttgtaccattttacgtgggtcctcatgtaaaacacgctatcagaatacttgcatcacaagaggaaagagtagtttagttccgtgggaaatgaagtaaaattcacaatttcttagctgctggttatctcttagaaatgaaatatgtttggacaaaactgtgtaatgcatgaaaactttagaggcgcttcgccatcttaagatgggatctaccctaagcctaaaagaactcatctagttttgtaccacctactaaaacaattctaaaaaaatatataatttatttttcttggctaagttatgtgtttagctactaaccaacaaaagaacaaacttagttcatacataaagaaataaaaaaaagataaatttttgttagggagtaaattgaactagctcaaataggtggaaatgtaaaataaacttaaaaaaatactccatccgttctaatttacaatttgtttgactttttatgctaagttggaccgactcgtcttatttaaaaaatttcataattattgtttagcatataatatactttaagtatgactttgtttttttgttttttattaaaaaaatgaataaaatgagctgatccaacttgatataaaaaatcaaacaaattataatttaggatgaaggaagtactaaaggggtacatggatatcattcataggtaaggcaagagaagtaatttagacgttttagaaatgaaggctgccggtcgttgggctccgtattggggcccaacacgagcgtctaggctagggc

SEQ ID NO: 38975 - DNA, 2590 bp, Zea Mays
cctgagctccccttatccagagaggctagaacaaacctgaatttcatccccaccgtcgcctcgctcgacctccacctctctttcctcccggcagcaatggaggcggcacccaggtgaggcgagcaagcagccagccctggctccccgatggcgtgcctggcgccgcagttcaagtgggcgccgtcggccgccgcccacatgccttcctcgtcctcgtcctcgtcctactccaggtgctccgcgctccgcgtccactgcgccgtcacctccgccgctgtcgtcgaggaccgcaccaacggcagcgcggcgcagctgaggctcgcttacgcggctccggcgattcagagaaactttgaggcaactctggcatcagaagcacttctaaatgaagaggcggtagtagcagcggcagccgcagaggctgttgctcttgccagagcagctgccgaagctgcccaagaagttgttcagatagtacaaagaaacaaccatcagccggtaattagaccaaaaaagtgtgtggacaactacttggcaaatgaaatccttcgcacagagatgcgatcgagcagtcctgacatgtatgctaataatcctttgatggagtatctggactcttatggtatcatggatgctgaagatgaattagatgcttatgcacagtatactgagaacatagctgtgaaatctgctcgtcaatctgagagaaaagctaggagaactagagcagcaataaaagctagcacaaccctccatgcttcacaaaaggttgcattatcctcaaagaagaagcggtccaagggttcctcgtctagtatgaatcctttaggttcgttgtggaagatgaccggtaggagacttcttacagccaaggaagaggttgaattctcagaaggatcttttgaagcttgaggcgatccaagctgagcttatagagtacaatggcggtcagccaaccttctcgcagtgggcaacagcagctggagttgatgagaaaactttgcgcaagcgcttgaattatggtatttattgcaagaacagaatggtaacatctaatgtgagacttgtaatctctattgccagagagtttgaaggccctggaatggacttttatgatcttattcaggaaggaatgcagggccttataaggggagctgaaaaatttgattcatcaaaaggttttaggttctctacgtattctcactggtggatcaaacaagcaatgcgtaaatctgtctcagagcaatcccaaatatttcgcttgcctgctcacatggttgaagcaagctaccgtgtaaaggagtgtacaaaacgacttcgccgtaagcttagaagacgacccaccaatgaagaaattgcagtggacactggtattccaattaaacgagttgaggcagcagtaaacctcccaaaatatagtgtgtcccttgatagcaaaattggttccaccgacatgacatatcaggaggtcacagctgatcccagtgctgagacagctgaagagatgctcaacagaatgtccatgaagaaggacgtacacatggcactagatactctcaccactcgcgagaagcaagttgttgttctgaggtttgggctcgaggatggtcggataagaaccctgcaggagatcggtaacatcatgggtgtgagcagggagagaatccggcagatcgagtctggcgcgttccggaaactaaggagcaagaagaaggtgaaggctttgaaggattatctggtgccagtaggcaattggtgaaccgtttgtttgcagaatttgttttccttttggttcctctttttttttttgaggattctgtacttgtaccattttacgtgggtcctcatgtaaaacacgctatcagaatacttgcatcacaagaggaaagagtagtttagttccgtgggaaatgaagtaaaattcacaatttcttagctgctggttatctcttagaaatgaaatatgtttggacaaaactgtgtaatgcatgaaaactttagaggcgcttcgccatcttaagatgggatctaccctaagcctaaaagaactcatctagttttgtaccacctactaaaacaattctaaaaaaatatataatttatttttcttggctaagttatgtgtttagctactaaccaacaaaagaacaaacttagttcatacataaagaaataaaaaaaagataaatttttgttagggagtaaattgaactagctcaaataggtggaaatgtaaaataaacttaaaaaaatactccatccgttctaatttacaatttgtttgactttttatgctaagttggaccgactcgtcttatttaaaaaatttcataattattgtttagcatataatatactttaagtatgactttgtttttttgttttttattaaaaaaatgaataaaatgagctgatccaacttgatataaaaaatcaaacaaattataatttaggatgaaggaagtactaaaggggtacatggatatcattcataggtaaggcaagagaagtaatttagacgttttagaaatgaaggctgccggtcgttgggctccgtattggggcccaacacgagcgtctaggctagggc

SEQ ID NO: 38976 - DNA, 2852 bp, Zea Mays
cttatccagagaggctagaacaaacctgaatttcatccccaccgtcgcctcgctcgacctccacctctctttcctcccggcagcaatggaggcggcacccaggtgaggcgagcaagcagccagccctggctccccgatggcgtgcctggcgccgcagttcaagtgggcgccgtcggccgccgcccacatgccttcctcgtcctcgtcctcgtcctactccaggtgctccgcgctccgcgtccactgcgccgtcacctccgccgctgtcgtcgaggaccgcaccaacggcagcgcggcgcagctgaggctcgcttacgcggctccggcgattcagagaaactttgaggcaactctggcatcagaagcacttctaaatgaagaggcggtagtagcagcggcagccgcagaggctgttgctcttgccagagcagctgccgaagctgcccaagaagttgttcagatagtacaaagaaacaaccatcagccggtaattagaccaaaaaagtgtgtggacaactacttggcaaatgaaatccttcgcacagagatgcgatcgagcagtcctgacatgtatgctaataatcctttgatggagtatctggactcttatggtatcatggatgctgaagatgaattagatgcttatgcacagtatactgagaacatagctgtgaaatctgctcgtcaatctgagagaaaagctaggagaactagagcagcaataaaagctagcacaaccctccatgcttcacaaaaggttgcattatcctcaaagaagaagcggtccaagggttcctcgtctagtatgaatcctttaggttcgttgtggaagatgaccggtaggagacttcttacagccaaggaagaggttgaattctcagaaggtattcaggatcttttgaagcttgaggcgatccaagctgagcttatagagtacaatggcggtcagccaaccttctcgcagtgggcaacagcagctggagttgatgagaaaactttgcgcaagcgcttgaattatggtatttattgcaagaacagaatggtaacatctaatgtgagacttgtaatctctattgccagagagtttgaaggccctggaatggacttttatgatcttattcaggaaggaatgcagggccttataaggggagctgaaaaatttgattcatcaaaaggttttaggttctctacgtattctcactggtggatcaaacaagcaatgcgtaaatctgtctcagagcaatcccaaatatttcgcttgcctgtatgcccaccacccaaatcctgttcttttcccgatatcaatgttttgatgcactattgcactcttttgtctccccaactgtagatcatggttggtcatgcataagtgacccatatctaggttagaaaatttgaaagaatagattattgatgctcaactaggatttatgtttccaacggatgaaatatttttctatattatatccatcagaaccagttatctcgaatactatatgttaaccaaactaattaattctggtaactaggctcacatggttgaagcaagctaccgtgtaaaggagtgtacaaaacgacttcgccgtaagcttagaagacgacccaccaatgaagaaattgcagtggacactggtattccaattaaacgagttgaggcagcagtaaacctcccaaaatatagtgtgtcccttgatagcaaaattggttccaccgacatgacatatcaggaggtcacagctgatcccagtgctgagacagctgaagagatgctcaacagaatgtccatgaagaaggacgtacacatggcactagatactctcaccactcgcgagaagcaagttgttgttctgaggtttgggctcgaggatggtcggataagaaccctgcaggagatcggtaacatcatgggtgtgagcagggagagaatccggcagatcgagtctggcgcgttccggaaactaaggagcaagaagaaggtgaaggctttgaaggattatctggtgccagtaggcaattggtgaaccgtttgtttgcagaatttgttttccttttggttcctctttttttttttgaggattctgtacttgtaccattttacgtgggtcctcatgtaaaacacgctatcagaatacttgcatcacaagaggaaagagtagtttagttccgtgggaaatgaagtaaaattcacaatttcttagctgctggttatctcttagaaatgaaatatgtttggacaaaactgtgtaatgcatgaaaactttagaggcgcttcgccatcttaagatgggatctaccctaagcctaaaagaactcatctagttttgtaccacctactaaaacaattctaaaaaaatatataatttatttttcttggctaagttatgtgtttagctactaaccaacaaaagaacaaacttagttcatacataaagaaataaaaaaaagataaatttttgttagggagtaaattgaactagctcaaataggtggaaatgtaaaataaacttaaaaaaatactccatccgttctaatttacaatttgtttgactttttatgctaagttggaccgactcgtcttatttaaaaaatttcataattattgtttagcatataatatactttaagtatgactttgtttttttgttttttattaaaaaaatgaataaaatgagctgatccaacttgatataaaaaatcaaacaaattataatttaggatgaaggaagtactaaaggggtacatggatatcattcataggtaaggcaagagaagtaatttagacgttttagaaatgaaggctgccggtcgttgggctccgtattggggcccaacacgagcgtctaggctagggc

SEQ ID NO: 38977 - DNA, 1285 bp, Zea Mays
ctcccgagctgcacacacgcgagcacgcgcccgcactgttcgctcgctccccatctccacacccgccgctctccacagtgctgctatcgagacgtctttctccgattgcggaggcgtttctttccttcttcgccggcggcggcatggactgggcagcggcgtccgggtctccgtcgtggggcgcggcggcgacggaccccggtccgaccatgctgtccttcgcaggcccgtcctcctccgccgccgacgccgaggtgcggctccaggatttcgccgcgggtcttgcccagagctcgcggccgactggggcggcgccgggagccgggaggaggtcccgcgcggccgtgggaggtgccggcgcggaggcgtgctccgtcgacggctgccgctctgatctcagccggtgccgcgagtaccaccggcggcataaggtctgtgaggcacactccaaggcgccggtggtggtcgtcggcggacaggagcggcgcttctgccagcaatgcagccggtttcacatgctgtccgagtttgacgaggaaaaaagaagttgccggaagcgtctggatggccataataggcgtcgaagaaagccacagcatgatctgacaaatctagggggtttctttccataccaccaagtgaatcagtttgagttctacccacaaacaattccaacagttggccagaattcggacgccgtgcacttggtgggccgtcagcagcctttctccatatcgttctcaagaacaccagacgagttccctttcccacagggtggcggtagcagtgtgctgcaccacctccatgcagcccgccctggccatcacgctgaaggcagcagccacactggaagcagcacacgcgacaacgctctctccggcacactgggccccgagtgtgctctctctcttctgtcatcgtcgctgcgtcgcccctcaactgctggcgtccccgccgttggccaaccccagactcaggttgtggtccgtcagagatgtatacaagtgacacgacgactagtgctggcatctgaaaggaagtggtagctgctgtgcagagtgtttagccgttaaattcaaatgcgcccgttcaatttttttcttcgttttccttgtatatatttgtttgtttttttttgggcaaaaatatgtgcatgttatgcacttctggaatcgtcgaatcaggctgcagtcttgaaagccttcatcagggatccaaaacgccagatggctccatttgataagggtccactttgacttgattaatcatgaagggccaatttggg

SEQ ID NO: 38978 - DNA, 1274 bp, Zea Mays
gtcgccttgccacaagagtaaggcaagggggaggggcgtcggcatcggcacgtgtggtggtagcgcgagtccggcgtcggtccttccttcctttcacggccgcagccgcgtgtccccccgtctctctctcaggcgggtggccgacgacgtcccctccctctcctctctcaggcggcggctcccctcctccctctcctctctctggcggctgtagggtggcggcttagggagggatacgatggagaagggtttcacatgctgtccgagtttgacgaggaaaaaagaagttgccggaagcgtctggatggccataataggcgtcgaagaaagccacagcatgatctgacaaatctagggggtttctttccataccaccaagtgaatcagtttgagttctacccacaaacaattccaacagttggccagaattcggacgccgtgcacttggtgggccgtcagcagcctttctccatatcgttctcaagaacaccagacgagttccctttcccacagggtggcggtagcagtgtgctgcaccacctccatgcagcccgccctggccatcacgctgaaggcagcagccacactggaagcagcacacgcgacaacgctctctccggcacactgggccccgagtgtgctctctctcttctgtcatcgtcgctgcgtcgcccctcaactgctggcgtccccgccgttggccaaccccaggttactgcctcttcgaccactgccgtgtcgcaggctgcaacggcagctgtggccactgctgcattcgcggccagtgctggccaccatgtgtttgttcctgatgctatgtttgaggatccatcacaggcactgccattctcttggcagtaggattgttttgttgtcctgtttttatgtgctcctgttgtgttctcgatcgatactctagtgtctgatggctgggaattcggggtacctgtgcacttgcagactcaggttgtggtccgtcagagatgtatacaagtgacacgacgactagtgctggcatctgaaaggaagtggtagctgctgtgcagagtgtttagccgttaaattcaaatgcgcccgttcaatttttttcttcgttttccttgtatatatttgtttgtttttttttgggcaaaaatatgtgcatgttatgcacttctggaatcgtcgaatcaggctgcagtcttgaaagccttcatcagggatccaaaacgccagatggctccatttgataagggtccactttgacttgattaatcatgaagggccaatttggg

SEQ ID NO: 38979 - DNA, 1082 bp, Zea Mays
gtaagttaggtcaagcagtgggctggttggaccgggaaaaaacaggccggtggaccgtttcacatgctgtccgagtttgacgaggaaaaaagaagttgccggaagcgtctggatggccataataggcgtcgaagaaagccacagcatgatctgacaaatctagggggtttctttccataccaccaagtgaatcagtttgagttctacccacaaacaattccaacagttggccagaattcggacgccgtgcacttggtgggccgtcagcagcctttctccatatcgttctcaagaacaccagacgagttccctttcccacagggtggcggtagcagtgtgctgcaccacctccatgcagcccgccctggccatcacgctgaaggcagcagccacactggaagcagcacacgcgacaacgctctctccggcacactgggccccgagtgtgctctctctcttctgtcatcgtcgctgcgtcgcccctcaactgctggcgtccccgccgttggccaaccccaggttactgcctcttcgaccactgccgtgtcgcaggctgcaacggcagctgtggccactgctgcattcgcggccagtgctggccaccatgtgtttgttcctgatgctatgtttgaggatccatcacaggcactgccattctcttggcagtaggattgttttgttgtcctgtttttatgtgctcctgttgtgttctcgatcgatactctagtgtctgatggctgggaattcggggtacctgtgcacttgcagactcaggttgtggtccgtcagagatgtatacaagtgacacgacgactagtgctggcatctgaaaggaagtggtagctgctgtgcagagtgtttagccgttaaattcaaatgcgcccgttcaatttttttcttcgttttccttgtatatatttgtttgtttttttttgggcaaaaatatgtgcatgttatgcacttctggaatcgtcgaatcaggctgcagtcttgaaagccttcatcagggatccaaaacgccagatggctccatttgataagggtccactttgacttgattaatcatgaagggccaatttggg

SEQ ID NO: 38980 - DNA, 1818 bp, Zea Mays
tcggtcgacaaatccgaccagcgccggctgataaatcggtaatcggtgctggcgggctccactgtatcaccgacttcatattataaatttaagaaagtttataaattttgatagcctttgatgccaactttcttataaatactataaattattctaagatttttcgttgaaaccgaattcaaactaaaattcattgaaatttaaaaaaaacgtactaaataggccgactgtttacctggcccaaacgacccattttaaaccctacgtcaacacacccaagtcaaaccctccttcccccctccccatcctcgaccgtccgccacaccgaccgtccgccgcctgaacgcgcggtgttgctccagaacaccggctagccgctcgagtggaccgacaagctggctctggttcatgcgactcgctaagatcgggatgtcggaccagctcgatctgatttgggaacacggggacaacatatatcccggattcaaatgcaagtattgcaagaaacaatggaagggaggtggaactacacgtttcaagcaacaccttgcatcgcgcgcgcggtgggagggggggatgtgcaaggttgtcgcaacgttctgccggacattgctgattactttcgtctggagattggcaaggtccatgataaaaagaaagcaagagtagtggaagaagcacgaaagttgcaaatagcgggtccgcattgtggtttcgatgatcatgatgatgatgttgagttacaagctgcaataagagatgaggagattaggaggcgtgctcacgtgactggcggcacgtatgagacaagtggtggcttgtcccaaggtggtgttcgtgccgcgtttgggagaacatcttctaggaaggagaaaccacgtatggtgcagacaaggattgatacgagaccattctctaaggcggtgtaaagaaaatggacctcgacccatttgactaagtcattttggtgtttgatgatcaacataatatgtggactaatatgtttgctagtgtttgtgtttgtagttcataggatgcaaagaggattggactgaagctccgaggattcaacacctcaaaaaaagacctaaacgatgcgtagaagtccaagactcaagaccaaaagaagcctaagacaatagtgaagaaacccaagaagtgggtagtcagccagcgctccggtagtgcaccggacatatccaatgtacaccggacagtctgcgcatagagctccacaaaaatggactctcgggagttgtagcatcggactgtccggctatccaaacggtcgacaatgaatcttccaacggtcgactgctacagccctcaacggtcgataaacgtggcaagggtactggactgtccggggcgcccgatgacagaaacaaccaattttctgtccaacgactataatggaggggaggctatttatacccctctaaccaaccatttgaaggtgtgggagcccaagcaacataccaacatatgttatagacattttcaagtgctcatacacccaagtgcttaatagaatcactcggtgattagcgtaggtgctttgtgaaagtgcttaggttagctagacgacttatgtgcttgctctaggtaattcctagttagttgagtgagtttagaaaacccacaaaaacccctaagcccttgtgtgaactgttgtaattgtatagagtggggcgagagtcgcgagaccatgagaatcgagtttgtgtcacggtcgccaccatgtatcagggggaacgaggcccacgacgtttcagtcggaagctcgatagaggatatggtgaggagtgtagaggagcc

SEQ ID NO: 38981 - DNA, 1201 bp, Zea Mays
atggggcaccaggcgcagcacgccacggacgacaccgaggagctgctggcagcgcaccgcgagctgtggtgccatgccctgggctacgtcaagtccatggcgctcaaatgcgccttggacctgcgcatccccgacatcatccaacgctgcggcggaagcgccacactaggccagctgctcgccgccagcgaggtcccggcgtccaacctcggctaccttcgacgggtcatgcgcacgctgacagccatgcgcatcttcgcggtcgtcggccacggtcacggtcccgacaaggccgacgaccctgcagacgacgacgcgaccgccgtctcctaccggctcaccccggcgtcccgcctgctcgccaccagcgacgacgacgacgacgcctcgaagaataatctgagcatacatcccaacatctccagccacgtccgtcccaaaaacgtctccctcctgttcagcatggccgagtggatgaaggacgagcaggcgctctccgtgtcgctctacgagacggtgaaccgcaagtgcatgtgggcgtgcgtagaagacgacgccgcgaccagagcctgcttctacgaaagcatggacgccgacacccgcctcgtcatgcaggccgtgatccgcaagtgccctgccgtcttcgacgacggcctcacgtcgctcgtcgacgtcggcggcgcccggggcacggccgctgcggccgtcgtcgccgccttcccgcacatccagaagtgcaccgtcatggacctcccccacatcgtcgccgaggctcccgccggcaccggactgtgcttccacggcggcgacatgtttgagcacatcccgtcggctgatgcagttatgctcaagtggattggattctgcacgactgggatgacgacaagtgcgtcaagataatggagcgctgcaaggaagcgatcagtggcaaggaagggagaggagggaaggtgattataatagaaacagtgcttggatctcggccagacgacgacgcgacatgcaaggagacgtatgtcttggatctccaaatactgagcttcgtgaacggagccgagcgagaggagcacgagtggaggaggatcttcctagctgctggattccgtgactacaagatcacgcacactcgtggtatcccgtcgatcatcgaggtcttcccatgatggatgagagtcgatcgatggatcgagagagagggcag

SEQ ID NO: 38982 - DNA, 1673 bp, Zea Mays
ggcggccagctgcaactctcggactgcagcattccatttccaggaaggccacggcggcgagaactcactcgggcgctgccggcgatgtacggcacttccgaccccacagctgcggagcgcacggctttccggcgtgcggagaaacagtacaagctttacaagacactcaacgtcaagggcaggtccaggtccaggtccaggtcaggatgcaggccgtctagcggagagggaggtggcgctgatctgtcagccgtagttgacttccatgctctgcttgccgccgacggggagcttcctgacgggattggtcggcgtgagtgccccggattcgaccgccccgtgttctgcttcttggaccggccagggttctatttcattcctggtgctttatcaactgaggaacaatgctgttggatcagggaaagcttgaaaacatttccacagccacctaataggactaatttgactgcaatatatggttcaatttcggacttactcatcgctgccgaaaatcaacagatattggttgaagcagaaaatcctgatatccaagaaagaaataaacagaataattgtggagggaaaacagaatccaaatacttcaaatttgtggactcagagagccagaaaggggaagagcataggtcaaacgcagcaactacccttgtgaggaagctccggtggagcacccttggtctgcaatttgattggtcaaagcggaactacgatgtatcacttccacacaacaagattccaggtgctctagctagtcttgccaaaaagatggctattccagctatgccttctggagaagaattcaagccagaagctgctatagtgaactattacggtccaaattgatgtaggtgacatgcttggtggccatgttgatgacatggaagcagattggacaaaacctattgtaagcataagtttgggctgcaaatgcatctttcttttgggaggaaagactcgagatgaagttccaacagcaatgttcctgcgcagcggtgatatagttttgatggctggggaagcacgagaacgcttccatggtgtaccgcggattttcacagagagtgaccagcaagaaatccctgcactgatttcacaactatctagtggagatgacgtctttatcttggagtatatcaagaattctaggataaatatcaacatcagacaggtctactgaagatcagattggttgcagacttacacatgaaagtttggtgggaaatgctgctttcttgctgcagtcaggtccattatcgtagtatagctcgattaggggcatctggaatagcaactgaggacctgaagggttggaaggtgctacaatagtagtgaaactaaccatatgtgtaacttccattggatgagggtttttttttcaaaaaaaaattttgataacctggcaatgatctcaaaacttatgcaggattgctgatctcgggattagccatccctagctgatttcatgttgttatcttttctgacgtgaatatgctcctcaattttgctgctactgtaaagatatttgtagacctgtttgaacttattgcttgatgatctcattttgaggagtcttaggctttccaagaattaatttcctagtatttgcatgatctctcatcttgaggaattttaggctttctcagaatttattcgcc

SEQ ID NO: 38983 - DNA, 1534 bp, Zea Mays
ggcggccagctgcaactctcggactgcagcattccatttccaggaaggccacggcggcgagaactcactcgggcgctgccggcgatgtacggcacttccgaccccacagctgcggagcgcacggctttccggcgtgcggagaaacagtacaagctttacaagacactcaacgtcaagggcaggtccaggtccaggtccaggtcaggatgcaggccgtctagcggagagggaggtggcgctgatctgtcagccgtagttgacttccatgctctgcttgccgccgacggggagcttcctgacgggattggtcggcgtgagtgccccggattcgaccgccccgtgttctgcttcttggaccggccagggttctatttcattcctggtgctttatcaactgaggaacaatgctgttggatcagggaaagcttgaaaacatttccacagccacctaataggactaatttgactgcaatatatggttcaatttcggacttactcatcgctgccgaaaatcaacagatattggttgaagcagaaaatcctgatatccaagaaagaaataaacagaataattgtggagggaaaacagaatccaaatacttcaaatttgtggactcagagagccagaaaggggaagagcataggtcaaacgcagcaactacccttgtgaggaagctccggtggagcacccttggtctgcaatttgattggtcaaagattgatgtaggtgacatgcttggtggccatgttgatgacatggaagcagattggacaaaacctattgtaagcataagtttgggctgcaaatgcatctttcttttgggaggaaagactcgagatgaagttccaacagcaatgttcctgcgcagcggtgatatagttttgatggctggggaagcacgagaacgcttccatggtgtaccgcggattttcacagagagtgaccagcaagaaatccctgcactgatttcacaactatctagtggagatgacgtctttatcttggagtatatcaagaattctaggataaatatcaacatcagacaggtctactgaagatcagattggttgcagacttacacatgaaagtttggtgggaaatgctgctttcttgctgcagtcaggtccattatcgtagtatagctcgattaggggcatctggaatagcaactgaggacctgaagggttggaaggtgctacaatagtagtgaaactaaccatatgtgtaacttccattggatgagggtttttttttcaaaaaaaaattttgataacctggcaatgatctcaaaacttatgcaggattgctgatctcgggattagccatccctagctgatttcatgttgttatcttttctgacgtgaatatgctcctcaattttgctgctactgtaaagatatttgtagacctgtttgaacttattgcttgatgatctcattttgaggagtcttaggctttccaagaattaatttcctagtatttgcatgatctctcatcttgaggaattttaggctttctcagaatttattcgcc

SEQ ID NO: 38984 - DNA, 1735 bp, Zea Mays
agctgcaactctcggactgcagcattccatttccaggaaggccacggcggcgagaactcactcgggcgctgccggcgatgtacggcacttccgaccccacagctgcggagcgcacggctttccggcgtgcggagaaacagtacaagctttacaagacactcaacgtcaagggcaggtccaggtccaggtccaggtcaggatgcaggccgtctagcggagagggaggtggcgctgatctgtcagccgtagttgacttccatgctctgcttgccgccgacggggagcttcctgacgggattggtcggcgtgagtgccccggattcgaccgccccgtgttctgcttcttggaccggccagggttctatttcattcctggtgctttatcaactgaggaacaatgctgttggatcagggaaagcttgaaaacatttccacagccacctaataggactaatttgactgcaatatatggttcaatttcggacttactcatcgctgccgaaaatcaacagatattggttgaagcagaaaatcctgatatccaagaaagaaataaacagaataattgtggagggaaaacagaatccaaatacttcaaatttgtggactcagagagccagaaaggggaagagcataggtcaaacgcagcaactacccttgtgaggaagctccggtggagcacccttggtctgcaatttgattggtcaaagagaacgatccggtcgaagagcccgaggaattcgcaggagaagcccctgagcagcagtcgtttggtggagcggaactacgatgtatcacttccacacaacaagattccaggtgctctagctagtcttgccaaaaagatggctattccagctatgccttctggagaagaattcaagccagaagctgctatagtgaactattacggtccaaattgatgtaggtgacatgcttggtggccatgttgatgacatggaagcagattggacaaaacctattgtaagcataagtttgggctgcaaatgcatctttcttttgggaggaaagactcgagatgaagttccaacagcaatgttcctgcgcagcggtgatatagttttgatggctggggaagcacgagaacgcttccatggtgtaccgcggattttcacagagagtgaccagcaagaaatccctgcactgatttcacaactatctagtggagatgacgtctttatcttggagtatatcaagaattctaggataaatatcaacatcagacaggtctactgaagatcagattggttgcagacttacacatgaaagtttggtgggaaatgctgctttcttgctgcagtcaggtccattatcgtagtatagctcgattaggggcatctggaatagcaactgaggacctgaagggttggaaggtgctacaatagtagtgaaactaaccatatgtgtaacttccattggatgagggtttttttttcaaaaaaaaattttgataacctggcaatgatctcaaaacttatgcaggattgctgatctcgggattagccatccctagctgatttcatgttgttatcttttctgacgtgaatatgctcctcaattttgctgctactgtaaagatatttgtagacctgtttgaacttattgcttgatgatctcattttgaggagtcttaggctttccaagaattaatttcctagtatttgcatgatctctcatcttgaggaattttaggctttctcagaatttattcgcc

SEQ ID NO: 38985 - DNA, 1796 bp, Zea Mays
gctgcaactctcggactgcagcattccatttccaggaaggccacggcggcgagaactcactcgggcgctgccggcgatgtacggcacttccgaccccacagctgcggagcgcacggctttccggcgtgcggagaaacagtacaagctttacaagacactcaacgtcaagggcaggtccaggtccaggtccaggtcaggatgcaggccgtctagcggagagggaggtggcgctgatctgtcagccgtagttgacttccatgctctgcttgccgccgacggggagcttcctgacgggattggtcggcgtgagtgccccggattcgaccgccccgtgttctgcttcttggaccggccagggttctatttcattcctggtgctttatcaactgaggaacaatgctgttggatcagggaaagcttgaaaacatttccacagccacctaataggactaatttgactgcaatatatggttcaatttcggacttactcatcgctgccgaaaatcaacagatattggttgaagcagaaaatcctgatatccaagaaagaaataaacagaataattgtggagggaaaacagaatccaaatacttcaaatttgtggactcagagagccagaaaggggaagagcataggtcaaacgcagcaactacccttgtgaggaagctccggtggagcacccttggtctgcaatttgattggtcaaagatatagaattccattggagtgttaagtgtatgtcaaggcacatcctataggaccatacaacagatgaggcttgaggctctccatatatagttgtcattccactagtggagatcattctctcaaatcccaagcggaactacgatgtatcacttccacacaacaagattccaggtgctctagctagtcttgccaaaaagatggctattccagctatgccttctggagaagaattcaagccagaagctgctatagtgaactattacggtccaaattgatgtaggtgacatgcttggtggccatgttgatgacatggaagcagattggacaaaacctattgtaagcataagtttgggctgcaaatgcatctttcttttgggaggaaagactcgagatgaagttccaacagcaatgttcctgcgcagcggtgatatagttttgatggctggggaagcacgagaacgcttccatggtgtaccgcggattttcacagagagtgaccagcaagaaatccctgcactgatttcacaactatctagtggagatgacgtctttatcttggagtatatcaagaattctaggataaatatcaacatcagacaggtctactgaagatcagattggttgcagacttacacatgaaagtttggtgggaaatgctgctttcttgctgcagtcaggtccattatcgtagtatagctcgattaggggcatctggaatagcaactgaggacctgaagggttggaaggtgctacaatagtagtgaaactaaccatatgtgtaacttccattggatgagggtttttttttcaaaaaaaaattttgataacctggcaatgatctcaaaacttatgcaggattgctgatctcgggattagccatccctagctgatttcatgttgttatcttttctgacgtgaatatgctcctcaattttgctgctactgtaaagatatttgtagacctgtttgaacttattgcttgatgatctcattttgaggagtcttaggctttccaagaattaatttcctagtatttgcatgatctctcatcttgaggaattttaggctttctcagaatttattcgcc

SEQ ID NO: 38986 - DNA, 1516 bp, Zea Mays
gctgcaactctcggactgcagcattccatttccaggaaggccacggcggcgagaactcactcgggcgctgccggcgatgtacggcacttccgaccccacagctgcggagcgcacggctttccggcgtgcggagaaacagtacaagctttacaagacactcaacgtcaagggcaggtccaggtccaggtccaggtcaggatgcaggccgtctagcggagagggaggtggcgctgatctgtcagccgtagttgacttccatgctctgcttgccgccgacggggagcttcctgacgggattggtcggcgtgagtgccccggattcgaccgccccgtgttctgcttcttggaccggccagggttctatttcattcctggtgctttatcaactgaggaacaatgctgttggatcagggaaagcttgaaaacatttccacagccacctaataggactaatttgactgcaatatatggttcaatttcggacttactcatcgctgccgaaaatcaacagatattggttgaagcagaaaatcctgatatccaagaaagaaataaacagaataattgtggagggaaaacagaatccaaatacttcaaatttgtggactcagagagccagaaaggggaagagcataggtcaaacgcagcaactacccttgtgaggaagctccggtggagcacccttggtctgcaatttgattggtcaaaggtgacatgcttggtggccatgttgatgacatggaagcagattggacaaaacctattgtaagcataagtttgggctgcaaatgcatctttcttttgggaggaaagactcgagatgaagttccaacagcaatgttcctgcgcagcggtgatatagttttgatggctggggaagcacgagaacgcttccatggtgtaccgcggattttcacagagagtgaccagcaagaaatccctgcactgatttcacaactatctagtggagatgacgtctttatcttggagtatatcaagaattctaggataaatatcaacatcagacaggtctactgaagatcagattggttgcagacttacacatgaaagtttggtgggaaatgctgctttcttgctgcagtcaggtccattatcgtagtatagctcgattaggggcatctggaatagcaactgaggacctgaagggttggaaggtgctacaatagtagtgaaactaaccatatgtgtaacttccattggatgagggtttttttttcaaaaaaaaattttgataacctggcaatgatctcaaaacttatgcaggattgctgatctcgggattagccatccctagctgatttcatgttgttatcttttctgacgtgaatatgctcctcaattttgctgctactgtaaagatatttgtagacctgtttgaacttattgcttgatgatctcattttgaggagtcttaggctttccaagaattaatttcctagtatttgcatgatctctcatcttgaggaattttaggctttctcagaatttattcgcc

SEQ ID NO: 38987 - DNA, 1855 bp, Zea Mays
gctgcaactctcggactgcagcattccatttccaggaaggccacggcggcgagaactcactcgggcgctgccggcgatgtacggcacttccgaccccacagctgcggagcgcacggctttccggcgtgcggagaaacagtacaagctttacaagacactcaacgtcaagggcaggtccaggtccaggtccaggtcaggatgcaggccgtctagcggagagggaggtggcgctgatctgtcagccgtagttgacttccatgctctgcttgccgccgacggggagcttcctgacgggattggtcggcgtgagtgccccggattcgaccgccccgtgttctgcttcttggaccggccagggttctatttcattcctggtgctttatcaactgaggaacaatgctgttggatcagggaaagcttgaaaacatttccacagccacctaataggactaatttgactgcaatatatggttcaatttcggacttactcatcgctgccgaaaatcaacagatattggttgaagcagaaaatcctgatatccaagaaagaaataaacagaataattgtggagggaaaacagaatccaaatacttcaaatttgtggactcagagagccagaaaggggaagagcataggtcaaacgcagcaactacccttgtgaggaagctccggtggagcacccttggtctgcaatttgattggtcaaagatatagaattccattggagtgttaagtgtatgtcaaggcacatcctataggaccatacaacagatgaggcttgaggctctccatatatagttgtcattccactagtggagatcattctctcaaatcccaagagaacgatccggtcgaagagcccgaggaattcgcaggagaagcccctgagcagcagtcgtttggtggagcggaactacgatgtatcacttccacacaacaagattccaggtgctctagctagtcttgccaaaaagatggctattccagctatgccttctggagaagaattcaagccagaagctgctatagtgaactattacggtccaagtgacatgcttggtggccatgttgatgacatggaagcagattggacaaaacctattgtaagcataagtttgggctgcaaatgcatctttcttttgggaggaaagactcgagatgaagttccaacagcaatgttcctgcgcagcggtgatatagttttgatggctggggaagcacgagaacgcttccatggtgtaccgcggattttcacagagagtgaccagcaagaaatccctgcactgatttcacaactatctagtggagatgacgtctttatcttggagtatatcaagaattctaggataaatatcaacatcagacaggtctactgaagatcagattggttgcagacttacacatgaaagtttggtgggaaatgctgctttcttgctgcagtcaggtccattatcgtagtatagctcgattaggggcatctggaatagcaactgaggacctgaagggttggaaggtgctacaatagtagtgaaactaaccatatgtgtaacttccattggatgagggtttttttttcaaaaaaaaattttgataacctggcaatgatctcaaaacttatgcaggattgctgatctcgggattagccatccctagctgatttcatgttgttatcttttctgacgtgaatatgctcctcaattttgctgctactgtaaagatatttgtagacctgtttgaacttattgcttgatgatctcattttgaggagtcttaggctttccaagaattaatttcctagtatttgcatgatctctcatcttgaggaattttaggctttctcagaatttattcgcc

SEQ ID NO: 38988 - DNA, 1786 bp, Zea Mays
gctgcaactctcggactgcagcattccatttccaggaaggccacggcggcgagaactcactcgggcgctgccggcgatgtacggcacttccgaccccacagctgcggagcgcacggctttccggcgtgcggagaaacagtacaagctttacaagacactcaacgtcaagggcaggtccaggtccaggtccaggtcaggatgcaggccgtctagcggagagggaggtggcgctgatctgtcagccgtagttgacttccatgctctgcttgccgccgacggggagcttcctgacgggattggtcggcgtgagtgccccggattcgaccgccccgtgttctgcttcttggaccggccagggttctatttcattcctggtgctttatcaactgaggaacaatgctgttggatcagggaaagcttgaaaacatttccacagccacctaataggactaatttgactgcaatatatggttcaatttcggacttactcatcgctgccgaaaatcaacagatattggttgaagcagaaaatcctgatatccaagaaagaaataaacagaataattgtggagggaaaacagaatccaaatacttcaaatttgtggactcagagagccagaaaggggaagagcataggtcaaacgcagcaactacccttgtgaggaagctccggtggagcacccttggtctgcaatttgattggtcaaagatatagaattccattggagtgttaagtgtatgtcaaggcacatcctataggaccatacaacagatgaggcttgaggctctccatatatagttgtcattccactagtggagatcattctctcaaatcccaagcggaactacgatgtatcacttccacacaacaagattccaggtgctctagctagtcttgccaaaaagatggctattccagctatgccttctggagaagaattcaagccagaagctgctatagtgaactattacggtccaagtgacatgcttggtggccatgttgatgacatggaagcagattggacaaaacctattgtaagcataagtttgggctgcaaatgcatctttcttttgggaggaaagactcgagatgaagttccaacagcaatgttcctgcgcagcggtgatatagttttgatggctggggaagcacgagaacgcttccatggtgtaccgcggattttcacagagagtgaccagcaagaaatccctgcactgatttcacaactatctagtggagatgacgtctttatcttggagtatatcaagaattctaggataaatatcaacatcagacaggtctactgaagatcagattggttgcagacttacacatgaaagtttggtgggaaatgctgctttcttgctgcagtcaggtccattatcgtagtatagctcgattaggggcatctggaatagcaactgaggacctgaagggttggaaggtgctacaatagtagtgaaactaaccatatgtgtaacttccattggatgagggtttttttttcaaaaaaaaattttgataacctggcaatgatctcaaaacttatgcaggattgctgatctcgggattagccatccctagctgatttcatgttgttatcttttctgacgtgaatatgctcctcaattttgctgctactgtaaagatatttgtagacctgtttgaacttattgcttgatgatctcattttgaggagtcttaggctttccaagaattaatttcctagtatttgcatgatctctcatcttgaggaattttaggctttctcagaatttattcgcc

SEQ ID NO: 38989 - DNA, 388 bp, Zea Mays
gcaatatcaaaaatccatcttatatctgagaaggcttcatgaatcgttcttttgttagaaattctcttcggaattgccttaaatattctaggtgcaagattagcaattttctacccataaatccatttatcaatctagaacaaagtgtgtgcccaattcccaacttccgagagcagcaccaccgggaagaaagctcgtgctttttgcctgacacttggataggtaaactacacaatgtccaactaagctctttgagaccggagatgcaagtctgtccatctagagaggtctacaaacacttcctcatgcaacgaagcagtgccctttcgacttcatttcaccatataagggccgtaacagacaaaggccggttctagacatgaggaag

SEQ ID NO: 38990 - DNA, 1928 bp, Zea Mays
catgtgggccctctctgcgaacctcgccagcactaatcgagccgccactggcagcatctgaagagaataaaagacagccccacacgcagctcgaatcccggcacgtgagcggcggaggcagggacggccatggcatgcagtgggtgcagctgcgaggcgcgggagctggtggcggagctctgtcggcacttctacgcgcagggatgggtcacgggcaccggcggcagcatcaccgtcaaggtcaacgaccccaccgtgccgctcgccgatcgcctcatcgttatgtcaccctccggtgtgcagaaggagaggatggtagcagaggacatgtatgtgatggctgcagatgggaaagtgctttctgcgcctgtagcaaagccatggccaaacaagcctcctaagtgcacggactgtgctcctctgttcatgaaggcgtatctgatgagaggagctggggctgtcattcacagccatggaatagagacttgcatcgcaacaatgctcatccctggtgcaaaggagttcagagtgacccacatggaaatgatcaaaggaatcaaaggtcatggctaccatgatgaattggtcattcctattattgagaataccccttatgagtatgagctcactgactccctaagtgaggcgattgcagcatacccaaaggcaactgctgtgcttgtaaggaaccacggaatatatgtatggggggagtcttggatcaatgccaagacacaggctgaatgctaccattatcttttagatgcttgcatcaagctctatcagctaggtattgattggacaacccctgaacatggttcaataaacaatccaaggagaccgcacagcattttgagccctgaaatttgtaatggatgtcatgctgctgattcatcaaagtgtgttgtactagacattgaggggacaaccactccaatatcatttgtgactgatgtcatgttcccttatgctcgtgataatgtacgaaaacatctgacttctacatttgactttgaggaaactaaagaagacatcaaactattgcgcatccaaattgaagatgatctacaaaatggagttgctggggctgttccagttccacctgatgagggtggcaaagaagaggttatcaattcattggttgccaatgttgaatcaatgattaaagcagaccggaagatcacatcattgaaacaacttcagggtcatatttggaggattggatttcaaaagaaagagctacagggagttgtctttgaggatgttcctgtggcgctaaagaactggcatgctagtggcataaaggtctacatatactcaagtggaagtagagaagcacaaaggcttctatttggcaatacaacatacggtgacctgcgaaagttcctgtgtgggtattttgataccacaactggaaacaaaagagaaacaaggagttattttgagatctctcagtcactgggcgtggacagtccatctcaaatcttattcatcaccgatgtcttccaagaagccattgctgctaaaaacgctggttttgaggtgataatctccattcgcccgggaaatgccccacttcctgacaatcatggtttccgcactatcaaatcattcagcgagatctgaggaatctggtgatctggacatgtctagatatatgtaattcgcgagtgctttagcccgcgtgccagttcatgcagtagaagcattatagcaccgcagcatggcaaaacgatgtgacgtaacaataagttacatggcgaaataaaaactttggttcgttgtgtatttgtggctcatctacaattggatagtttgcatttccttgttcagcatctgtaggttgtggctgtgatcatttttaggtctcgtttgacattgcttaacttcacgtaaatcagttttttagcttcagctgttttggtgaa

SEQ ID NO: 38991 - DNA, 1977 bp, Zea Mays
catgtgggccctctctgcgaacctcgccagcactaatcgagccgccactggcagcatctgaagagaataaaagacagccccacacgcagctcgaatcccggcacgtgagcggcggaggcagggacggccatggcatgcagtgggtgcagctgcgaggcggcggtgggggcgatggcgtcggaggcgtacctggagggggcgccggtgcgggaggcgcgggagctggtggcggagctctgtcggcacttctacgcgcagggatgggtcacgggcaccggcggcagcatcaccgtcaaggtcaacgaccccaccgtgccgctcgccgatcgcctcatcgttatgtcaccctccggtgtgcagaaggagaggatggtagcagaggacatgtatgtgatggctgcagatgggaaagtgctttctgcgcctgtagcaaagccatggccaaacaagcctcctaagtgcacggactgtgctcctctgttcatgaaggcgtatctgatgagaggagctggggctgtcattcacagccatggaatagagacttgcatcgcaacaatgctcatccctggtgcaaaggagttcagagtgacccacatggaaatgatcaaaggaatcaaaggtcatggctaccatgatgaattggtcattcctattattgagaataccccttatgagtatgagctcactgactccctaagtgaggcgattgcagcatacccaaaggcaactgctgtgcttgtaaggaaccacggaatatatgtatggggggagtcttggatcaatgccaagacacaggctgaatgctaccattatcttttagatgcttgcatcaagctctatcagctaggtattgattggacaacccctgaacatggttcaataaacaatccaaggagaccgcacagcattttgagccctgaaatttgtaatggatgtcatgctgctgattcatcaaagtgtgttgtactagacattgaggggacaaccactccaatatcatttgtgactgatgtcatgttcccttatgctcgtgataatgtacgaaaacatctgacttctacatttgactttgaggaaactaaagaagacatcaaactattgcgcatccaaattgaagatgatctacaaaatggagttgctggggctgttccagttccacctgatgagggtggcaaagaagaggttatcaattcattggttgccaatgttgaatcaatgattaaagcagaccggaagatcacatcattgaaacaacttcagggtcatatttggaggattggatttcaaaagaaagagctacagggagttgtctttgaggatgttcctgtggcgctaaagaactggcatgctagtggcataaaggtctacatatactcaagtggaagtagagaagcacaaaggcttctatttggcaatacaacatacggtgacctgcgaaagttcctgtgtgggtattttgataccacaactggaaacaaaagagaaacaaggagttattttgagatctctcagtcactgggcgtggacagtccatctcaaatcttattcatcaccgatgtcttccaagaagccattgctgctaaaaacgctggtgataatctccattcgcccgggaaatgccccacttcctgacaatcatggtttccgcactatcaaatcattcagcgagatctgaggaatctggtgatctggacatgtctagatatatgtaattcgcgagtgctttagcccgcgtgccagttcatgcagtagaagcattatagcaccgcagcatggcaaaacgatgtgacgtaacaataagttacatggcgaaataaaaactttggttcgttgtgtatttgtggctcatctacaattggatagtttgcatttccttgttcagcatctgtaggttgtggctgtgatcatttttaggtctcgtttgacattgcttaacttcacgtaaatcagttttttagcttcagctgttttggtgaa

SEQ ID NO: 38992 - DNA, 1039 bp, Zea Mays
gattcatcaaaggtgttgtactagacattgaggggacaaccactccaatatcatttgtgactgatgtcatgttcccttatgctcgtgataatgtacgaaaacatctgacttctacatttgactttgaggaaactaaagaagacatcaaactattgcgcatccaaattgaagatgatctacaaaatggagttgctggggctgttccagttccacctgatgagggtggcaaagaagaggttatcaattcattggttgccaatgttgaatcaatgattaaagcagaccggaagatcacatcattgaaacaacttcagggtcatatttggaggattggatttcaaaagaaagagctacagggagttgtctttgaggatgttcctgtggcgctaaagaactggcatgctagtggcataaaggtctacatatactcaagtggaagtagagaagcacaaaggcttctatttggcaatacaacatacggtgacctgcgaaagttcctgtgtgggtattttgataccacaactggaaacaaaagagaaacaaggagttattttgagatctctcagtcactgggcgtggacagtccatctcaaatcttattcatcaccgatgtcttccaagaagccattgctgctaaaaacgctggttttgaggtgataatctccattcgcccgggaaatgccccacttcctgacaatcatggtttccgcactatcaaatcattcagcgagatctgaggaatctggtgatctggacatgtctagatatatgtaattcgcgagtgctttagcccgcgtgccagttcatgcagtagaagcattatagcaccgcagcatggcaaaacgatgtgacgtaacaataagttacatggcgaaataaaaactttggttcgttgtgtatttgtggctcatctacaattggatagtttgcatttccttgttcagcatctgtaggttgtggctgtgatcatttttaggtctcgtttgacattgcttaacttcacgtaaatcagttttttagcttcagctgttttggtgaa

SEQ ID NO: 38993 - DNA, 87 bp, Zea Mays
attaccattgaacatgagccatgctttgtgcaaggagggaaccatatccagtacatgtgttgcatgtcactaatccacgtgatccac

SEQ ID NO: 38994 - DNA, 932 bp, Zea Mays
ccttcccatcccttgtccttctaactctgtccctacaatatatgcaacacctcctaccaatatagacccatcacagaactatatttgtagcaaaagatgtagaacaactaacactgtatcagatccatcttggtgagcaagtaaacctctgccatgacatgcaccacactgggtcatctgatttgctttataaaacccgtgagcctgaccagcattgcatgtagggcatggtttctctccacgaccctcacaatctgtcaaaaaaaataaacaactaatagctaccatgttaaaattaaaatgactataaatacatagcaacaaaattatgaagaaggtactttctaaggtgcaatgtgaaaaaaggacacttagctaggtgtccctaacttaaaaacaatgttaagattagtagcatgcatatgttcttatggcctgttggtggcaaaagatagcacaatatcagcaagtaggggtatggccgaatgcacccatgttagttattatggcatcatatgtgaggacatgaactgaaaggtatttccatcataggaacattcaaaatgcaggaacagatgctgtaagcctacataagcaaattaagttgctatatgaatgcatttaatatattaaaggaaaagtaaggttagtgccactgtgttaattacgttgtctgatattttccattgccctttttgtaatattgagactcatgctgttcattaatgccactgctgatcaaatttagtggcaaaacttgttacagtcttgccatgggtgtgatagtggtgtacacataataacaggttttacacattagtgtcatgaatccaaatattacgaaagcaatgtcaaatatcataaccataattaaaatagtggtacaaatctaattctctcattaaaggaaaatcagagggcactgaaagaaa

SEQ ID NO: 38995 - DNA, 2841 bp, Zea Mays
ttccttttccgctcggcacctccccatctacggatctaccgagcatcgaaggcacacgatccaaatatgccttcggcgccgctcgtcgcggctgccatcggcacgcgcgtcagcctccgcccgaacctctcactcctcgccgatcgttgcgctacaccttgcgccctagcccgcgtgcacgccgccatgctcgtctccggccgcctcgccgaggacgctttcgccgcgtcccggctcctggacgcctacgtcgcgctctctccggatcccgctgccgccgcactcgcgctcctctcctccctgccctgcgcgcccaactccttcatgttcaacaccacgctccgcgtgctcgcttcctccccggacccggccaccgcattccccttcttctcccgcatccacggcactggagccctcgtgcccggccggcacacattccccttcctcctgaaggccgccgcgcgccttccgctctctctccccgtcaccgaacagctccacgcgctcgccgtccggcacggggtccacctcgatgcctacgtcgccaatggcctcgttcgggcctactccgtggcgggccttctccgccccgcgcgcagggtgttcgacgaggtgcccgagcggaacgcggccgtgtacactaccatggtctccgcgtacgcgcagaacgggaggcacgaggacgcgatggcggcgttcgtccagatggtccgcgtgggcttcgagccctgcggcgccgcgctggcctcggtgctgtctgcgtgcgcgcggtcgccgtcgggcgggctcgagatgggccgtcacgtgcacgacctaatggtggcacggggcgtggcagttggtcccatcctcggcacggcgctggtcgacatgtacgtcaaaaatggcgccattgaggaggccttggcagtgttcgacgggctgccagagcggcgcgtgccggctgcatggaaccctctcatctcggggctggcgaacctcgggcacggtgagcgtgcactcgactttttcagacggatgcagcgggagggtgtgccaccgaatgcgaccacactcgtcggggcactctcggcgtgctcccacccagggctgctggacgaggcccgccggctgttcaggtccatggagaaggacttcgggatcgttccaggaatccagcactacggatgcatggtggacctccttggccgtgctggcctcttatcggaagcggaggatatgatacgggagatgtcatgcaaggcggacaccgtgatatggggagcactcctgacggcctgcaagaaccacggtgtcattgagattgcggagcgggcagcggtggagatgctgaaactaaatcccagtaaccatggagtgtatgtggtactgtccaacttgtatgccgaggctggtaggtggcaggacgtggacaagctgaggaaggtgatgaagggagcgaggctctctaaaatccctggggcaagcgcagttaatggtgatgggtcactggagcaaccatagttatcgccaccacaaggaaatgtgctggtctagttccccgttgtgctcatgaaagtttatggcaatccccagaaaagatgatgcagataggagaatgatgggtggatcaaatgatcaatattagatatctgacaaatgcttagacaagtacagaacattgtaacacttctgagaatgtgcatatcaccatcattagcccaaattaagcatgataccagtacgtcatcactctactttgttgctaaaaaaaatcctcccagaaatcagacaaagggaggtactatacagttgaaccatcaactcagttctgttctccggcgaattcggtgttttggttactagcaaagcaggctgtatgacggcatgtcttcgatgcggatgacatcgtccagcataagctccctctccagctgggctcgtgtcgacttcagcacctcctggtagtggcaccacaagcatgagatcagtagaacatttgcactttgagttgaaacataggatgaaatgttcatattctcagaacgtacattgaagtccatgtaagatgcattcttgtccagccactgcttgtccatcacaacaaatgcgacacagtagagcagatcaaatgcccactcatcctctgagagcatttggataaaaatggctcgcacaaatgttcttggcttagctgttgttaacattaacatcaaagttcagaaaatcacattttgtagtcatacccaggtgacattggagagttcgggtcagtgcttactagactggagatctagcatctgcatgatcatgaatgtaatatttacaccagcaaccgcaaatgggtactcccatgtggctctgttaccgcactgtttatttagaagtctctgaaacgatgcctgcggaagtaaaaataagattgttactcaccagcaagactacggcactttcaaataatgaaacagccagtacatattgcttacggagaacgtcttggcaaagaacaaaagattctccagggatatgaatcctgcgcctctgtcacaaaagaatcaaaggtcacttgatttggtactagagctgcatgcacttccaaaggcactctgaggaattctggtttggattggtcattgtgtacctaaagtcagttgatgggtctcttccttgccagcccatgtccttccactgctcagatatcaaaccttcaagttcttgatcagggtatgttgcatgccaaagagctttcagggcttcctgtgtcattgttagtatatttgctgtatcagggttcagttgattgagatagcaaaataaacagagacataactaaccatgtggaaaaactactgccaagctgag

SEQ ID NO: 38996 - DNA, 2395 bp, Zea Mays
ttcatgcatatcctttcatatgtgcctttccgcttgatgcacacacacgagaggcctctccctatccatctcggtgatccacatgatgtttcatctgcacagggacagtcacattacatctcatatataatcagtgacatgaaacgtgtgtttctcgtaatatcaaatgcaaaaccagctgtacatattgtcactaacttgaaatcatctatatatatgtgtgctgtactaaaagtaaaaaccaaaaataaagtgagcttgagacaagatgaggaatatcagaacttgcaattttggcccacagtgctagctgccctagcatcccagagccaaaagttcctcaaggccagggatttcagagctatttgacactgcacacccctttataggctatcttaagtgctagtttagactcttaggctatctccaacaaattactcatctctatactcatattcaaacttcactctgcgaacactatagtgtagaaagtacaaaacagtgtttttaggtaaactttgggtagactgctgcagacggccttagtattgtactggaatggatctatcataataggatgatgaaggcagaacaagtatattttctgaatcctacccctgacatgaggttacatgacatgttctcaccaaccactgtttttcattggccaacaaatctgcccagtggatctaccagctcccagatttcctaccaaatcggatgcctccccaccggtgagagacgcgtgagcccagcaaagccatgtccagaaggcaaagcgactgctggcttgtcttgctgttgagccgatggttcagaattattttctcgaaatagtggattagtggttgcgtggcttggtcggtcatgtgtatctttgagttgaggcagaaaggcgccaaaatgagcagggaaaggaagaggacgggacggcaacggatgaatcttgcatttctggatttcctggagcacaattgaaaatgctaaaagtctaaaaaagaacggaaacaataccagtgttcgctacaatacaaattgttaaaaaaaggaggaaaaatacaagcaagactgacaccgaacggtacgagttttttttaatattctcatgcgatcaacgctgtctctcagtctgccaaacatggagaaatacgcaataccctacacttccatggagaaacacggatgaactaatggccgccaaaaacttcaaacaaatctcatttttttgcctccagaatatgcttcagcctctggaaaacggaaaaggagaaaggacaagaacaatgatgagtgcctctctaggtttatcccgtttctcctaggcggttaaaatggtgccaaaagcgacgcaagtacaggattgaggagagaggcacatgcggtgctgactttttttcgcatgcaaaatcgcatcgtcctgctaccatttaggtgacatcaatacgccgcaaaaatgacattgccccaaaagaacgccacaagagcgcagcagcaaaagacgtgaaaaagaaagaaagaaaagaaaaggacgacgaccggctcctgcaaggattagaacagctcctgaaactgaaaagagtgtgcaagaaaagaagtgatggactctgaggaacacaggaatatcattgacagctcgtcagcacggcgacaggcccacagcagaggagagaatattcgcccgcttcaagaacacaccaagacgataacaaacagcggtaaaagtaagtaaagattccatgaatgcaggaaagctgccagatgaattacgcgaacgggaggaggaggaggaggaggaactaactgcaggcatcgcgcattgcgaaggggggacgaatcgcaagggagaggggttagtcaggagagacgacgtactgaccggaagatccaggcagcgaggagccgccgccggcgccgatggcgcaccgcggcagcgacgtcctgacggccagacatccgtggtggtgctcggggtccctctcccccgcaggcgctggagctgccgccgctgccgctgccgcagcctccattctctcgcgctgctgcacgtaactcagcgccgcccacacctccgcgcgcagctgggcggacgcgttcttctcgcggcgcagagagagatgcgagcagcgcgcgagaataatgcggaggagaagcaggagaggaggggaaggtgatggacggaaccggggcggcgtcggtcgggcggtggcggtcgtcgcgtggttgggtggcgctgttccggggaggagcacgtcgcgttgcggcttgtcgccacgctccggtggcacaagggctccaatttaaatgcccacattatattttttaaaaatatatataagtttttttatcgggattccgtctctgacagcgactgtacgtctctccctagctttatctc

SEQ ID NO: 38997 - DNA, 2306 bp, Zea Mays
agacgacaaatattcgataaaaaaaaggaaatctgcgcgccgcgcgatcccggggccacgcccacgcgcaactccattactccgctcgcagccagatctgagtcctcactctgtctcttcctcagtcccggcatcagcgctcaaaccctaacacgccacgcgatcccgatgcgcaggggtctgggcagcgaggcatcgttgcgccggcggcgcgggccggcgcggctttgggtggcagtggcggcgctggtggtcggcaccgtgtgcctcttctcctcctcttcggtcggcctgttgggcgcctcttacagggtccagattcaaatggttggagagcatcttctgcaccacgcacctactggcctcccccaccaactgaatctgagagcaatggctacttgcgcgtccggtgcaatggtggcttgaaccaacaacgtagtgcaatatgtaatgctgttgttgctgcacggatcatgaatgctacactggtgctgccagaattagacacaaattcattctggcatgatgaaagtggctttgtaggtatttatgatgttccccacttcatcaagacactgaaatatgacgtccgaattgttatgagcattcctgaaatcactacaaatggaaagaccaagaagctcaaaggccagcagcttcggccaccaagagatgcaccggtatcttggtatgcaactgatgctttggagacgatgaagaagtatggagctatatatttaagtccattttcacaccgtttggcagaagatattgataatccagagctccagagattgagatgcagagtgaattaccatgcactacgattcaagccaaatatcatgaaaacaagcagtgagatagtgaacaagctccgctcagaaggccatttcatgtcaattcatcttcgatttgagttggatatgcttgcatttgcagggtgctttgacatattcaaacctcaagagcaaaaaattctgtggaagtacagggaagaacattttgcagaaaaggaacttatccccatgaaaatcaggctcaaaggaaagtgccctttaactccagaagaggtaggttttattctacgtgccatgggatttgacaatagaacacgcatttaccttgcctctggcgagctctttggagggaaacgtttcatgaagccattcaagaccatgtttccacgcttagagaaccacagcacagttggacctggaaagctggaagagaatacccaagggctagcaggatcagcagttgactacatggtttgcctcctgtctgacattttcatgcccacatatgatggcccaagcaactttgcaaacaacctcatgggccaccgtatgtactacggtttccggaccacaatcacgccgaacagaaaggctcttgccccgatactcatcgacaggatggaaggccgccacattggctttgagagaatcaggagggtgatgtccaacacccattttggtgccccccacaagcgcgtccatccagagtctttctacacgaactcatggcctgagtgcttctgccagacggatgccaagaaccatgcagaccggtgtccccctgataacataaatgacgttctggaaagccagttccagagcgaagaagaaatggaagaagcaagagcctctaatcagactgacccatccagccaaatagaagagctgacgatttaactgatcaactagggattactgctcggaagcattttgaacacttggaatggtcatcagagaaatccagatacaactatattcaaggaatgtattaattgatggctcaaactggagcggttgacatgctgaggtgtggtatctggtggtattcagggagagcattgaaccagattttgaataggtctggtcatatatggttttgaggagaaaacaatatgtatgtcaatagttttcctcattgaagagtgaagttgtgcgggttgtgtaggtggcagtgacaaaagtgagaaacctttgcgcaatatggtaccatccggtgtataaaggccccggttaggctggtgccagtgcaccctttgtctttcgtccctggcatgtcagctattgactccactcttgtccttactgttttagtgcacaactgcacaactcgcagcgggatatagcttcggcatatagtcacattaacttttctatttcagaattaagtaatttacgtgaatttattttaatgctcagaaaccacataacatgatatttttattaaagtaaaaattacaaagggtatgataattaaaataaaactatatgctaattaaaaaataacataaa

SEQ ID NO: 38998 - DNA, 2269 bp, Zea Mays
cccacgcgcaactccattactccgctcgcagccagatctgagtcctcactctgtctcttcctcagtcccggcatcagcgctcaaaccctaacacgccacgcgatcccgatgcgcaggggtctgggcagcgaggcatcgttgcgccggcggcgcgggccggcgcggctttgggtggcagtggcggcgctggtggtcggcaccgtgtgcctcttctcctcctcttcggtcggcctgttgggcgcctcttacagggtccaggatgttgatgtaaataagttgtggagaactgcagattcaaatggttggagagcatcttctgcaccacgcacctactggcctcccccaccaactgaatctgagagcaatggctacttgcgcgtccggtgcaatggtggcttgaaccaacaacgtagtgcaatatgtaatgctgttgttgctgcacggatcatgaatgctacactggtgctgccagaattagacacaaattcattctggcatgatgaaaggtatttatgatgttccccacttcatcaagacactgaaatatgacgtccgaattgttatgagcattcctgaaatcactacaaatggaaagaccaagaagctcaaaggccagcagcttcggccaccaagagatgcaccggtatcttggtatgcaactgatgctttggagacgatgaagaagtatggagctatatatttaagtccattttcacaccgtttggcagaagatattgataatccagagctccagagattgagatgcagagtgaattaccatgcactacgattcaagccaaatatcatgaaaacaagcagtgagatagtgaacaagctccgctcagaaggccatttcatgtcaattcatcttcgatttgagttggatatgcttgcatttgcagggtgctttgacatattcaaacctcaagagcaaaaaattctgtggaagtacagggaagaacattttgcagaaaaggaacttatccccatgaaaatcaggctcaaaggaaagtgccctttaactccagaagaggtaggttttattctacgtgccatgggatttgacaatagaacacgcatttaccttgcctctggcgagctctttggagggaaacgtttcatgaagccattcaagaccatgtttccacgcttagagaaccacagcacagttggacctggaaagctggaagagaatacccaagggctagcaggatcagcagttgactacatggtttgcctcctgtctgacattttcatgcccacatatgatggcccaagcaactttgcaaacaacctcatgggccaccgtatgtactacggtttccggaccacaatcacgccgaacagaaaggctcttgccccgatactcatcgacaggatggaaggccgccacattggctttgagagaatcaggagggtgatgtccaacacccattttggtgccccccacaagcgcgtccatccagagtctttctacacgaactcatggcctgagtgcttctgccagacggatgccaagaaccatgcagaccggtgtccccctgataacataaatgacgttctggaaagccagttccagagcgaagaagaaatggaagaagcaagagcctctaatcagactgacccatccagccaaatagaagagctgacgatttaactgatcaactagggattactgctcggaagcattttgaacacttggaatggtcatcagagaaatccagatacaactatattcaaggaatgtattaattgatggctcaaactggagcggttgacatgctgaggtgtggtatctggtggtattcagggagagcattgaaccagattttgaataggtctggtcatatatggttttgaggagaaaacaatatgtatgtcaatagttttcctcattgaagagtgaagttgtgcgggttgtgtaggtggcagtgacaaaagtgagaaacctttgcgcaatatggtaccatccggtgtataaaggccccggttaggctggtgccagtgcaccctttgtctttcgtccctggcatgtcagctattgactccactcttgtccttactgttttagtgcacaactgcacaactcgcagcgggatatagcttcggcatatagtcacattaacttttctatttcagaattaagtaatttacgtgaatttattttaatgctcagaaaccacataacatgatatttttattaaagtaaaaattacaaagggtatgataattaaaataaaactatatgctaattaaaaaataacataaa

SEQ ID NO: 38999 - DNA, 2025 bp, Zea Mays
gttgtcccgttcctgtttgctcgatgttgatgtaaataagttgtggagaactgcagattcaaatggttggagagcatcttctgcaccacgcacctactggcctcccccaccaactgaatctgagagcaatggctacttgcgcgtccggtgcaatggtggcttgaaccaacaacatatgtaatgctgttgttgctgcacggatcatgaatgctacactggtgctgccagaattagacacaaattcattctggcatgatgaaaggtatttatgatgttccccacttcatcaagacactgaaatatgacgtccgaattgttatgagcattcctgaaatcactacaaatggaaagaccaagaagctcaaaggccagcagcttcggccaccaagagatgcaccggtatcttggtatgcaactgatgctttggagacgatgaagaagtatggagctatatatttaagtccattttcacaccgtttggcagaagatattgataatccagagctccagagattgagatgcagagtgaattaccatgcactacgattcaagccaaatatcatgaaaacaagcagtgagatagtgaacaagctccgctcagaaggccatttcatgtcaattcatcttcgatttgagttggatatgcttgcatttgcagggtgctttgacatattcaaacctcaagagcaaaaaattctgtggaagtacagggaagaacattttgcagaaaaggaacttatccccatgaaaatcaggctcaaaggaaagtgccctttaactccagaagaggtaggttttattctacgtgccatgggatttgacaatagaacacgcatttaccttgcctctggcgagctctttggagggaaacgtttcatgaagccattcaagaccatgtttccacgcttagagaaccacagcacagttggacctggaaagctggaagagaatacccaagggctagcaggatcagcagttgactacatggtttgcctcctgtctgacattttcatgcccacatatgatggcccaagcaactttgcaaacaacctcatgggccaccgtatgtactacggtttccggaccacaatcacgccgaacagaaaggctcttgccccgatactcatcgacaggatggaaggccgccacattggctttgagagaatcaggagggtgatgtccaacacccattttggtgccccccacaagcgcgtccatccagagtctttctacacgaactcatggcctgagtgcttctgccagacggatgccaagaaccatgcagaccggtgtccccctgataacataaatgacgttctggaaagccagttccagagcgaagaagaaatggaagaagcaagagcctctaatcagactgacccatccagccaaatagaagagctgacgatttaactgatcaactagggattactgctcggaagcattttgaacacttggaatggtcatcagagaaatccagatacaactatattcaaggaatgtattaattgatggctcaaactggagcggttgacatgctgaggtgtggtatctggtggtattcagggagagcattgaaccagattttgaataggtctggtcatatatggttttgaggagaaaacaatatgtatgtcaatagttttcctcattgaagagtgaagttgtgcgggttgtgtaggtggcagtgacaaaagtgagaaacctttgcgcaatatggtaccatccggtgtataaaggccccggttaggctggtgccagtgcaccctttgtctttcgtccctggcatgtcagctattgactccactcttgtccttactgttttagtgcacaactgcacaactcgcagcgggatatagcttcggcatatagtcacattaacttttctatttcagaattaagtaatttacgtgaatttattttaatgctcagaaaccacataacatgatatttttattaaagtaaaaattacaaagggtatgataattaaaataaaactatatgctaattaaaaaataacataaa

SEQ ID NO: 39000 - DNA, 526 bp, Zea Mays
cgccatctatgtttcgatcagcagcctgcggggaagtcacaacgtttcttacggcaggacatgagacaactcaagactaccataccatccaagtgggagcggttgcgagtaccttttcatcacaacggagggtagaagtaggacgaaacagaaaaccctaggaagagaacgcctccgatcgtcgctacagttcgctgcgagatcttggacgccagcatgctccctcctaccacggcgagagatgtgcacaccgtgtgccccagtgacgctcccactgcgactccgattgcgttcttgtgtgttgccagctgcattggtgatagcagaagtaaagaaactttgtaaggtacaggttttttgcttgcgaatgtgcaggttcctatagtatcacagacctcaatgaaaaacgatacatcaaaggatttcagtaagtggagaagtatcctaccgcgattgtcgctatttggctccggtcgccccattcagctaagaaggttaagatgaaagcctgcaaccaggataaaga

SEQ ID NO: 39001 - DNA, 1116 bp, Zea Mays
gtcactcatgagcaatggcaaggacatatcagtgtgccaaattatttcaaatgcaaacatggcaattccagctacaatgagtaccagtctatcctaacccccatgcccatgccctgatgtgcaaaaatcactcaagttgcaaagtgtttaaagtcaaacttatgattggtgtttcaaatacttaatactgttttttaacatcaatcaatagtgtctcagtacattttcagttcaaataaaataattcaacatctccacacaagtgaccaggtttcagatagactgtcttaagttccagtgggaagaatttatttattatcacaataatattaggggaatgatcaaattaaggatcgaggatttttttccaggaaggatcttgaataaattgagttgtgcacgttaacacaagagtatcaccattctgtccatataatttgggggaagtataatcatctttttctcgccccggataacacagaacttgcataatgcttacatcagcaatatacaatatgagtgtcagcatgaagatatgaaaaacattcaacgctaaaagaacataagtacctgtagcagcactattagtgtgcttccttgatatcaagttgggcactattctgccaagtccagttgacaataccttgttggggagagggtgggcaaatatgtaagcagcatagagaatcaaaaaaaaattgtggcaacagcttagactataaaaacaaagaatttggcatagatgaaactaaatactagcacaagtaccaaaattaaatggaacatggcaataacgcccttaagatatggacaatgcaaacctctatattgagcatcagatagatttatatcttaacctagacattgttacataccaagggtataaaagaaacaagtagatcaaactggttaagacataaaatggatccttttaattctaacttgcaacagatactatcaagttgattttgcattgtgtagcgcataagcaacaggaattaatagagataaagagcaattaaatagctcactgtcatcacataaagcgcagatagtgcaccagacaacacaattgacttggggtgccgcatcgccatcagcgcagcaatgatgaat

SEQ ID NO: 39002 - DNA, 2085 bp, Zea Mays
gcgcggccgcgcggtgaaaagaagcgggccgcgaggggaggaggaacaaaacgactggctgtccgaacggggacgtctggttcctctcattccccttccacctcgctctctctctctcctcccactgctcgccctctctctcttacgcgcgcgtgacaacctccctccctccactgcgcgcggcgcgggagcagcagcggcagcacccaccgactgatcgccggtgggcggggcgggggcgatctgatgcgggcgcggcggtgatggcagcgccatccggcggtgggggcggcggtgcgggggagggctcctcctcggccgccgcagctgcgacgatcggggtccacggggtggaccaagaggcgatgtggcagatgaatttggaagaagccatggaactggggccatacccagagcgtgttggtgagccagactgtagctattacatgaggactggcatgtgcaggtttgggatgacctgtaaatttaatcacccagcagaccgaaagctggctgttgctgctgcaagaatgaagggagaatatcctcaaagaattgggcagcctgaatgtcaatactatctgaagactggcacgtgcaagtttggagcaacttgcaagtttcatcatccccgagaaaaggctgcaatggcaactcgagttcagttgaatgaactgggctacccactccgcccgaatgaaaaagagtgtgcttattatttaagaacagggcagtgcaagtttggaagcacatgtaagtttcaccattcacaaccatccaccatgatggttgctgtacgtggctctgtttattcacctggacagtctgcaacttctcctggccagcatgcttaccaaggggctgtaacaagctggcccttgtcgagatctgcttctttcattgcaagtccaaggtggccaggtcattcaagttatgcacaagtgattgttcctcccgggcttgttcaggtcccagggtggagtccttatactgcgcaaattggttcttcatcctcggaggaccaacaacggacacctggagctgctcaatactatactggctcacgccaaagtggtactagtataggcgatcaaggaatgttttcatcctaccaagcagttctatatgaagaccggagactgtaagtttggtgctgtatgcaagttccatcatcccagggagcgaataattcctactcccaattgtgcactgagtccattaggcctacctttgcgcccgggagagccaatatgcagtttctacaatcgctacggcatgtgcaagttcggtccaaattgcaaattcgatcacccaatgggaaatgccatgtacggccaggctccatcgccagctagcgaggccccagctcctcggcgcatgctggcacatgtaccgccgtcgcacccagaagcatcgcctgatggtggttccggaaggtctaggaggattgcccactctgattcccagcaaataccctctggtgaaaggagcgctgagagagaggcgtcctaggccatcctcggtgtcttcgttccccattcttgactggagtaaccatctgcaaccaacaacattcgaggatccgaagctgtacaggtcttttgccccacctctgagctttacataccggagcttgcttcaacgtgtattgcattcaggcaggaaaaagttcttgcctgttcgggatgctcatttgctcccccactgaaacgggaacaaacctaccttatttaaaacatatgtatggatggaacctactcacctctggacattcaaacccattcgagtcatgtgcactggtcccggtgctgtagttatagagctgtctttgcatggacaaagctgttgcgaaactgactggggatgcgcaagcataacctcttttgttaattattgtctcgttttttttttctcggcatttatctctttttcataagggcagccccgcactctgaaagtgtgcgttttgaagattgggaaaataataggttgccatcgtatgctctgtattacccaccatgctttaaactcagttatttgagagtcgtttttatcttggtggtcctgacagggactgtttatttt

SEQ ID NO: 39003 - DNA, 2048 bp, Zea Mays
gcgcggccgcgcggtgaaaagaagcgggccgcgaggggaggaggaacaaaacgactggctgtccgaacggggacgtctggttcctctcattccccttccacctcgctctctctctctcctcccactgctcgccctctctctcttacgcgcgcgtgacaacctccctccctccactgcgcgcggcgcgggagcagcagcggcagcacccaccgactgatcgccggtgggcggggcgggggcgatctgatgcgggcgcggcggtgatggcagcgccatccggcggtgggggcggcggtgcgggggagggctcctcctcggccgccgcagctgcgacgatcggggtccacggggtggaccaagttgcagaggcgatgtggcagatgaatttggaagaagccatggaactggggccatacccagagcgtgttggtgagccagactgtagctattacatgaggactggcatgtgcaggtttgggatgacctgtaaatttaatcacccagcagaccgaaagctggctgttgctgctgcaagaatgaagggagaatatcctcaaagaattgggcagcctgaatgtcaaaatgaaaaagagtgtgcttattatttaagaacagggcagtgcaagtttggaagcacatgtaagtttcaccattcacaaccatccaccatgatggttgctgtacgtggctctgtttattcacctggacagtctgcaacttctcctggccagcatgcttaccaaggggctgtaacaagctggcccttgtcgagatctgcttctttcattgcaagtccaaggtggccaggtcattcaagttatgcacaagtgattgttcctcccgggcttgttcaggtcccagggtggagtccttatactgcgcaaattggttcttcatcctcggaggaccaacaacggacacctggagctgctcaatactatactggctcacgccaaagtggtactagtataggcgatcaaggaatgttttcatcctaccaagcaggttctgttcctgttggactttatgcagtacagagggagaatttatttccagagagacctgaccaacctgaatgtcagttctatatgaagaccggagactgtaagtttggtgctgtatgcaagttccatcatcccagggagcgaataattcctactcccaattgtgcactgagtccattaggcctacctttgcgcccgggagagccaatatgcagtttctacaatcgctacggcatgtgcaagttcggtccaaattgcaaattcgatcacccaatgggaaatgccatgtacggccaggctccatcgccagctagcgaggccccagctcctcggcgcatgctggcacatgtaccgccgtcgcacccagaagcatcgcctgatggtggttccggaaggtctaggaggattgcccactctgattcccagcaaataccctctggtgaaaggagcgctgagagagaggcgtcctaggccatcctcggtgtcttcgttccccattcttgactggagtaaccatctgcaaccaacaacattcgaggatccgaagctgtacaggtcttttgccccacctctgagctttacataccggagcttgcttcaacgtgtattgcattcaggcaggaaaaagttcttgcctgttcgggatgctcatttgctcccccactgaaacgggaacaaacctaccttatttaaaacatatgtatggatggaacctactcacctctggacattcaaacccattcgagtcatgtgcactggtcccggtgctgtagttatagagctgtctttgcatggacaaagctgttgcgaaactgactggggatgcgcaagcataacctcttttgttaattattgtctcgttttttttttctcggcatttatctctttttcataagggcagccccgcactctgaaagtgtgcgttttgaagattgggaaaataataggttgccatcgtatgctctgtattacccaccatgctttaaactcagttatttgagagtcgtttttatcttggtggtcctgacagggactgtttatttt

SEQ ID NO: 39004 - DNA, 1842 bp, Zea Mays
gtctaacacgaagatggacatttttgtgttcttagaatttcttgtatcaggaactgaagaatgatgaataaaggcaattaactgatttatggatatttacattctggaagacactagagaatatagttgcagaggcgatgtggcagatgaatttggaagaagccatggaactggggccatacccagagcgtgttggtgagccagactgtagctattacatgaggactggcatgtgcaggtttgggatgacctgtaaatttaatcacccagcagaccgaaagctggctgttgctgctgcaagaatgaagggagaatatcctcaaagaattgggcagcctgaatgtcaatactatctgaagactggcacgtgcaagtttggagcaacttgcaagtttcatcatccccgagaaaaggctgcaatggcaactcgagttcagttgaatgaactgggctacccactccgcccgaatgaaaaagagtgtgcttattatttaagaacagggcagtgcaagtttggaagcacatcatgcttaccaaggggctgtaacaagctggcccttgtcgagatctgcttctttcattgcaagtccaaggtggccaggtcattcaagttatgcacaagtgattgttcctcccgggcttgttcaggtcccagggtggagtccttatactgcgcaaattggttcttcatcctcggaggaccaacaacggacacctggagctgctcaatactatactggctcacgccaaagtggtactagtataggcgatcaaggaatgttttcatcctaccaagcaggttctgttcctgttggactttatgcagtacagagggagaatttatttccagagagacctgaccaacctgaatgtcagttctatatgaagaccggagactgtaagtttggtgctgtatgcaagttccatcatcccagggagcgaataattcctactcccaattgtgcactgagtccattaggcctacctttgcgcccgggagagccaatatgcagtttctacaatcgctacggcatgtgcaagttcggtccaaattgcaaattcgatcacccaatgggaaatgccatgtacggccaggctccatcgccagctagcgaggccccagctcctcggcgcatgctggcacatgtaccgccgtcgcacccagaagcatcgcctgatggtggttccggaaggtctaggaggattgcccactctgattcccagcaaataccctctggtgaaaggagcgctgagagagaggcgtcctaggccatcctcggtgtcttcgttccccattcttgactggagtaaccatctgcaaccaacaacattcgaggatccgaagctgtacaggtcttttgccccacctctgagctttacataccggagcttgcttcaacgtgtattgcattcaggcaggaaaaagttcttgcctgttcgggatgctcatttgctcccccactgaaacgggaacaaacctaccttatttaaaacatatgtatggatggaacctactcacctctggacattcaaacccattcgagtcatgtgcactggtcccggtgctgtagttatagagctgtctttgcatggacaaagctgttgcgaaactgactggggatgcgcaagcataacctcttttgttaattattgtctcgttttttttttctcggcatttatctctttttcataagggcagccccgcactctgaaagtgtgcgttttgaagattgggaaaataataggttgccatcgtatgctctgtattacccaccatgctttaaactcagttatttgagagtcgtttttatcttggtggtcctgacagggactgtttatttt

SEQ ID NO: 39005 - DNA, 1735 bp, Zea Mays
aactgatttatggatatttacattctggaagacactagagaatatagttgcagaggcgatgtggcagatgaatttggaagaagccatggaactggggccatacccagagcgtgttggtgagccagactgtagctattacatgaggactggcatgtgcaggtttgggatgacctgtaaatttaatcacccagcagaccgaaagctggctgttgctgctgcaagaatgaagggagaatatcctcaaagaattgggcagcctgaatgtcaaaatgaaaaagagtgtgcttattatttaagaacagggcagtgcaagtttggaagcacatgtaagtttcaccattcacaaccatccaccatgatggttgctgtacgtggctctgtttattcacctggacagtctgcaacttctcctggccagcatgcttaccaaggggctgtaacaagctggcccttgtcgagatctgcttctttcattgcaagtccaaggtggccaggtcattcaagttatgcacaagtgattgttcctcccgggcttgttcaggtcccagggtggagtccttatactgcgcaaattggttcttcatcctcggaggaccaacaacggacacctggagctgctcaatactatactggctcacgccaaagtggtactagtataggcgatcaaggaatgttttcatcctaccaagcaggttctgttcctgttggactttatgcagtacagagggagaatttatttccagagagacctgaccaacctgaatgtcagttctatatgaagaccggagactgtaagtttggtgctgtatgcaagttccatcatcccagggagcgaataattcctactcccaattgtgcactgagtccattaggcctacctttgcgcccgggagagccaatatgcagtttctacaatcgctacggcatgtgcaagttcggtccaaattgcaaattcgatcacccaatgggaaatgccatgtacggccaggctccatcgccagctagcgaggccccagctcctcggcgcatgctggcacatgtaccgccgtcgcacccagaagcatcgcctgatggtggttccggaaggtctaggaggattgcccactctgattcccagcaaataccctctggtgaaaggagcgctgagagagaggcgtcctaggccatcctcggtgtcttcgttccccattcttgactggagtaaccatctgcaaccaacaacattcgaggatccgaagctgtacaggtcttttgccccacctctgagctttacataccggagcttgcttcaacgtgtattgcattcaggcaggaaaaagttcttgcctgttcgggatgctcatttgctcccccactgaaacgggaacaaacctaccttatttaaaacatatgtatggatggaacctactcacctctggacattcaaacccattcgagtcatgtgcactggtcccggtgctgtagttatagagctgtctttgcatggacaaagctgttgcgaaactgactggggatgcgcaagcataacctcttttgttaattattgtctcgttttttttttctcggcatttatctctttttcataagggcagccccgcactctgaaagtgtgcgttttgaagattgggaaaataataggttgccatcgtatgctctgtattacccaccatgctttaaactcagttatttgagagtcgtttttatcttggtggtcctgacagggactgtttatttt

SEQ ID NO: 39006 - DNA, 1923 bp, Zea Mays
aactgatttatggatatttacattctggaagacactagagaatatagttgcagaggcgatgtggcagatgaatttggaagaagccatggaactggggccatacccagagcgtgttggtgagccagactgtagctattacatgaggactggcatgtgcaggtttgggatgacctgtaaatttaatcacccagcagaccgaaagctggctgttgctgctgcaagaatgaagggagaatatcctcaaagaattgggcagcctgaatgtcaatactatctgaagactggcacgtgcaagtttggagcaacttgcaagtttcatcatccccgagaaaaggctgcaatggcaactcgagttcagttgaatgaactgggctacccactccgcccgaatgaaaaagagtgtgcttattatttaagaacagggcagtgcaagtttggaagcacatgtaagtttcaccattcacaaccatccaccatgatggttgctgtacgtggctctgtttattcacctggacagtctgcaacttctcctggccagcatgcttaccaaggggctgtaacaagctggcccttgtcgagatctgcttctttcattgcaagtccaaggtggccaggtcattcaagttatgcacaagtgattgttcctcccgggcttgttcaggtcccagggtggagtccttatactgcgcaaattggttcttcatcctcggaggaccaacaacggacacctggagctgctcaatactatactggctcacgccaaagtggtactagtataggcgatcaaggaatgttttcatcctaccaagcaggttctgttcctgttggactttatgcagtacagagggagaatttatttccagagagacctgaccaacctgaatgtcagttctatatgaagaccggagactgtaagtttggtgctgtatgcaagttccatcatcccagggagcgaataattcctactcccaattgtgcactgagtccattaggcctacctttgcgcccggtttttgaactcaaacagagcatgaaagataaaaacttgcatctctcaagtgtggccaccaccatcagggagagccaatatgcagtttctacaatcgctacggcatgtgcaagttcggtccaaattgcaaattcgatcacccaatgggaaatgccatgtacggccaggctccatcgccagctagcgaggccccagctcctcggcgcatgctggcacatgtaccgccgtcgcacccagaagcatcgcctgatggtggttccggaaggtctaggaggattgcccactctgattcccagcaaataccctctggtgaaaggagcgctgagagagaggcgtcctaggccatcctcggtgtcttcgttccccattcttgactggagtaaccatctgcaaccaacaacattcgaggatccgaagctgtacaggtcttttgccccacctctgagctttacataccggagcttgcttcaacgtgtattgcattcaggcaggaaaaagttcttgcctgttcgggatgctcatttgctcccccactgaaacgggaacaaacctaccttatttaaaacatatgtatggatggaacctactcacctctggacattcaaacccattcgagtcatgtgcactggtcccggtgctgtagttatagagctgtctttgcatggacaaagctgttgcgaaactgactggggatgcgcaagcataacctcttttgttaattattgtctcgttttttttttctcggcatttatctctttttcataagggcagccccgcactctgaaagtgtgcgttttgaagattgggaaaataataggttgccatcgtatgctctgtattacccaccatgctttaaactcagttatttgagagtcgtttttatcttggtggtcctgacagggactgtttatttt

SEQ ID NO: 39007 - DNA, 1687 bp, Zea Mays
ctcaagcgagctatagcgcacagaggcaagagcaagggctgttgctgctgcaagaatgaagggagaatatcctcaaagaattgggcagcctgaatgtcaatactatctgaagactggcacgtgcaagtttggagcaacttgcaagtttcatcatccccgagaaaaggctgcaatggcaactcgagttcagttgaatgaactgggctacccactccgcccgaatgaaaaagagtgtgcttattatttaagaacagggcagtgcaagtttggaagcacatgtaagtttcaccattcacaaccatccaccatgatggttgctgtacgtggctctgtttattcacctggacagtctgcaacttctcctggccagcatgcttaccaaggggctgtaacaagctggcccttgtcgagatctgcttctttcattgcaagtccaaggtggccaggtcattcaagttatgcacaagtgattgttcctcccgggcttgttcaggtcccagggtggagtccttatactgcgcaaattggttcttcatcctcggaggaccaacaacggacacctggagctgctcaatactatactggctcacgccaaagtggtactagtataggcgatcaaggaatgttttcatcctaccaagcaggttctgttcctgttggactttatgcagtacagagggagaatttatttccagagagacctgaccaacctgaatgtcagttctatatgaagaccggagactgtaagtttggtgctgtatgcaagttccatcatcccagggagcgaataattcctactcccaattgtgcactgagtccattaggcctacctttgcgcccgggagagccaatatgcagtttctacaatcgctacggcatgtgcaagttcggtccaaattgcaaattcgatcacccaatgggaaatgccatgtacggccaggctccatcgccagctagcgaggccccagctcctcggcgcatgctggcacatgtaccgccgtcgcacccagaagcatcgcctgatggtggttccggaaggtctaggaggattgcccactctgattcccagcaaataccctctggtgaaaggagcgctgagagagaggcgtcctaggccatcctcggtgtcttcgttccccattcttgactggagtaaccatctgcaaccaacaacattcgaggatccgaagctgtacaggtcttttgccccacctctgagctttacataccggagcttgcttcaacgtgtattgcattcaggcaggaaaaagttcttgcctgttcgggatgctcatttgctcccccactgaaacgggaacaaacctaccttatttaaaacatatgtatggatggaacctactcacctctggacattcaaacccattcgagtcatgtgcactggtcccggtgctgtagttatagagctgtctttgcatggacaaagctgttgcgaaactgactggggatgcgcaagcataacctcttttgttaattattgtctcgttttttttttctcggcatttatctctttttcataagggcagccccgcactctgaaagtgtgcgttttgaagattgggaaaataataggttgccatcgtatgctctgtattacccaccatgctttaaactcagttatttgagagtcgtttttatcttggtggtcctgacagggactgtttatttt

SEQ ID NO: 39008 - DNA, 957 bp, Zea Mays
ctccaactttgcacagtctgcgcaccctgccacgacgagatggcttcctgttcctcatcgccacggccacccaccatccctctcctcctcctcctcctcttcctcctcctccacttctcctccgtcctcgccgcaccagctcctccagccttgtcacaacaggctggtaccggcggcggcaatgcgacggattcggcggcggcgtggacgccgcggctgaggaagacgttcttggacggcggcatggagcgctggcgcgggcggcggctggtggggcggttccaggtgtgcgcggtgtgcacctgctgcgggggcccgcacgggatgtgcatcccggcgccctgctgctacgccatcaactgcaacatccccaaccgccccttcggcgtctgctccttcaccccgcgcacctgcaactgcctcacctgccacctctagctagcgctcgccgccctggatccatggttttgcttgtctagctggtcgtgtcgtttcgttgtcgatggaagggatattcgtgattcgttcatttgggggacagattcgacgaagagttcatcctgccctaaaactgcttgtttgtagccatgactcacagttagtagcagtatggtgatggttggattaatccagcttttttttttctgcacttgcttggtgctcttcaacttcaactgtagatattatcaagtcctggcatcttttttttttaaaaataacaataaaaaagcttctcaagattaataagataccactgttgtatagcctcactcttataacttggctaatagccaaatacttaagcacaaatcccttttaccctaactcttttttttacaaaaggtagcaaaagaatactcggagctatacaacaccaccgccttgctgcagtgtgttttgagaaattctcaagactgtagcgagaccaaagagacgaactcagtgatcaagccccca

SEQ ID NO: 39009 - DNA, 402 bp, Zea Mays
aatccgaacggcctagcccactccaacgcgcactcttctaggcccatctcacggtctcacctcctatgttccttagcgatcgcaacaaaaccgcacgccctctctctagcccgcgcagtcttcagcacgcacaccaatcgcccacaagcgctcgcaggagaggtcgaaaccctagcttttgcggcggcggcgagagaagatgatctacgacgtgaactcccccctcttccgttccttcctcagccagaagggcggcgccgacaagaggaaaatggaggagcataaaccaaaggagcagaggcccaaggctaacgagaacaagcctgtgatgaacgaatgaatatctccagaagctttgttcaatgtgcaaccaagtccgatgtccgtttgctctgcaatatc

SEQ ID NO: 39010 - DNA, 402 bp, Zea Mays
aatccgaacggcctagcccactccaacgcgcactcttctaggcccatctcacggtctcacctcctatgttccttagcgatcgcaacaaaaccgcacgccctctctctagcccgcgcagtcttcagcacgcacaccaatcgcccacaagcgctcgcaggagaggtcgaaaccctagcttttgcggcggcggcgagagaagatgatctacgacgtgaactcccccctcttccgttccttcctcagccagaagggcggcgccgacaagaggaaaatggaggagcataaaccaaaggagcagaggcccaaggctaacgagaacaagcctgtgatgaacgaatgaatatctccagaagctttgttcaatgtgcaaccaagtccgatgtccgtttgctctgcacggat

SEQ ID NO: 39011 - DNA, 1246 bp, Zea Mays
cccgaccgcgccgccacccacaccgctggagacagagccggaattcaccgaggtcgaccccaccgaccgctatgggcggtacacggaggttctcggcaagggcgccttcaagacggtgtatccttccattccccctgggcgtttgacgcctgggtctgattcggggccctttgacttcgcgcgatcgattaaagatcccggctttacgcggtccatgccatgggaggggaccgtttcttaggttctcgccgatttggatcggctccatggtttctgatgcgctcattgctcaaagttccaggcccgatgccactatctctatatatggatatgatgcctcacatattgcctttttgttgggaatcctgatctcctttcatttaaaatacgtgaccgcattgctctgctgtgactgcctaatgcattgtctccatttcagttcctaattccattttgtaccttctgtcctaggctaccaactcgacattttggtatggcggttacgggcttacagctagggtgggtttacttggtgctatcaaataaagacccaaatgtttacccacgggggatggaatcttttcttaggttcttggcactttgcccagtgattgcatcgtgccacttggattggctcgatgctttctgatgcgcttgttgtccaaagttcctgccctgatgcctctagatacaaagcttttgatcaacttgaaggactagaagttgcttggaaccagatcaaagttggagatttacttcggaacaatgatgatttggagaggctgagatcagaagtgtggttgcttaaaaccctcaagcataaaaacataataaagttctacaattcatggcttgacaaaagaagcaacaatataaatttcatcatggaggttttcacatcagggatgttgcgccagtaccggattaagcacaagaaggtagacattagagctttaaagaaatggtcaaggcaaatcttgagtggtcttgtctacctgcacaaccatgatccaccaatgatccatagagacttaaaatgtgacaatatatattcgtgaatggaaaccagggtgaagtaaagattggagaccttggtttagcgactatcctggataatgcacgttcagctcatagtatcattggtaagcaattcatttgattattgttccattagaaatttatagtttttcgtgtatgtaacctctgtttcttcttaggtacaccggaattcatggcaccagaactc

SEQ ID NO: 39012 - DNA, 984 bp, Zea Mays
cggcaagggcgccttcaagacggtgtatccttccattccccctgggcgtttgacgcctgggtctgattcggggccctttgacttcgcgcgatcgattaaagatcccggctttacgcggtccatgccatgggaggggaccgtttcttaggttctcgccgatttggatcggctccatggtttctgatgcgctcattgctcaaagttccaggcccgatgccactatctctatatatggatatgatgcctcacatattgcctttttgttgggaatcctgatctcctttcatttaaaatacgtgaccgcattgctctgctgtgactgcctaatgcattgtctccatttcagttcctaattccattttgtaccttctgtcctaggctaccaactcgacattttggtatggcggttacgggcttacagctaggatacaaagcttttgatcaacttgaaggactagaagttgcttggaaccagatcaaagttggagatttacttcggaacaatgatgatttggagaggctgagatcagaagtgtggttgcttaaaaccctcaagcataaaaacataataaagttctacaattcatggcttgacaaaagaagcaacaatataaatttcatcatggaggttttcacatcagggatgttgcgccagtaccggattaagcacaagaaggtagacattagagctttaaagaaatggtcaaggcaaatcttgagtggtcttgtctacctgcacaaccatgatccaccaatgatccatagagacttaaaatgtgacaatatatattcgtgaatggaaaccagggtgaagtaaagattggagaccttggtttagcgactatcctggataatgcacgttcagctcatagtatcattggtaagcaattcatttgattattgttccattagaaatttatagtttttcgtgtatgtaacctctgtttcttcttaggtacaccggaattcatggcaccagaactc

SEQ ID NO: 39013 - DNA, 3347 bp, Zea Mays
ttatctcgtcgtgcgggagccaaccaatcgcgaccacttggtccaccccactctgctcaccacatgcgcggaacacgccaccgcttgtggtttcacgcgagcgcacccaggccagcagtgcgccccgctgattcctctccggccgtcccgacgttatccaactcctgaacacctctctctcgccacctcacctgaacacctgctcgccccacccattccctccgcatggccggcctccgccctcgcgccgccgtagcttcgaattgcctccgaccggcaattcggcgaggcgcccgtcacgcatcgggggcagcgtttggatactacacctgctggcagctacagggaaatattttgaattggagatctatatccgcaactaaaaagctctggagtacagtagctagtgcaaagcctgatgattctaaatttgaaagtgtggatgcaccacttgagccccaaacatgtgaaggcagcttcttgtgtggtctgttgaagaacctgccacacatttttctagctgcagcagcaaagcagttgcaagaactgtcttaccaaagagaagagagcttaaaacgctgggagcatagtattggttctaaagaggattgccttcacaggaggattgctgaactcaaggaacacgagtgtcagagagctattgaggacgtcatgtacatgttgattgtttataagttttttaagattgaagttccaatggttcccaatctatcgaaactcataagcaacagaaggttacagttatggccaccaagggagacagatcttgaatccattcatggacctgaggtgctagagctaattagggaacacttgaccagcattatcagatgggtgcacagaaatggtcccaagatcaatcgttcaacacttcgcattaaaagactgcaatttgttcggatatattctgcttcaataatgtacggatacttcctgaaatctgtcagcatcaggcatcgattggagctgaccctcactcgctcagaaggagtgcctccgattcaatttctgaatgctcaactcacaaataaacaagagcaggaaggggccattggaggctctagtgaagcttcgtcttctttgagaccaagttctgtggtcaacccacacgacttgaggggctacataatgggattcgatccaaagaccttgcagctttgcgcgaagctgcgctcatcggaagcttctaatctcatcgagaggcacagctgggctctttttgggggcgacatggaactctcccaggagaatgatgaagcggttatacttgatccttcatccctgaaaagactactgcttgaagccatcgcattcggttccttcctctgggacgtcgaggattatgtggacgagatcttcaagttatcggatagctgaagaaactgctacagaaagctcctacagcctttgtggttgtggatagatgaagccagctgaaaagaggagctgcagttcttttctctagatttgtatatatggctggctgttatgtacatgcatatacatcttcatctcaagtttgctttttggagggaagcttggacgtgccctacaagtttttttttcactgctgggcagttattctaccacaagggatgcagcagcagccatgacagcactgcatgtctccagcagcagtttacctgtttcttatctcatcttttattttaaactttattatatgaataatacatatatcttatctcaattttttattttaaactttattatgtgaacaatatggttgtagtgaaaacaatattttgcacaactatagtatttctatttcaaacttcattacgttaataatacagtttacaatgcaaaacaatatttgcgcaactatatgtatgatctgctgaagacagtaacatcacatcttttatttcaaacttcactaagtaaacattacaatctgcagtgtaagaaactgccgctgctaagtgtgcttctcttgtctctcagatcaatagcagcagcaggcgggcagctgctgcttactcatgcagccaaacactacactattattaggtaccattaacattatttttaaaataaacttacttagatttaaaatgatttaagtcatcaagaaacgagataagttgctttggaacggtgggacggaggagaaaacaacttggactccattcctgtccatattgagggcactgtcaagtgacatgatatccaaagcttgtgccaggcaggcatcgtgaccacatgagctgccaaaaccccatgatggcacggcacctgaggaatagccgcttctctgaactttcgataagaaaacaatttcagaaaagttccagttagtacaaaccattcggtcgtggtaaaagtaacatttgaaggaaacctcatcctctccccatttgagatattccctcgctcgctcagcagcaggaggcagcggctgctgtcaacaacaactggctgtccgacaccgcatttaagcttcaccctcccctcgggcctcctccactaaaactcggatagatctcagtgcagtgcttccctgttccctccatcaagaaacagcaaagatccagtgcagagagagagagaagcgccatggcactctgaacaagaaaagaaagagctagagagatctcagtcagccagtctctcacaacacaatgccggcaaccaccaagccgatcttgctcccaagggcgtgggcagcagcgccactcctcctcctgctgctgctcgtcctgcacgggagaggaggccactgcgtcggcatggaggcggcggagctggagatggactcggaggcgcaccggcggctgctgtgggaggcgaccacggggcggaggtacatcagctacgacgccctgcggggcgacgtggtgccgtgctccaggaccggggtgccctactacaactgccggatctcgaccaccgccaacccctacacccggggctgcgagagcatcaccaggtgcagggacgcggatccctaggctcttgctttgcttgctccgtcgccttgcaaagggaagtgggtgtggggctgctgctcctcgctccttcgacgctgcagggcggtgttgctgcaaatgcttactaaatgaagtgtattttattctgtcttcttcttttttctttcttcctctttttttttcttggtcgtccttcctcctttgccgggatatttagtaagtgtagtaatgaagcactaatactaatggatgaatctcgtgtgcaagatgttgatgagcaatgctacagattaccggagagacttcattgagctttcagattcttcaaaaaaaatgtttttggggaatatgcaactgatgaggtgatattttttt

SEQ ID NO: 39014 - DNA, 3290 bp, Zea Mays
cgcttgtggtttcacgcgagcgcacccaggccagcagtgcgccccgctgattcctctccggccgtcccgacgttatccaactcctgaacacctctctctcgccacctcacctgaacacctgctcgccccacccattccctccgcatggccggcctccgccctcgcgccgccgtagcttcgaattgcctccgaccggcaattcggcgaggcgcccgtcacgcatcgggggcagcgtttggatactacacctgctggcagctacagttccttgtcaacatcaaaacgcagggaaatattttgaattggagatctatatccgcaactaaaaagctctggagtacagtagctagtgcaaagcctgatgattctaaatttgaaagtgtggatgcaccacttgagccccaaacatgtgaaggcagcttcttgtgtggtctgttgaagaacctgccacacatttttctagctgcagcagcaaagcagttgcaagaactgtcttaccaaagagaagagagcttaaaacgctgggagcatagtattggttctaaagaggattgccttcacaggaggattgctgaactcaaggaacacgagtgtcagagagctattgaggacgtcatgtacatgttgattgtttataagttttttaagattgaagttccaatggttcccaatctatcgaaactcataagcaacagaaggttacagttatggccaccaagggagacagatcttgaatccattcatggacctgaggtgctagagctaattagggaacacttgaccagcattatcagatgggtgcacagaaatggtcccaagatcaatcgttcaacacttcgcattaaaagactgcaatttgttcggatatattctgcttcaataatgtacggatacttcctgaaatctgtcagcatcaggcatcgattggagctgaccctcactcgctcagaaggagtgcctccgattcaatttctgaatgctcaactcacaaataaacaagagcaggaaggggccattggaggctctagtgaagcttcgtcttctttgagaccaagttctgtggtcaacccacacgacttgaggggctacataatgggattcgatccaaagaccttgcagctttgcgcgaagctgcgctcatcggaagcttctaatctcatcgagaggcacagctgggctctttttgggggcgacatggaactctcccaggagaatgatgaagcggttatacttgatccttcatccctgaaaagactactgcttgaagccatcgcattcggttccttcctctgggacgtcgaggattatgtggacgagatcttcaagttatcggatagctgaagaaactgctacagaaagctcctacagcctttgtggttgtggatagatgaagccagctgaaaagaggagctgcagttcttttctctagatttgtatatatggctggctgttatgtacatgcatatacatcttcatctcaagtttgctttttggagggaagcttggacgtgccctacaagtttttttttcactgctgggcagttattctaccacaagggatgcagcagcagccatgacagcactgcatgtctccagcagcagtttacctgtttcttatctcatcttttattttaaactttattatatgaataatacatatatcttatctcaattttttattttaaactttattatgtgaacaatatggttgtagtgaaaacaatattttgcacaactatagtatttctatttcaaacttcattacgttaataatacagtttacaatgcaaaacaatatttgcgcaactatatgtatgatctgctgaagacagtaacatcacatcttttatttcaaacttcactaagtaaacattacaatctgcagtgtaagaaactgccgctgctaagtgtgcttctcttgtctctcagatcaatagcagcagcaggcgggcagctgctgcttactcatgcagccaaacactacactattattaggtaccattaacattatttttaaaataaacttacttagatttaaaatgatttaagtcatcaagaaacgagataagttgctttggaacggtgggacggaggagaaaacaacttggactccattcctgtccatattgagggcactgtcaagtgacatgatatccaaagcttgtgccaggcaggcatcgtgaccacatgagctgccaaaaccccatgatggcacggcacctgaggaatagccgcttctctgaactttcgataagaaaacaatttcagaaaagttccagttagtacaaaccattcggtcgtggtaaaagtaacatttgaaggaaacctcatcctctccccatttgagatattccctcgctcgctcagcagcaggaggcagcggctgctgtcaacaacaactggctgtccgacaccgcatttaagcttcaccctcccctcgggcctcctccactaaaactcggatagatctcagtgcagtgcttccctgttccctccatcaagaaacagcaaagatccagtgcagagagagagagaagcgccatggcactctgaacaagaaaagaaagagctagagagatctcagtcagccagtctctcacaacacaatgccggcaaccaccaagccgatcttgctcccaagggcgtgggcagcagcgccactcctcctcctgctgctgctcgtcctgcacgggagaggaggccactgcgtcggcatggaggcggcggagctggagatggactcggaggcgcaccggcggctgctgtgggaggcgaccacggggcggaggtacatcagctacgacgccctgcggggcgacgtggtgccgtgctccaggaccggggtgccctactacaactgccggatctcgaccaccgccaacccctacacccggggctgcgagagcatcaccaggtgcagggacgcggatccctaggctcttgctttgcttgctccgtcgccttgcaaagggaagtgggtgtggggctgctgctcctcgctccttcgacgctgcagggcggtgttgctgcaaatgcttactaaatgaagtgtattttattctgtcttcttcttttttctttcttcctctttttttttcttggtcgtccttcctcctttgccgggatatttagtaagtgtagtaatgaagcactaatactaatggatgaatctcgtgtgcaagatgttgatgagcaatgctacagattaccggagagacttcattgagctttcagattcttcaaaaaaaatgtttttggggaatatgcaactgatgaggtgatattttttt

SEQ ID NO: 39015 - DNA, 3362 bp, Zea Mays
cgcttgtggtttcacgcgagcgcacccaggccagcagtgcgccccgctgattcctctccggccgtcccgacgttatccaactcctgaacacctctctctcgccacctcacctgaacacctgctcgccccacccattccctccgcatggccggcctccgccctcgcgccgccgtagcttcgaattgcctccgaccggcaattcggcgaggcgcccgtcacgcatcgggggcagcgtttggatactacacctgctggcagctacagggaaatattttgaattggagatctatatccgcaactaaaaagctctggagtacagtagctagtgcaaagcctgatgattctaaatttgaaagtgtggatgcaccacttgagccccaaacatgtgaaggcagcttcttgtgtggtctgttgaagaacctgccacacatttttctagctgcagcagcaaagcagttgcaagaactgtcttaccaaagagaagagagcttaaaacgctgggagcatagtattggttctaaagaggattgccttcacaggaggattgctgaactcaaggaacacgagtgtcagagagctattgaggacgtcatgtacatgttgattgtttataagttttttaagattgaagttccaatggttcccaatctatcgaaactcataagcaacagaaggttacagttatggccaccaagggagacagatcttgaatccattcatggacctgaggtgctagagctaattagggaacacttgaccagcattatcagatgggtgcacagaaatggtcccaagatcaatcgttcaacacttcgcattaaaagactgcaatttgttcggatatattctgcttcaataatgtacggatacttcctgaaatctgtcagcatcaggcatcgattggagctgaccctcactcgctcagaaggagtgcctccgattcaatttctgaatgctcaactcacaaataaacaagagcaggaaggggccattggaggctctagtgaagcttcgtcttctttgagaccaagttctgtggtcaacccacacgacttgaggggctacataatgggattcgatccaaagaccttgcagctttgcgcgaagctgcgctcatcggaagcttctaatctcatcgagaggcacagctgggctctttttgggggcgacatggaactctcccaggagaatgatgaagcggttatacttgatccttcatccctgaaaagactactgcttgaagccatcgcattcggttccttcctctgggacgtcgaggattatgtggacgagatcttcaagttatcggatagctgaagaaactgctacagaaagctcctacagcctttgtggttgtggatagatgaagccagctgaaaagaggagctgcagttcttttctctagatttgtatacaatagcatcagcctatcaacgcagaggacgtgtgacataattttatggtcccaaaataactgggcattttgctaatctagaacgacattattttggaatgaaatgagttgtatcagcatttgtaccttcaaattagtttagtttgaaagcataaatctgataggcctattgggcttccggttgcagcactgctgggcagttattctaccacaagggatgcagcagcagccatgacagcactgcatgtctccagcagcagtttacctgtttcttatctcatcttttattttaaactttattatatgaataatacatatatcttatctcaattttttattttaaactttattatgtgaacaatatggttgtagtgaaaacaatattttgcacaactatagtatttctatttcaaacttcattacgttaataatacagtttacaatgcaaaacaatatttgcgcaactatatgtatgatctgctgaagacagtaacatcacatcttttatttcaaacttcactaagtaaacattacaatctgcagtgtaagaaactgccgctgctaagtgtgcttctcttgtctctcagatcaatagcagcagcaggcgggcagctgctgcttactcatgcagccaaacactacactattattaggtaccattaacattatttttaaaataaacttacttagatttaaaatgatttaagtcatcaagaaacgagataagttgctttggaacggtgggacggaggagaaaacaacttggactccattcctgtccatattgagggcactgtcaagtgacatgatatccaaagcttgtgccaggcaggcatcgtgaccacatgagctgccaaaaccccatgatggcacggcacctgaggaatagccgcttctctgaactttcgataagaaaacaatttcagaaaagttccagttagtacaaaccattcggtcgtggtaaaagtaacatttgaaggaaacctcatcctctccccatttgagatattccctcgctcgctcagcagcaggaggcagcggctgctgtcaacaacaactggctgtccgacaccgcatttaagcttcaccctcccctcgggcctcctccactaaaactcggatagatctcagtgcagtgcttccctgttccctccatcaagaaacagcaaagatccagtgcagagagagagagaagcgccatggcactctgaacaagaaaagaaagagctagagagatctcagtcagccagtctctcacaacacaatgccggcaaccaccaagccgatcttgctcccaagggcgtgggcagcagcgccactcctcctcctgctgctgctcgtcctgcacgggagaggaggccactgcgtcggcatggaggcggcggagctggagatggactcggaggcgcaccggcggctgctgtgggaggcgaccacggggcggaggtacatcagctacgacgccctgcggggcgacgtggtgccgtgctccaggaccggggtgccctactacaactgccggatctcgaccaccgccaacccctacacccggggctgcgagagcatcaccaggtgcagggacgcggatccctaggctcttgctttgcttgctccgtcgccttgcaaagggaagtgggtgtggggctgctgctcctcgctccttcgacgctgcagggcggtgttgctgcaaatgcttactaaatgaagtgtattttattctgtcttcttcttttttctttcttcctctttttttttcttggtcgtccttcctcctttgccgggatatttagtaagtgtagtaatgaagcactaatactaatggatgaatctcgtgtgcaagatgttgatgagcaatgctacagattaccggagagacttcattgagctttcagattcttcaaaaaaaatgtttttggggaatatgcaactgatgaggtgatattttttt

SEQ ID NO: 39016 - DNA, 1968 bp, Zea Mays
aatagattgattccatcattggtcaccaatgtctcagatccgcgcatctcacctgacgtcttcacccaccaacggcactccggtatggcgactcaccaaccccccaccaatcccccgcccagatccgacggccgctaatcgccgcgtccgcaaaccaacggtctggcgccgtcgtctcttcccataaaaccctccccacccctgcctcccaaccgcgccgtcttctccctcactcccgttccatttccccatctcccagatccaattcgcgagttctccctcctctgccgccatggcgctctctgtggagaagacctcgtctggacgggagtacaaggtcaaggatctctcgcaggcggacttcggccgcctcgagattgagctggccgaggtcgaaatgcccggcctcatggcgtgccgcgccgagttcggcccgtccaagcccttcgccggcgctaggatctcggggtctctccacatgaccatccagaccgccgtcctcatcgagaccctcaccgcgctcggcgccgaggtccgctggtgctcctgcaacatcttctccacgcaggaccacgccgccgccgccatcgcgcgcgactcggccgccgtgttcgcctggaagggggagaccctcgaggagtactggtggtgcaccgagcgctgcctcgactggggcgaggcgggcggccccgacctcatcgtcgacgacggcggcgacgccacgctgctcatccacgagggtgtcaaggccgaggaggattacgagaagaccggcaagatccccgacccggagtccaccgacaacgctgagttcaagatcgtgctcaccatcatccgcgacgggctcaaggctgaccccaagaagtaccgcaagatgaaggagaggcttgtcggcgtctctgaggagaccaccacgggtgtcaagaggctctaccagatgcaggagaccggcgccctcctcttccctgccattaacgtcaacgattccgtcaccaagagcaagtttgacaacctgtatggttgccgccactcgctccctgatggtctgatgagggccactgacgttatgatcgccggaaaggttgccgtggtctgcggatacggtgatgtcggcaagggttgtgctgctgccctcaagcaggctggtgcccgtgtcattgtgaccgagatcgaccccatctgtgccctccaggctctgatggagggtcttcaggtccttcccttggaggacgttgtctctgaagctgacatcttcgtgaccaccactggcaacaaggatatcatcatggttgaccacatgaggaagatgaagaacaatgccattgtctgcaacattggccactttgacaatgaaattgatatgctcggccttgagacctaccctggcgtcaagcgcatcaccatcaagccccagactgaccgctgggtgttccccgagaccaacactggcatcattgtccttgctgagggtcgcctgatgaaccttgggtgtgctactggccatcctagctttgtcatgtcctgctcattcactaaccaggtcattgcccaacttgaactgtggaaggagaagagctctggcaagtatgagaagaaggtgtatgtgctccccaagcaccttgatgagaaggagctgtttgcttttgctgaagaataatggtgtagtcggctggggtgaggcgatgtgcgttgccagatacagttttgtcttgttgactctacttatctgattatcatttgtaagcgatttgctcaagttatttgtcgtttatgaataacttgctttcctcaagagcatacttaaagacggatcctgatttgcgttgattttggttgcttgagtaccgagtttgactgttcgagttgcgttcaccaagttcgcggagatgctatttttttacttgtttgggaactctatttttacaagtgatttctatttttccaagacatttttttagaaaataaaaa

SEQ ID NO: 39017 - DNA, 2314 bp, Zea Mays
aataacacaaagctagagataatgctagttagatgtttttgtagctttgaattagagtgtgtgatgtaattttacttttgttatgaatattagacaataaattgaacttacgaactttgtatagagctgattatactctttttccttctaacaaaatgatttataaacgaggtagtcattgcatagctgtggtaactttaatacaaatactaagtttgattttgttcaaatttatttgtcttatcttttatttgttttattatttttttgaatttagggttctaatgtgaattttgggccaaaaactgaatttcgggccgtaatgtgaatttcgggcttttataatttcgggccgcccgaaatgagcccggcacgtttaagtaattatgggccgggccgtgggccgagggctaggcccatgggccggcccggcacggcccgaaattcaaacgggccgggccggcccgaaattcaaacaatacgggccttttcgggcttgggctgggccgggctgggcggcccgaatgtacacctataggccccgatgacaccggattcctcgccaacctccacctcacgtgcctcgcctccaccttcgctcacccccacctgacgtctcgacccggccccgatacaacgaagagaaaggggaggaggcaaacccctacggaggtgcagaaggatagggcccagccgctaccccaaccaccccgacgccgatccactccctctggctcccttcgactgtccgacctccagttcgccgcctccttgcctagatcccttcgcctctcgccccactacggactcggcggcttgcctaggtaccagcaacaggcaccaccaccactaccaccacgcccatgtccaaagcacttcatccacattggtgtttagactcagttcctgccaaaaagtcgcatccttggagttttttcgacccgtagtcaatccaagatttttttcctgttattttttgcgcactgcttttggttagaaagttcaagatttgttccttccttccttgctatcagcatgtgtaggttgttcagtttggctcatgggtcccgaatcgaactcttgtttcaaggcagggagctagaggaggaggaggggagctggctagccaggcgaaggcggcgccgcgcgcgtggccgtgctgtgacagctgcgacggctgcaccaggtcagagccaccgcggtgccagtgcctggacgcggcgccccgcgggtgccacccggcctgcgtcaaatccagcctcatcgccgacccaccggtgtaccagtgcatggaccgcttccccagcttctgccagcgctgctgcaccgccaccgccgccgcgcacaaactgaccgcacggggccatcgagccagccgacgactggtttctaattgcagcttggtattattgacccagcaacctttttgctcacccaccctcccactcgcccgccggcgaatcatggcgtctcgagtctttaaactttgaagccaaccatggatttggatttttgtttatgtgtatttgtgtagactgtaactgtaaatagagatgaggaatctgtaatctggtgagcgagcaaccaatccgagcttaggttgttcgtctgtggtgtggtgtccttcttcttctgttctgttttctttctttcagttacacactttggtaggtagttggcattactttgctctgtatggctgactcttcttatgtgagagagatgagcacggtggatcactgagatttaggaaaagagtcagtgagacgcttgcttttcttgccgtctatatgaagctttcgacaaggaagggaacacgccgttagggtcagattgtcgtggatctttcgtctgggtattttgggagcagtcgagcagaggcagagctcgtgcctgtacaagtggaggatgatgcacctggacgctaatccggcggtaggccgaggaggaggctgagcgccaggttcatccaccggaaaacgaaggttactctaagctcagtgaaaaagaaagaagaacaaagagttgccctcacttatccctctgggtcagtttcattccatcacagatgcatgtttcccaagtcgcagaggcacgcaggggaaggattctgaaggacagatcctgtcatgaagtagacagcatcagccactttgtgtttagagtgtgcagttgttcgtttagtttttctttgtgggaggggggcaaacttaacagaaacgcatgcaaatgcatagtttattttatatttttgaatctgcaaatgcatttactatatattaaagccggttcaaaatggcttcgaccaggcaat

SEQ ID NO: 39018 - DNA, 5347 bp, Zea Mays
atgtggccttgtatagactgtgcagccaacgcgaacagccccggcaagacgtgtccggatcgacaccgtccaactcaaaccccaacggccggatccgacccggcgtgctctacatatgcgtcccgtcacccctctcctcttcatcctctcttttcttcgcccaaatctcgcgtgctgcctccgtcctgcccccagcgcgtgcgctccgatccgccgggtttcagcgctgcggctgtcgatttacgcgatttgtctggcagaatacagttcagagcctcgagcgctgcagatcgaggacctggtcgtcggattcgggcgccgcgggtgagacctaggcgccggagtttttgtgacggagttttggcgtggttggtggagggggggaggaaggagcggtctcatatgcgcgtgacggtcacgcccaaggacgaggaaaggctggttgacttgatggcgcgcgagcagccgcggtcggcggtggttgcggcgggcggagatttggtcactgctgccgggggcgggggcgaggggtcggatagggactcttcggggtccatagaggagattacggctgacgacttcaagaaggactcgtcgtcggcgttgggcggcgcggcggcggcggcggggccgagatctaggtcttgggtggccccgcccgccgtgggttacatggcccggaactttcgctatgccttcaatagctttgcgtggtcgcaggccgtgcggaataagccgctggggctacaaccgcctgccccagacgacgacgaggtggagcacgccgtggacgtctccgacggagagaaggaagagggcgagattgaggagggggaggctgtggaggccttggcctcgcctgctcctgcgcagcctgagaccatcgatttggactccgacgccccggagaagtcagagtcggtggctatcgatggaagtgccagtgttgtgcctgtcccagctgctgaggaagaggaggtgaaccttgatcagcgtgtggggagtatactggaggagctcgagatggtctccattgaggaagctgagaagtatatgggcatatgcttcatgtttttccttgaacaaaggctttgtttcaggtcgttcgagggtgcatgcgcacgactgcatacctgcttcgagaacctgaagcctctgttccaggaactggagaacgggagcccgatggctatccttgaacccctcatgcagcaggcgtttattggaattgacacactcaccactgtggcgaatttgtataacttgccgaggagggagcagaataagacaacacttttgaagttgttgttccacataaaaaacagatattcggacatgctgacgcctgagcagcgagaagagatggacagccgcgtgaggaagttagtttttggagagaaagacaatgtcagtgacccaagtaccagttgtggcaccagtgcgataaatgtttcagctccatctgggcaggtttcaaacacaggaggactgccatttgaatcaggtgcagcaaatctatttagtagcttgccaaggttggaagtacctgccaaaaggaatagtcccttgttgaatcttcatgcagattatgatgagaacagcttaccctcgccaacccgggacaatgcaccgccttttcctgcgctaaagcctattggttttggagcatttccaatggtacctgagaaactatctttcctagacagagttgagcctacaaagaattcgttatatccacccttaaatgatcctctgaaggctgtctcttcctatcagcagaagtatgggcagaaatctgtatatccaagtgatgatctaccaagtccaactccatctggtgatgagggtaaacctgcagataaaggtggtgatatatttagtgatgtttccagcttccctgttccaaagagtattgtattaccaagtacaagtcagatgcctgcttctcaacctagcacagtcagcagcagcagtattagttatgcttcaagtacaagtcagatggctgcttctcaacctatcacagtcagcagtagcggtattagttatgcgtctggtccacctggttttgctaaacaaattgagcagtcgactgcaggtccgaatcatgcaataaaggcagcatccaaaagtagagatccgaggctcagatttttgaaccgtgattctgctggtgctacagatgtaaattggcgtgcaaatttttcagaactgaaggatgggaacttgggtggagtttcagttggtaaccgtaaacagaaagcagttgatgatcctcaggtggatgacaatgcgttaaaaagatttaggggcggaattgcgaatcagagagacatgcagcctacggggaaccccaatcagcttatgaacatcagggctcctacacatagtagcagtatcaatatgaaaactttgcaacctcctcaaactactgctccacatgtcagtgcggctcctgctgtcccattgcctcctatgttgttaaaggacattgctgtgaacccagcattgcttatgcatttgatccaaatggaacatcaaaagaagtcagcatcagaaagtcagggtggcatgtctagtgggatgaccaacaatggaattgcaggcatggttttcacacctggcaatgctccgaagatcacagaagctgcacaagtcccatctgttaggccacaggttccagtgcagacacctcctttgaactcacaaaatgatggtggaatcgttcgcatgaagccccgtgatccacggcgcatcctacacaataacatagcacagaaatctgatgcaatgagcttggagcaagtgaaaaataatggaactacacagccagactctcagggcaccaaggaccagactactccagtgccttctcaaccagccttgccgtctagcattgcaaggccattcagcagcgcaaaacatgttgatcctgtctctaattcacagttagctgctacagctattatggctccgacacaagctttgagtagcgtaaataaggtggatccaagactagcagttgaacagaatggacaaaatgctgatgcaacaacaaatggtgcttctgcaacaacacttgaagctacacagcctgttagtccatggggtgatgttgatcatctccttgatggatatgatgaccagcaaaaggctctgatacagaaggaaagggcaagacgaataacagaacaacacaaaatgttctcagcacggaagctatgcttggtgcttgatttggatcacacccttcttaattctgcaaagtttatagaagtggaaccaattcatgaagagatgttacggaagaaagaggagcaagacaggactttgcctgaacgtcatctctaccgttttcatcatatgaatatgtggacgaagctgaggccaggaatatggaactttcttcagaaggctagtaacctgtttgagttgcatttatacactatgggaaacaaactgtatgctactgagatggccaaggttcttgatcctactgggaccttgttcgctggacgagtcatatcaagaggtgatgatggtgatccttttgacagtgatgaacgagtgccaaaaagtaaagatctggatggggtactgggtatggaatctgcagttgtgatcatagatgattctgtaagagtctggcctcataacaggcacaatttgatagttgtagagagatacacctatttcccctgcagcaggcgtcaatttggccttcctggaccatcacttctagagattgacagagatgagaggcctgaggatggtacccttgcttcttcacttgcggtcattgagagaatccaccacaattttttttcacatcctaacctcaatgaggctgacgtgcggagcatactagcatctgagcagcgaaggatacttactggttgccgtattgtctttagccgggttttcccggttggagacgccagccctcacttgcatcctctgtggcagactgcagaacagtttggtgcagtctgcacaaacctggttgatgatcgggtcactcatattgttgcaaactcccctgggacagacaaggtgaattgggcattatccaaaggcaaattcgtagtgcatccaggatgggtagaagcttcagctctgttgtaccggcgcgccaacgaacatgactttgcagtcaaataacaccctccctgagcccgaattcatcatataggcttcggggaagaattcttctcagggatggaatgtgttcatggtaacctaacatgattaaaaaaaaaccataacaacatatctaaaatgggaccatggtaagaaggaaaaccaccacccaaagaatttcaggccttaaaatgaatggtaacgaagaaaacgctttatgatagcctggaagaggagactgggtctgttgtggatgtcattacctaggtggtgggtggtcaagattcctttttagaaagccagcaaagatgcgcgaaaaaagtgatgatgagcagatgctcaccgcctcatcctttgtaacatgtagtagtaaaagtggtgcagttttggtaagggtcctaggttcagaaatgttgcttctggccaagggaacttgggggattttgccgttttggtagctgccgctggtcgcctgtcgaaagtgtggcctcagctgaacggcgtcatgaatcattggtgcagcgcatttaataggatgggtttgctatgtcagtgtttgtgttaggagtagcttgagtataaagctggttcaaaggcacgggacacctggtgctttgcctgctgctgctcgaaacgtactcgtcccccttccgaaactttaaggcagaaaaacgttttgttcagttgggtcaggtaaaggggttgagttgatggcatcagagtcagagaagaaccagctgattcaggttaacgggttgaagatttcatgccgtcagtgaacgcgttggttgctatatggaaggttggtattccaaaaaagaaacgcgtgacatgtcttctaactgaaaaggaaaaaaaccgttataatttaactgttttcgcgagaattggttcttttgggatgatgcggccggtttttttagtgtttgttttccgaacaagcttttgtttgcggccttactgacaaggatgttttggccattttggttgtttcaactttcgatgggatttggagaatgatgatccgtggtcaaactttccttgcagcttgcaacttccaagttaatacgtcaaaaataccatgtatcttatgaacgacataaagacgtttttcttgttgagtacaataaaaatgctattttcagaaaaaaaatcattgactctaggatcaccatttttgcatcatgacttgaccatgtaatgtcta

SEQ ID NO: 39019 - DNA, 5296 bp, Zea Mays
atgtggccttgtatagactgtgcagccaacgcgaacagccccggcaagacgtgtccggatcgacaccgtccaactcaaaccccaacggccggatccgacccggcgtgctctacatatgcgtcccgtcacccctctcctcttcatcctctcttttcttcgcccaaatctcgcgtgctgcctccgtcctgcccccagcgcgtgcgctccgatccgccgggtttcagcgctgcggctgtcgatttacgcgatttgtctggcagaatacagttcagagcctcgagcgctgcagatcgaggacctggtcgtcggattcgggcgccgcgggtgagacctaggcgccggagtttttgtgacggagttttggcgtggttggtggagggggggaggaaggagcggtctcatatgcgcgtgacggtcacgcccaaggacgaggaaaggctggttgacttgatggcgcgcgagcagccgcggtcggcggtggttgcggcgggcggagatttggtcactgctgccgggggcgggggcgaggggtcggatagggactcttcggggtccatagaggagattacggctgacgacttcaagaaggactcgtcgtcggcgttgggcggcgcggcggcggcggcggggccgagatctaggtcttgggtggccccgcccgccgtgggttacatggcccggaactttcgctatgccttcaatagctttgcgtggtcgcaggccgtgcggaataagccgctggggctacaaccgcctgccccagacgacgacgaggtggagcacgccgtggacgtctccgacggagagaaggaagagggcgagattgaggagggggaggctgtggaggccttggcctcgcctgctcctgcgcagcctgagaccatcgatttggactccgacgccccggagaagtcagagtcggtggctatcgatggaagtgccagtgttgtgcctgtcccagctgctgaggaagaggaggtgaaccttgatcagcgtgtggggagtatactggaggagctcgagatggtctccattgaggaagctgagaagtcgttcgagggtgcatgcgcacgactgcatacctgcttcgagaacctgaagcctctgttccaggaactggagaacgggagcccgatggctatccttgaacccctcatgcagcaggcgtttattggaattgacacactcaccactgtggcgaatttgtataacttgccgaggagggagcagaataagacaacacttttgaagttgttgttccacataaaaaacagatattcggacatgctgacgcctgagcagcgagaagagatggacagccgcgtgaggaagttagtttttggagagaaagacaatgtcagtgacccaagtaccagttgtggcaccagtgcgataaatgtttcagctccatctgggcaggtttcaaacacaggaggactgccatttgaatcaggtgcagcaaatctatttagtagcttgccaaggttggaagtacctgccaaaaggaatagtcccttgttgaatcttcatgcagattatgatgagaacagcttaccctcgccaacccgggacaatgcaccgccttttcctgcgctaaagcctattggttttggagcatttccaatggtacctgagaaactatctttcctagacagagttgagcctacaaagaattcgttatatccacccttaaatgatcctctgaaggctgtctcttcctatcagcagaagtatgggcagaaatctgtatatccaagtgatgatctaccaagtccaactccatctggtgatgagggtaaacctgcagataaaggtggtgatatatttagtgatgtttccagcttccctgttccaaagagtattgtattaccaagtacaagtcagatgcctgcttctcaacctagcacagtcagcagcagcagtattagttatgcttcaagtacaagtcagatggctgcttctcaacctatcacagtcagcagtagcggtattagttatgcgtctggtccacctggttttgctaaacaaattgagcagtcgactgcaggtccgaatcatgcaataaaggcagcatccaaaagtagagatccgaggctcagatttttgaaccgtgattctgctggtgctacagatgtaaattggcgtgcaaatttttcagaactgaaggatgggaacttgggtggagtttcagttggtaaccgtaaacagaaagcagttgatgatcctcaggtggatgacaatgcgttaaaaagatttaggggcggaattgcgaatcagagagacatgcagcctacggggaaccccaatcagcttatgaacatcagggctcctacacatagtagcagtatcaatatgaaaactttgcaacctcctcaaactactgctccacatgtcagtgcggctcctgctgtcccattgcctcctatgttgttaaaggacattgctgtgaacccagcattgcttatgcatttgatccaaatggaacatcaaaagaagtcagcatcagaaagtcagggtggcatgtctagtgggatgaccaacaatggaattgcaggcatggttttcacacctggcaatgctccgaagatcacagaagctgcacaagtcccatctgttaggccacaggttccagtgcagacacctcctttgaactcacaaaatgatggtggaatcgttcgcatgaagccccgtgatccacggcgcatcctacacaataacatagcacagaaatctgatgcaatgagcttggagcaagtgaaaaataatggaactacacagccagactctcagggcaccaaggaccagactactccagtgccttctcaaccagccttgccgtctagcattgcaaggccattcagcagcgcaaaacatgttgatcctgtctctaattcacagttagctgctacagctattatggctccgacacaagctttgagtagcgtaaataaggtggatccaagactagcagttgaacagaatggacaaaatgctgatgcaacaacaaatggtgcttctgcaacaacacttgaagctacacagcctgttagtccatggggtgatgttgatcatctccttgatggatatgatgaccagcaaaaggctctgatacagaaggaaagggcaagacgaataacagaacaacacaaaatgttctcagcacggaagctatgcttggtgcttgatttggatcacacccttcttaattctgcaaagtttatagaagtggaaccaattcatgaagagatgttacggaagaaagaggagcaagacaggactttgcctgaacgtcatctctaccgttttcatcatatgaatatgtggacgaagctgaggccaggaatatggaactttcttcagaaggctagtaacctgtttgagttgcatttatacactatgggaaacaaactgtatgctactgagatggccaaggttcttgatcctactgggaccttgttcgctggacgagtcatatcaagaggtgatgatggtgatccttttgacagtgatgaacgagtgccaaaaagtaaagatctggatggggtactgggtatggaatctgcagttgtgatcatagatgattctgtaagagtctggcctcataacaggcacaatttgatagttgtagagagatacacctatttcccctgcagcaggcgtcaatttggccttcctggaccatcacttctagagattgacagagatgagaggcctgaggatggtacccttgcttcttcacttgcggtcattgagagaatccaccacaattttttttcacatcctaacctcaatgaggctgacgtgcggagcatactagcatctgagcagcgaaggatacttactggttgccgtattgtctttagccgggttttcccggttggagacgccagccctcacttgcatcctctgtggcagactgcagaacagtttggtgcagtctgcacaaacctggttgatgatcgggtcactcatattgttgcaaactcccctgggacagacaaggtgaattgggcattatccaaaggcaaattcgtagtgcatccaggatgggtagaagcttcagctctgttgtaccggcgcgccaacgaacatgactttgcagtcaaataacaccctccctgagcccgaattcatcatataggcttcggggaagaattcttctcagggatggaatgtgttcatggtaacctaacatgattaaaaaaaaaccataacaacatatctaaaatgggaccatggtaagaaggaaaaccaccacccaaagaatttcaggccttaaaatgaatggtaacgaagaaaacgctttatgatagcctggaagaggagactgggtctgttgtggatgtcattacctaggtggtgggtggtcaagattcctttttagaaagccagcaaagatgcgcgaaaaaagtgatgatgagcagatgctcaccgcctcatcctttgtaacatgtagtagtaaaagtggtgcagttttggtaagggtcctaggttcagaaatgttgcttctggccaagggaacttgggggattttgccgttttggtagctgccgctggtcgcctgtcgaaagtgtggcctcagctgaacggcgtcatgaatcattggtgcagcgcatttaataggatgggtttgctatgtcagtgtttgtgttaggagtagcttgagtataaagctggttcaaaggcacgggacacctggtgctttgcctgctgctgctcgaaacgtactcgtcccccttccgaaactttaaggcagaaaaacgttttgttcagttgggtcaggtaaaggggttgagttgatggcatcagagtcagagaagaaccagctgattcaggttaacgggttgaagatttcatgccgtcagtgaacgcgttggttgctatatggaaggttggtattccaaaaaagaaacgcgtgacatgtcttctaactgaaaaggaaaaaaaccgttataatttaactgttttcgcgagaattggttcttttgggatgatgcggccggtttttttagtgtttgttttccgaacaagcttttgtttgcggccttactgacaaggatgttttggccattttggttgtttcaactttcgatgggatttggagaatgatgatccgtggtcaaactttccttgcagcttgcaacttccaagttaatacgtcaaaaataccatgtatcttatgaacgacataaagacgtttttcttgttgagtacaataaaaatgctattttcagaaaaaaaatcattgactctaggatcaccatttttgcatcatgacttgaccatgtaatgtcta

SEQ ID NO: 39020 - DNA, 4402 bp, Zea Mays
cgacaccgtccaactcaaaccccaacggccggatccgacccggcgtgctctacatatgcgtcccgtcacccctctcctcttcatcctctcttttcttcgcccaaatctcgcgtgctgcctccgtcctgcccccagcgcgtgcgctccgatccgccgggtttcagcgctgcggctgtcgatttacgcgatttgtctggcagaatacagttcagagcctcgagcgctgcagatcgaggacctggtcgtcggattcgggcgccgcgggtcgttcgagggtgcatgcgcacgactgcatacctgcttcgagaacctgaagcctctgttccaggaactggagaacgggagcccgatggctatccttgaacccctcatgcagcaggcgtttattggaattgacacactcaccactgtggcgaatttgtataacttgccgaggagggagcagaataagacaacacttttgaagttgttgttccacataaaaaacagatattcggacatgctgacgcctgagcagcgagaagagatggacagccgcgtgaggaagttagtttttggagagaaagacaatgtcagtgacccaagtaccagttgtggcaccagtgcgataaatgtttcagctccatctgggcaggtttcaaacacaggaggactgccatttgaatcaggtgcagcaaatctatttagtagcttgccaaggttggaagtacctgccaaaaggaatagtcccttgttgaatcttcatgcagattatgatgagaacagcttaccctcgccaacccgggacaatgcaccgccttttcctgcgctaaagcctattggttttggagcatttccaatgaagtatgggcagaaatctgtatatccaagtgatgatctaccaagtccaactccatctggtgatgagggtaaacctgcagataaaggtggtgatatatttagtgatgtttccagcttccctgttccaaagagtattgtattaccaagtacaagtcagatgcctgcttctcaacctagcacagtcagcagcagcagtattagttatgcttcaagtacaagtcagatggctgcttctcaacctatcacagtcagcagtagcggtattagttatgcgtctggtccacctggttttgctaaacaaattgagcagtcgactgcaggtccgaatcatgcaataaaggcagcatccaaaagtagagatccgaggctcagatttttgaaccgtgattctgctggtgctacagatgtaaattggcgtgcaaatttttcagaactgaaggatgggaacttgggtggagtttcagttggtaaccgtaaacagaaagcagttgatgatcctcaggtggatgacaatgcgttaaaaagatttaggggcggaattgcgaatcagagagacatgcagcctacggggaaccccaatcagcttatgaacatcagggctcctacacatagtagcagtatcaatatgaaaactttgcaacctcctcaaactactgctccacatgtcagtgcggctcctgctgtcccattgcctcctatgttgttaaaggacattgctgtgaacccagcattgcttatgcatttgatccaaatggaacatcaaaagaagtcagcatcagaaagtcagggtggcatgtctagtgggatgaccaacaatggaattgcaggcatggttttcacacctggcaatgctccgaagatcacagaagctgcacaagtcccatctgttaggccacaggttccagtgcagacacctcctttgaactcacaaaatgatggtggaatcgttcgcatgaagccccgtgatccacggcgcatcctacacaataacatagcacagaaatctgatgcaatgagcttggagcaagtgaaaaataatggaactacacagccagactctcagggcaccaaggaccagactactccagtgccttctcaaccagccttgccgtctagcattgcaaggccattcagcagcgcaaaacatgttgatcctgtctctaattcacagttagctgctacagctattatggctccgacacaagctttgagtagcgtaaataaggtggatccaagactagcagttgaacagaatggacaaaatgctgatgcaacaacaaatggtgcttctgcaacaacacttgaagctacacagcctgttagtccatggggtgatgttgatcatctccttgatggatatgatgaccagcaaaaggctctgatacagaaggaaagggcaagacgaataacagaacaacacaaaatgttctcagcacggaagctatgcttggtgcttgatttggatcacacccttcttaattctgcaaagaagtggaaccaattcatgaagagatgttacggaagaaagaggagcaagacaggactttgcctgaacgtcatctctaccgttttcatcatatgaatatgtggacgaagctgaggccaggaatatggaactttcttcagaaggctagtaacctgtttgagttgcatttatacactatgggaaacaaactgtatgctactgagatggccaaggttcttgatcctactgggaccttgttcgctggacgagtcatatcaagaggtgatgatggtgatccttttgacagtgatgaacgagtgccaaaaagtaaagatctggatggggtactgggtatggaatctgcagttgtgatcatagatgattctgtaagagtctggcctcataacaggcacaatttgatagttgtagagagatacacctatttcccctgcagcaggcgtcaatttggccttcctggaccatcacttctagagattgacagagatgagaggcctgaggatggtacccttgcttcttcacttgcggtcattgagagaatccaccacaattttttttcacatcctaacctcaatgaggctgacgtgcggagcatactagcatctgagcagcgaaggatacttactggttgccgtattgtctttagccgggttttcccggttggagacgccagccctcacttgcatcctctgtggcagactgcagaacagtttggtgcagtctgcacaaacctggttgatgatcgggtcactcatattgttgcaaactcccctgggacagacaaggtgaattgggcattatccaaaggcaaattcgtagtgcatccaggatgggtagaagcttcagctctgttgtaccggcgcgccaacgaacatgactttgcagtcaaataacaccctccctgagcccgaattcatcatataggcttcggggaagaattcttctcagggatggaatgtgttcatggtaacctaacatgattaaaaaaaaaccataacaacatatctaaaatgggaccatggtaagaaggaaaaccaccacccaaagaatttcaggccttaaaatgaatggtaacgaagaaaacgctttatgatagcctggaagaggagactgggtctgttgtggatgtcattacctaggtggtgggtggtcaagattcctttttagaaagccagcaaagatgcgcgaaaaaagtgatgatgagcagatgctcaccgcctcatcctttgtaacatgtagtagtaaaagtggtgcagttttggtaagggtcctaggttcagaaatgttgcttctggccaagggaacttgggggattttgccgttttggtagctgccgctggtcgcctgtcgaaagtgtggcctcagctgaacggcgtcatgaatcattggtgcagcgcatttaataggatgggtttgctatgtcagtgtttgtgttaggagtagcttgagtataaagctggttcaaaggcacgggacacctggtgctttgcctgctgctgctcgaaacgtactcgtcccccttccgaaactttaaggcagaaaaacgttttgttcagttgggtcaggtaaaggggttgagttgatggcatcagagtcagagaagaaccagctgattcaggttaacgggttgaagatttcatgccgtcagtgaacgcgttggttgctatatggaaggttggtattccaaaaaagaaacgcgtgacatgtcttctaactgaaaaggaaaaaaaccgttataatttaactgttttcgcgagaattggttcttttgggatgatgcggccggtttttttagtgtttgttttccgaacaagcttttgtttgcggccttactgacaaggatgttttggccattttggttgtttcaactttcgatgggatttggagaatgatgatccgtggtcaaactttccttgcagcttgcaacttccaagttaatacgtcaaaaataccatgtatcttatgaacgacataaagacgtttttcttgttgagtacaataaaaatgctattttcagaaaaaaaatcattgactctaggatcaccatttttgcatcatgacttgaccatgtaatgtcta

SEQ ID NO: 39021 - DNA, 5106 bp, Zea Mays
ctcgcgtgctgcctccgtcctgcccccagcgcgtgcgctccgatccgccgggtttcagcgctgcggctgtcgatttacgcgatttgtctggcagaatacagttcagagcctcgagcgctgcagatcgaggacctggtcgtcggattcgggcgccgcgggtgagacctaggcgccggagtttttgtgacggagttttggcgtggttggtggagggggggaggaaggagcggtctcatatgcgcgtgacggtcacgcccaaggacgaggaaaggctggttgacttgatggcgcgcgagcagccgcggtcggcggtggttgcggcgggcggagatttggtcactgctgccgggggcgggggcgaggggtcggatagggactcttcggggtccatagaggagattacggctgacgacttcaagaaggactcgtcgtcggcgttgggcggcgcggcggcggcggcggggccgagatctaggtcttgggtggccccgcccgccgtgggttacatggcccggaactttcgctatgccttcaatagctttgcgtggtcgcaggccgtgcggaataagccgctggggctacaaccgcctgccccagacgacgacgaggtggagcacgccgtggacgtctccgacggagagaaggaagagggcgagattgaggagggggaggctgtggaggccttggcctcgcctgctcctgcgcagcctgagaccatcgatttggactccgacgccccggagaagtcagagtcggtggctatcgatggaagtgccagtgttgtgcctgtcccagctgctgaggaagaggaggtgaaccttgatcagcgtgtggggagtatactggaggagctcgagatggtctccattgaggaagctgagaagtcgttcgagggtgcatgcgcacgactgcatacctgcttcgagaacctgaagcctctgttccaggaactggagaacgggagcccgatggctatccttgaacccctcatgcagcaggcgtttattggaattgacacactcaccactgtggcgaatttgtataacttgccgaggagggagcagaataagacaacacttttgaagttgttgttccacataaaaaacagatattcggacatgctgacgcctgagcagcgagaagagatggacagccgcgtgaggaagttagtttttggagagaaagacaatgtcagtgacccaagtaccagttgtggcaccagtgcgataaatgtttcagctccatctgggcaggtttcaaacacaggaggactgccatttgaatcaggtgcagcaaatctatttagtagcttgccaaggttggaagtacctgccaaaaggaatagtcccttgttgaatcttcatgcagattatgatgagaacagcttaccctcgccaacccgggacaatgcaccgccttttcctgcgctaaagcctattggttttggagcatttccaatggtacctgagaaactatctttcctagacagagttgagcctacaaagaattcgttatatccacccttaaatgatcctctgaaggctgtctcttcctatcagcagaagtatgggcagaaatctgtatatccaagtgatgatctaccaagtccaactccatctggtgatgagggtaaacctgcagataaaggtggtgatatatttagtgatgtttccagcttccctgttccaaagagtattgtattaccaagtacaagtcagatgcctgcttctcaacctagcacagtcagcagcagcagtattagttatgcttcaagtacaagtcagatggctgcttctcaacctatcacagtcagcagtagcggtattagttatgcgtctggtccacctggttttgctaaacaaattgagcagtcgactgcaggtccgaatcatgcaataaaggcagcatccaaaagtagagatccgaggctcagatttttgaaccgtgattctgctggtgctacagatgtaaattggcgtgcaaatttttcagaactgaaggatgggaacttgggtggagtttcagttggtaaccgtaaacagaaagcagttgatgatcctcaggtggatgacaatgcgttaaaaagatttaggggcggaattgcgaatcagagagacatgcagcctacggggaaccccaatcagcttatgaacatcagggctcctacacatagtagcagtatcaatatgaaaactttgcaacctcctcaaactactgctccacatgtcagtgcggctcctgctgtcccattgcctcctatgttgttaaaggacattgctgtgaacccagcattgcttatgcatttgatccaaatggaacatcaaaagaagtcagcatcagaaagtcagggtggcatgtctagtgggatgaccaacaatggaattgcaggcatggttttcacacctggcaatgctccgaagatcacagaagctgcacaagtcccatctgttaggccacagaactcacaaaatgatggtggaatcgttcgcatgaagccccgtgatccacggcgcatcctacacaataacatagcacagaaatctgatgcaatgagcttggagcaagtgaaaaataatggaactacacagccagactctcagggcaccaaggaccagactactccagtgccttctcaaccagccttgccgtctagcattgcaaggccattcagcagcgcaaaacatgttgatcctgtctctaattcacagttagctgctacagctattatggctccgacacaagctttgagtagcgtaaataaggtggatccaagactagcagttgaacagaatggacaaaatgctgatgcaacaacaaatggtgcttctgcaacaacacttgaagctacacagcctgttagtccatggggtgatgttgatcatctccttgatggatatgatgaccagcaaaaggctctgatacagaaggaaagggcaagacgaataacagaacaacacaaaatgttctcagcacggaagctatgcttggtgcttgatttggatcacacccttcttaattctgcaaagtttatagaagtggaaccaattcatgaagagatgttacggaagaaagaggagcaagacaggactttgcctgaacgtcatctctaccgttttcatcatatgaatatgtggacgaagctgaggccaggaatatggaactttcttcagaaggctagtaacctgtttgagttgcatttatacactatgggaaacaaactgtatgctactgagatggccaaggttcttgatcctactgggaccttgttcgctggacgagtcatatcaagaggtgatgatggtgatccttttgacagtgatgaacgagtgccaaaaagtaaagatctggatggggtactgggtatggaatctgcagttgtgatcatagatgattctgtaagagtctggcctcataacaggcacaatttgatagttgtagagagatacacctatttcccctgcagcaggcgtcaatttggccttcctggaccatcacttctagagattgacagagatgagaggcctgaggatggtacccttgcttcttcacttgcggtcattgagagaatccaccacaattttttttcacatcctaacctcaatgaggctgacgtgcggagcatactagcatctgagcagcgaaggatacttactggttgccgtattgtctttagccgggttttcccggttggagacgccagccctcacttgcatcctctgtggcagactgcagaacagtttggtgcagtctgcacaaacctggttgatgatcgggtcactcatattgttgcaaactcccctgggacagacaaggtgaattgggcattatccaaaggcaaattcgtagtgcatccaggatgggtagaagcttcagctctgttgtaccggcgcgccaacgaacatgactttgcagtcaaataacaccctccctgagcccgaattcatcatataggcttcggggaagaattcttctcagggatggaatgtgttcatggtaacctaacatgattaaaaaaaaaccataacaacatatctaaaatgggaccatggtaagaaggaaaaccaccacccaaagaatttcaggccttaaaatgaatggtaacgaagaaaacgctttatgatagcctggaagaggagactgggtctgttgtggatgtcattacctaggtggtgggtggtcaagattcctttttagaaagccagcaaagatgcgcgaaaaaagtgatgatgagcagatgctcaccgcctcatcctttgtaacatgtagtagtaaaagtggtgcagttttggtaagggtcctaggttcagaaatgttgcttctggccaagggaacttgggggattttgccgttttggtagctgccgctggtcgcctgtcgaaagtgtggcctcagctgaacggcgtcatgaatcattggtgcagcgcatttaataggatgggtttgctatgtcagtgtttgtgttaggagtagcttgagtataaagctggttcaaaggcacgggacacctggtgctttgcctgctgctgctcgaaacgtactcgtcccccttccgaaactttaaggcagaaaaacgttttgttcagttgggtcaggtaaaggggttgagttgatggcatcagagtcagagaagaaccagctgattcaggttaacgggttgaagatttcatgccgtcagtgaacgcgttggttgctatatggaaggttggtattccaaaaaagaaacgcgtgacatgtcttctaactgaaaaggaaaaaaaccgttataatttaactgttttcgcgagaattggttcttttgggatgatgcggccggtttttttagtgtttgttttccgaacaagcttttgtttgcggccttactgacaaggatgttttggccattttggttgtttcaactttcgatgggatttggagaatgatgatccgtggtcaaactttccttgcagcttgcaacttccaagttaatacgtcaaaaataccatgtatcttatgaacgacataaagacgtttttcttgttgagtacaataaaaatgctattttcagaaaaaaaatcattgactctaggatcaccatttttgcatcatgacttgaccatgtaatgtcta

SEQ ID NO: 39022 - DNA, 1255 bp, Zea Mays
gaccactaccgcgacatcactcactccgccctctacacctcgcgctcccaccgcccggtgtcagatctcgccgccgcgatgggctccgcccactcgtccgtctccaccactggcggcgaagacgaagaagacgacgaggatccgtccgcgtcagccgtctcctccgcgggcgcacaggcgccaccgcccgctctgtcgccgtcgccggtccgcgtgcccccggcctccgcgtccaaagtgctggagcaggagcccgaggtgctgccgtgcctcgccgcggactcgccgctctcgccgcagccctcggcggcgggcaccccgcgcctcctcgcgggtcccggcatcaaggtctgggacccctgccacgttctcctgcccccgccgccgccgtctccgcacgcagggaggcaggttgacgccgcggccatcgaggtcgttgtggtcagccacggcgagtgcgcagccgcgatgcgcccggaccttgtcggcggccggtggccggccacggcgctcacggcgcgcggggagcgtcaggctcgcgcgctcgctgtgttcctgcgctcccgcggcgccaggctcgccgccgcctatgcgtctccgcttgaccgtgcgcgcgccaccgctgctctcgtctgtcggatggctactgctgcatggtttagctctgcaagccattctactgaaaatatcatcaaaatttctagcctttgttggtacctatctgtcatgtttgggcgcacgtacactaggcgtcgccgagccagggacgtgcgccgtgcgcaggagcgcgccaaacagctggccgacgttgagaaggaaagaggacgctgagaaggaaagaggatcagcgcatgactgagaaggaaagaaagggaaggaaagagtatcagcgcaagaaggaaacaaagaataaggaaacaaagaagaaggaaataaagaataaggaaacaaagattagcttgctattttagtcctaaattagaggagcctgctgctttggtcagttggacctcaggctatttatatcgtgtaaccgtactcagtcaagtcaagcagaaattaaaccaatctcgcctctctctcttctctaaccgtgagccagggggcataacccggtgagcgtgtcagcggcacgggggcataaccctgccggagttatcacggagcgagagtacgagctccggagtagaggtccggcatccctgccgaacactgctcttgacaacctggtatcaacgtcgcgtcgatcctttcg

SEQ ID NO: 39023 - DNA, 1306 bp, Zea Mays
gtgatcttgcgttgtgaacattagttcaaagtagtctttgttgtgtctaatctctaatgtttgtttgatgcacacctctcagatcgtgccgctaaaacatggtactaaaataggtgataaaaggcgctctttgctgtttttctaggctcgtgggaacttgatttcccagaggagcagatccaactatcagatgctttgactgaaatgagtcaaggtcagtgggagggctgcccaaaatccgaaatttataccccagaaatggtcaatctgatggaaagcacccaacctgatttctctgcaccatccggggagtcactcagacaggtacagtttcggatgatggaattcctcaaccggacagtcctaagactaccagaaaaggtggcaatgggggacacactgtcacaacaaaatgagttgaaggggttctctcggcagagctccagcaattctgtccaagatggccctccttgggattcgctttacaggctcaaccgacatagcctccaacgaaagaaatctgggaaaagccgactccagtttgtcacttcaggggacaatgaagctgaagatgatttctcccctaaagaagtaaatcagaggcatctccttcatgaaggaagtgttggcagctcagcagcgacctccattgctattttcagccacgtgacccccatccggtgcctcatcgcaggcctgctagactgcaaccctataatgtccaagagaatatgtatagacgattcctcggttacggttcttgagcattcgctgaagacaggatggcagataaaaaggctgaatgatactgcacatctcaggcttctctagctgatcagtgtgtcactgtaaagaaactatctgatagcattctgcaaatcagatgctgaaaccacttgctgcacgcatgtactatgcggccatcacaagtgtggtctcgtcactgtatttcaattgtacctatcgaatgtttctactcaatgtagaagggttggcctgtactggcgttgtgtagtatttgttgttatttttatcaagattatttctcaaattgtagttttccatcagtgtctagttactttttcttggtgggtagttagtggggacacatattagcgcaccattctttttggcagaatatttagcaagtttgtatacttcaggggtatgcagaatgaagtgctgttgcaaacttgctgtgtaactgccaatggcacaattgtttgtattttgcactataatgttgcacaaaatgtcggattgcaatcctctatccaaatgttttctacctctgtttggaacaatg

SEQ ID NO: 39024 - DNA, 1653 bp, Zea Mays
ttcgcccgcgataattaggtcggaatggtgtggactcagctgcagcgaatcgcactccatcaacaggaaggtcaacctttgcacctccagttggcgttagtgtgaggcctctacaagctgtggaaattcccaatgggacacctagggatagaagggctgtttatcccgatcctactttcgcccagtccacacggtcacgggactcacatgacagttcaacactgacagaagagcttgaaatgctaaaagatgagaatgtaaatcttctggagaagcttgggctagcagaagagaaacttagacaatctgaagcccggacaacagagctcgagaaacaggttgctaatcttggcaatgggttatctatggaagtaaagcttatgaaaaggagggaggaaatgcttgtaagaaaggagcaagagataagaaaagctcttatatccaagaatggtaaaagcgaggaactcaccactcttcagcaacagctacagtctgcaagagaagaagcatcggctgctgtgaagaaactcaaagaagctgaatccgaaacacaagagttacatacaatgacacgcaggatgatcttaagcaaagaagaaatggaagaggttgtcatgaagaggtgttggttagcccgttattggggtttggctgtccaatatggcatctatccagacatctcaatgtcaaaacatgaatactggtcttcacttgcacctcttccatttgagtatgtaacatctgctggacagagagccaaggatggatccgaagcagaaggtaatggtttggaagacgtggacaagcttgttcatgatttgactgttacagcaggggaaggcaacgtagaaaccatgcttgctgttgataaaggacttcaagaactagctttcctgaaggtggaggatgcggtactttttgcccttgcccaacaccatcgtactaatgttgctggagcagctgatccagatattaaatcatctggggatgaaaaattcactgaggcatttgacctaagcaaggaggaggaagaagatgtacagttcaagcaggcttggctcatatttttctggaggagggctaagaccaacaacgtggaagaagatattgccgaggagcgattgcacatgtggatcgatcgacacggccagcaaccaacgtcacatgacgctgtggatgttgagcaaggcatacacgagctgaggaagcttggcatcgagcagctcctgtgggagctctcccgccacgaggcgaaccttgccaaagacagtccatctgatgtcgaggacctgacctaacagtaacagcctgagcggacgacggtggccatctcccacccaaatgcagtccaggctccagccatatatttgtatatcatacagataactgggacatgtaaacattttttgtggttttggtttttcagctttgtcacaaacagttcactgactctccccgatgtacataacttccaccccccgcttttgttgtttgtaaaaggcagcttgaggtgtgcaacggagagtgtgttgatgcgcacggcgaaaaggcgcgatagatagaagaatggctggtcagccgactctgcatgtataggtaccgttacacggcatgcagtccaacaacagaggaacatgccatatacatgtcctg

SEQ ID NO: 39025 - DNA, 1655 bp, Zea Mays
tatcgctcttcctaagttaggtcggaatggtgtggactcagctgcagcgaatcgcactccatcaacaggaaggtcaacctttgcacctccagttggcgttagtgtgaggcctctacaagctgtggaaattcccaatgggacacctagggatagaagggctgtttatcccgatcctactttcgcccagtccacacggtcacgggactcacatgacagttcaacactgacagaagagcttgaaatgctaaaagatgagaatgtaaatcttctggagaagcttgggctagcagaagagaaacttagacaatctgaagcccggacaacagagctcgagaaacaggttgctaatcttggcaatgggttatctatggaagtaaagcttatgaaaaggagggaggaaatgcttgtaagaaaggagcaagagataagaaaagctcttatatccaagaatggtaaaagcgaggaactcaccactcttcagcaacagctacagtctgcaagagaagaagcatcggctgctgtgaagaaactcaaagaagctgaatccgaaacacaagagttacatacaatgacacgcaggatgatcttaagcaaagaagaaatggaagaggttgtcatgaagaggtgttggttagcccgttattggggtttggctgtccaatatggcatctatccagacatctcaatgtcaaaacatgaatactggtcttcacttgcacctcttccatttgagtatgtaacatctgctggacagagagccaaggatggatccgaagcagaaggtaatggtttggaagacgtggacaagcttgttcatgatttgactgttacagcaggggaaggcaacgtagaaaccatgcttgctgttgataaaggacttcaagaactagctttcctgaaggtggaggatgcggtactttttgcccttgcccaacaccatcgtactaatgttgctggagcagctgatccagatattaaatcatctggggatgaaaaattcactgaggcatttgacctaagcaaggaggaggaagaagatgtacagttcaagcaggcttggctcatatttttctggaggagggctaagaccaacaacgtggaagaagatattgccgaggagcgattgcacatgtggatcgatcgacacggccagcaaccaacgtcacatgacgctgtggatgttgagcaaggcatacacgagctgaggaagcttggcatcgagcagctcctgtgggagctctcccgccacgaggcgaaccttgccaaagacagtccatctgatgtcgaggacctgacctaacagtaacagcctgagcggacgacggtggccatctcccacccaaatgcagtccaggctccagccatatatttgtatatcatacagataactgggacatgtaaacattttttgtggttttggtttttcagctttgtcacaaacagttcactgactctccccgatgtacataacttccaccccccgcttttgttgtttgtaaaaggcagcttgaggtgtgcaacggagagtgtgttgatgcgcacggcgaaaaggcgcgatagatagaagaatggctggtcagccgactctgcatgtataggtaccgttacacggcatgcagtccaacaacagaggaacatgccatatacatgtcctg

SEQ ID NO: 39026 - DNA, 1714 bp, Zea Mays
cggagcccgctgcactacgctgcggccggcggcggcggagccaaggacaagtacttcggtatcgctcttcctaagttaggtcggaatggtgtggactcagctgcagcgaatcgcactccatcaacaggaaggtcaacctttgcacctccagttggcgttagtgtgaggcctctacaagctgtggaaattcccaatgggacacctagggatagaagggctgtttatcccgatcctactttcgcccagtccacacggtcacgggactcacatgacagttcaacactgacagaagagcttgaaatgctaaaagatgagaatgtaaatcttctggagaagcttgggctagcagaagagaaacttagacaatctgaagcccggacaacagagctcgagaaacaggttgctaatcttggcaatgggttatctatggaagtaaagcttatgaaaaggagggaggaaatgcttgtaagaaaggagcaagagataagaaaagctcttatatccaagaatggtaaaagcgaggaactcaccactcttcagcaacagctacagtctgcaagagaagaagcatcggctgctgtgaagaaactcaaagaagctgaatccgaaacacaagagttacatacaatgacacgcaggatgatcttaagcaaagaagaaatggaagaggttgtcatgaagaggtgttggttagcccgttattggggtttggctgtccaatatggcatctatccagacatctcaatgtcaaaacatgaatactggtcttcacttgcacctcttccatttgagtatgtaacatctgctggacagagagccaaggatggatccgaagcagaaggtaatggtttggaagacgtggacaagcttgttcatgatttgactgttacagcaggggaaggcaacgtagaaaccatgcttgctgttgataaaggacttcaagaactagctttcctgaaggtggaggatgcggtactttttgcccttgcccaacaccatcgtactaatgttgctggagcagctgatccagatattaaatcatctggggatgaaaaattcactgaggcatttgacctaagcaaggaggaggaagaagatgtacagttcaagcaggcttggctcatatttttctggaggagggctaagaccaacaacgtggaagaagatattgccgaggagcgattgcacatgtggatcgatcgacacggccagcaaccaacgtcacatgacgctgtggatgttgagcaaggcatacacgagctgaggaagcttggcatcgagcagctcctgtgggagctctcccgccacgaggcgaaccttgccaaagacagtccatctgatgtcgaggacctgacctaacagtaacagcctgagcggacgacggtggccatctcccacccaaatgcagtccaggctccagccatatatttgtatatcatacagataactgggacatgtaaacattttttgtggttttggtttttcagctttgtcacaaacagttcactgactctccccgatgtacataacttccaccccccgcttttgttgtttgtaaaaggcagcttgaggtgtgcaacggagagtgtgttgatgcgcacggcgaaaaggcgcgatagatagaagaatggctggtcagccgactctgcatgtataggtaccgttacacggcatgcagtccaacaacagaggaacatgccatatacatgtcctg

SEQ ID NO: 39027 - DNA, 2798 bp, Zea Mays
cttcgtagttcgaaaccaaaacgaagaacaaggcgtaacgcaaaagtcaaactaaagtcaacgcggcggcggttaggcgcccacccacccaccccaaagcccgatggatgcgccccgcggcggccacgcgcggcggccgggcccctccggcgaggcggcgaaccagcgccgcgcggccgcggctcaagcgatggcgcgcatggaggagatgatgctcgcgcacgcaggcgccgccggcgagttcagcatcatcctcgacgcccctctgccttcgctgcagcagtaccgccgccaccccacgccgccgtcgggggccccctcggcctcgtccgccaactcctccccgttccgacgcggcggcggcggagggcgggacgagggagtccccgcgcgcttgcgccgcgacgggagcggccacgacgccctcggcgacccggtcaccgccgcgcgcgcctctcgccacggcgcggccgatggaacgggcgcaggcgccgcacggccgcgagcgggtggcgcgcgccgcgagcgcgagcaggagaagcccgtagaggcgccggtgcggctgacggacccgcggagcgtgcggaggcctgtctctcgcggcgagacgcctcccccgacggccgccgaggtgagacgcgtggcggatcaggaggaggaagaagagacgcctcttaagctgctggcgcgcggcgggcggagctcaagcgcggctaggcctgcagaagcctcgcaagcgtcagagacggtccctacggccgcaaggccgtcgagccggcggtcgaggcgggacgtcggcgcgaagcaaggtttgtctgaggtaacgtcgaacgtggactccgacgtggagagtgtcgggcgccggagcagccgagggagcgaggacggtggggatgagcgggtgtcgttgcccatgccactggcagccgtcgtcgccagagaccggagcaggagcaattcgcccgcgataagtcggaatggtgtggactcagctgcagcgaatcgcactccatcaacaggaaggtcaacctttgcacctccagttggcgttagtgtgaggcctctacaagctgtggaaattcccaatgggacacctagggatagaagggctgtttatcccgatcctactttcgcccagtccacacggtcacgggactcacatgacagttcaacactgacagaagagcttgaaatgctaaaagatgagaatgtaaatcttctggagaagcttgggctagcagaagagaaacttagacaatctgaagcccggacaacagagctcgagaaacaggttgctaatcttggcaatgggttatctatggaagtaaagcttatgaaaaggagggaggaaatgcttgtaagaaaggagcaagagataagaaaagctcttatatccaagaatggtaaaagcgaggaactcaccactcttcagcaacagctacaggtaagtctgcaagagaagaagcatcggctgctgtgaagaaactcaaagaagctgaatccgaaacacaagagttacatacaatgacacgcaggatgatcttaagcaaagaagaaatggaagaggttgtcatgaagaggtgttggttagcccgttattggggtttggctgtccaatatggcatctatccagacatctcaatgtcaaaacatgaatactggtcttcacttgcacctcttccatttgagtatgtaacatctgctggacagagagccaaggatggatccgaagcagaaggtaatggtttggaagacgtggacaagcttgttcatgatttgactgttacagcaggggaaggcaacgtagaaaccatgcttgctgttgataaaggacttcaagaactagctttcctgaaggtggaggatgcggtactttttgcccttgcccaacaccatcgtactaatgttgctggagcagctgatccagatattaaatcatctggggatgaaaaattcactgaggcatttggtacagttatctctttatcttctgtaatctctttattttctgtaatcatcatattagtagctagctatacgagaattatgttctttcaacattagttggctggttagctgtagtatcacccagtgccatgtttgtcctgctggggaactctacaaatccatgaccatacttaatctgagttgtgcagacctaagcaaggaggaggaagaagatgtacagttcaagcaggcttggctcatatttttctggaggagggctaagaccaacaacgtggaagaagatattgccgaggagcgattgcacatgtggatcgatcgacacggccagcaaccaacgtcacatgacgctgtggatgttgagcaaggcatacacgagctgaggaagcttggcatcgagcagctcctgtgggagctctcccgccacgaggcgaaccttgccaaagacagtccatctgatgtcgaggacctgacctaacagtaacagcctgagcggacgacggtggccatctcccacccaaatgcagtccaggctccagccatatatttgtatatcatacagataactgggacatgtaaacattttttgtggttttggtttttcagctttgtcacaaacagttcactgactctccccgatgtacataacttccaccccccgcttttgttgtttgtaaaaggcagcttgaggtgtgcaacggagagtgtgttgatgcgcacggcgaaaaggcgcgatagatagaagaatggctggtcagccgactctgcatgtataggtaccgttacacggcatgcagtccaacaacagaggaacatgccatatacatgtcctg

SEQ ID NO: 39028 - DNA, 581 bp, Zea Mays
cgagttgccaccatgcccccgtccgagatcagcggagatgggcgtggatggtgtcgcacgcgtcgttcgacaccaaccgcagtagcatgcgcggggccacggtggcgcctgggctcgtgtccgtggaccaccgcctccatctgcgtgccctagcaaggtcgatgtcgtgggctgccgccggcgaggcggccatccttggcatccgtgccccagcacgcgaccacgggagcagaacccttctcccgccacatcctcatcgcccccgatgccaaacctgacgtcggacccgacgaccgctgcctccgtccccatctagcgatctccctctcctcgccattgccgacaccaccgcgattgaagatccggaaggagaaggataaggatgccaaggaggcgccccggtcgacggaggaggtcggccgggccacatggatgctgcttcacaccatcgcaggctcgcaatgcagttccctaacgaaccaacaaggtgacaaagacggtatgcaaaggagttgatgcatataatctcaagactatatccttgcaaataatgtgttgatcacttcaagaaagttttcaag

SEQ ID NO: 39029 - DNA, 576 bp, Zea Mays
aaccgcagtagcatgcgcggggccacggtggcgcctgggctcgtgtccgtggaccaccgcctccatctgcgtgccctagcaaggtcgatgtcgtgggctgccgccggcgaggcggccatccttggcatccgtgccccagcacgcgaccacgggagcagaacccttctcccgccacatcctcatcgcccccgatgccaaacctgacgtcggacccgacgaccgctgcctccgtccccatctagcgatctccctctcctcgccattgccgacaccaccgcgattgaagatccggaaggagaaggataaggatgccaaggaggcgccccggtcgacggaggaggtcggccgggccacatggatgctgcttcacaccatcgcaggctcgcaatgcagttccctaacgaaccaacaaggtgacaaagacggtatgcaaaggagttggagaagtataaggatgccaaggaggcgccccggacgacggaggaggtcggccgggccacgtggatgctgcttcacaccatcgcaggctcgcagtgcagttccctaacgaaccaacaaggtgacaaagacggtatg

SEQ ID NO: 39030 - DNA, 591 bp, Zea Mays
atttgttcagttcttttctcatgcattagcagaaaaggctcttcaagatttttatggtcatgtgatgccaaaccctgaccaggcatctaagttgaactggtatcatatcgcatgggtgaaaagcgaacaatgccatatcagataaaagcagatggagcttccgtaggaggtctacaaggcaccgagttttgaagaactctgatatctcagaacctgagactcttagttccagcaaagcaaaggctgacattacaccgagcaacaatgtttatacttcaacatattcctatgcctcggagaagcctctgcaacaagacaagccagatgaagaaggtagtcctatactcatcatatgaagaagatggagtagagaaatctggagggggctcgtggagatcctgggccattatttgcagaccatagtgacagcttgttggaccacttgggcacttgggttaccaatggggagtaattccacaacatgagtctccaacaatgggtcatttaagtgatttaagattctggcattttatttttagctaccaggaagctgagaaggaatgatttcatccatgggatgagaagaatgat

SEQ ID NO: 39031 - DNA, 1551 bp, Zea Mays
gtttacttctcaagattatttttagtgtatttattagtgcaaactgttgatgtctctatttaggattttatttgatgtggtaggttacgtggataattgttttcagaaagttgtatagttaaatgcctcatgtgctattagtagctggagttggaaggcatcgagagaatcaaggaacatgagcaggtttcgtgaggtgatagaggggctggccaaggatctgtcagaaggactaactggattcttctaggttaccattggtgttttatctttcatagaagctacaaatgagtaccgtgggcgtccaccacttggcttcaccacacctccgccctccccctcgccctcccgccaatctcgcagcggcgcccgccccatccccatagccgtcaccagcgcggtaaaccattcccttgtattttctttaaagcgtgacattgatcttattgctatatattgtttatctctcttcatgtgtgaaggcaaacaatgaacaggtactccattcctacaattttttggattgctctgtctgtactgtagagtttttttatctcctgaaccagagttcatattttttacgcgagaagaagactataaagtaataggactctaatcttcaaaaggccgccaatatgattagtcatccatgctttccattctatatcaattggcaacatgtatcgtttgtcattgactttagcttccaaacctgtatccatgtgaatagtctaagatccctaacaagctattctttgtgttctgtcttttgtgtaacacaggatgagtgtgctgcctgcaagaagactgtgtacccactagagaatgtatgaaccaaccttgttttcctgcagtcacaatatattggttttgttgtacacatgtgtggaaatttacttgccaaggttgtggaattcaaagctacttctcaacttttatttatgcataaatcaaagtagagtttttatgcatgcccacttgcatcattttagttcatggcagaccacgattaaacctttttatgtttcacaggatacacatgcatatactttcccttttatgcaggtgtacatcttgctcgtctgctgatctctgaatgcacgattgttgggggccttcggcttccgaaggtcctcaaaaacaagatttaacagtgtttctggagtataatgtgtgaacaggtatcttcggactcgagtcgatatcacagtaggagaagcccaaataatacgaaggttgatatagcgccgaagatgtgagcaggaaagcttcggcgtggtagcagaaaaggaaaccgacttaaagatgaaaaggctattcagacctcggtggattactatagaattactaccaaatgtaaagggcatggatgtaattttatatgggttgtgtcccgtgcctataaataggtgaacagtacccccgtactgctcatgctgacttggcatttgcttttgcgtcacgcttgtactttcgccttctttcaagccgaaggtacatttgtaatttgatattatttctacttttctataataataatacagaaatgag

SEQ ID NO: 39032 - DNA, 668 bp, Zea Mays
accggaacaatggcaggacgtaacgcatcacatatggcgatggcgagcagatcctccacgaccggaacggcggtgctgtgctttcttgtggtggtctccctcttcctggccccgtcgttgttcgttgccggaactgaagcagcagcggcctacggtgcaggcaggaagatgaagcaggcagctgcgggagctgtggcgacgaagcaggatggctacggctaccctgcaaccagttcaccagcgggatacccggcggtgccttgttgccctcatccacctgagggcggtcggggttaagagagagcccagctgcagctagacttcatgtgcatgatattgcagaattaccgtctctgaatacagatacagaaactagcatttatatacgaatcatatattatctatatcctcatgccatgagagatgtgtatcactctcgctaaataattagcagctacgacgcgcctgcctgtcacactgtgctactattctatattcctgctccctctctctatatatacatacacacatatgtgtgtgtgaaataaagattagcttggagcaccgcgcatcaatattctcacgggtgtttgaatacatttggatgtccatattagggcttcttcggttattcccaatacacatggattggatgggattggaaaaaa

SEQ ID NO: 39033 - DNA, 484 bp, Zea Mays
ccgtcctcaaaccctacacgtcctcagccctgccagccgcctagccatcctcagtcggcagccgctacaatgtcacccagactccagactccggccagagtccagagccgccaggacgccagaccttgaaggaagcaattgaaatcaataactctgttcctcaaggattgagcagttctatatttacaaagaggccagatattatttttaagtggctcgggccccatggtagtgattgtggtatagtgaatgtgaacatacctactaatggtgctgaaattggtggagcatttggtggagaaaaagcagctggtggtggacgagaagcagggagtgattcctggaagcagtacatgaggagggcgacttggagggaggtcctagagtagtaagtcacttgtttactccatgatggcaatagcaagcagatcgcggtggtgcctatggatgctacaacaagaaagatcaaaagttcttttggatg

SEQ ID NO: 39034 - DNA, 2750 bp, Zea Mays
ccgaatggtaatggtaacgtcgatacttgagcaaatgaagttggcatcagttggaggacatagggcaacagcagcaacagaattgacggcgacattgatacacaccttgcatatgcacgaagtacgaacaagcattaaaggtgcagaaaacaaattcgtggacagaaaacaaacttctttaaaatgtcataagttttacatctagtgggggtaactactaaaatcgttgggtcgtctatcatccagccttctatgccatccattccgaattgtagttaagtttggctctgtgaatttgtcctaagtcaaactttatcctttagcaagtatgcataaattctaagaacatatctcgttaaaatttgcacatgtttcagataagagcaaattttgaccaaaaagaaattgatagcattacgacactacttgcatagtgtattgaagtattcaaactataaatggcagcaccatgtccaaatcaaatcaggacatggttggatgcacatggttagttgctagtttggctaaaaataaggtcaaattaggcatggctagctaacaactggttggggacttggctaaaaacattagcccgcctattagacccagctaaaattaggtagctaacaatgagcccaacatggcctccgattatgtccaggatttgtttgtacccccccaacacacacacacggttataccaggccatcataacttcggccccccagccggcaagcaaaaaaaatgaccaagctctaacaacaagtttagaatctctgtaatttgggtaacaaatcacaggattagctaaatcatcctaaagacagaagttgattcatccttgcgaatcggatctatgtgaagcacatatttcagatatgagcaaattttgacaaaaaaaatggtagcattacgacactacttgcatagtgtattgaagtatgcaaactataaattggcagaaccatgtccaaatcaaattaggacatgtttggatacacatggctagttgatagtttggctaaaaattagctatcatcctaaagacagaagatgattcatccttgagaatcggatctatgtgaagcacatatttcagatatcagcaaattttgacaaaaaaaaaattggtagcattacgacactattgcatagtgtattcaagtatgcaaactatgaattggcagaaccatgttcaaatcaaatcaggacatgtttggatacaccatggttattaaaacgtcgcttaaacgacgtttaagcggtaaaacgtgattagaaactaaaacgtccgaacgttctaacaaatcagcgtagaacgtccgttttggacgtttaatcgttgtttaaacgtccgaaacgcgttttatgtcgttttagacgttctgaggacgttctagttactagtgggccttcctgggctttatgtactcgactactcgctttcgcttcgaaccagcgctggaggtcgcccagccgcgcctgcgactgcagaccgcgcctcctcacacctcagctagcgctggagatctcccggagcggctgcccagccgcgcctgcgacagtgcgaccgccctcctgtccccaggtacgccgccggcccccctcctccctcttccctccgccagtccgcccacaggctagtgcgccgtcgtgccactgcccagtgcccacttgctgccgctgcatccacttgcccggctatgctccagtgcccacttgctgccgctgcatccacttgcccggccaagctccagtgcgccgccgcatccacttgctgtcgctgccctcgacggcccagatccatccgctgccctcgctgcccctcacagtgaatcacctctgcggctgggattgggagtgaggggtcccagccacttcccactgcgtcgtagaccgtcgacctttgcgctgcgcctcacctctgcggccactccgcaagaccagctcaaagatcaatcgcgaaggcttatgtgtgaactcaacttatatgtgaacttattctatatttgaatttctatgtcaagtctgaaaagacgtttcaacattcgtttaaacgtttaaaagttaaaaagttggttctttcttttaccgctttaataaccatggatacacatggctagtttggctaaaaactagctccagtcaggcatgcctgcttaacaactggttggagacttggctaaaaagttagccgacctattagacccagctaaaattagctagctaacaactaacccaacatagcctccgattatgtccagaatttgtttgtacccacacacacatggttataccaggcgagcataacttcggccccacatcaggcgatctgaaaaatgaccaaactctaacaagaggtttagaatctctgtattctaagcaacaaatcacagcattagctaaatcatcctaaagatggaagttaatccatccttgtgaatcgggtctatgtgaagcacatggcatctcaggataggcacagtcacatgaaatgggataacttacgtagcctcttcaaatcagaagcaacaccatggctatggctcaagtgctccaatcctccaactgaccaccccgccctgccgctgagcacactgcccgtcggctgaccacgccgcatgcccttgccgccgccgggctgcagggcccacgacgccctgccgcgcgctcgacggcccgcgtcacgctcaggcctgcccctggcgcccagcccgcgctggcagctgcgtgccctcctatccacccgg

SEQ ID NO: 39035 - DNA, 1183 bp, Zea Mays
cacaaacacacacgcggttatactaggccaccataatttcggccccagccgacaagctaaaaaatgaccaaactctaacaacatttagaatctctgtaatttgggtaacaaatcacagcattagctaaatcatcctaaagacagaagttgattcatccggcgactcagatctatgtgaagcacatatttcagatatgagcaaattttgacaaaaaaaaaacaaattggtagcattatgacactacttgcagagtatattgaagtatgcaatctataaattggcagaaccatgtccaaatcaaatcaggacatgtttggatacacatggctagttgatagtttggctaaaaattagctatcatcctaaagacagaagatgattcatccttgagaatcggatctatgtgaagcacatatttcagatatcagcaaattttgacaaaaaaaaattggtagcattacgacactattgcatagtgtattcaagtatgcaaactatgaattggcagaaccatgtccaaatcaaatcaggacatgtttggatacacatggctagtttggctaaaaactagctccagtcaggcatgcctgcttaacaactggttggagacttggctaaaaagttagccgacctattagacccagctaaaattagctagctaacaactaacccaacatagcctccgattatgtccagaatttgtttgtacccacacacacatggttataccaggcgagcataacttcggccccacatcaggcgatctgaaaaatgaccaaactctaacaagaggtttagaatctctgtattctaagcaacaaatcacagcattagctaaatcatcctaaagatggaagttaatccatccttgtgaatcgggtctatgtgaagcacatggcatctcaggataggcacagtcacatgaaatgggataacttacgtagcctcttcaaatcagaagcaacaccatggctatggctcaagtgctccaatcctccaactgaccaccccgccctgccgctgagcacactgcccgtcggctgaccacgccgcatgcccttgccgccgccgggctgcagggcccacgacgccctgccgcgcgctcgacggcccgcgtcacgctcaggcctgcccctggcgcccagcccgcgctggcagctgcgtgccctcctatccacccgg

SEQ ID NO: 39036 - DNA, 908 bp, Zea Mays
gatactatgggtagagtgcttcgatggacagggcctccattctcggcgacgcaatcgagtacctgaaggagctgctgcagaagatcaacgatcttcagaatgatctggagtcgtccccttccacggcctcgctgcctccgacgcccacaagcttccaccctctgaccccgacgctgcccactttaccgtctcgcgtgaaggaagagctgtgcccaagcgcattgcctagccctacttctcagcaaccgagggttgaggtgaggatgagggaaggccgggcagtgaacatccacatgctgtgcgctcgcaggcccggtctcctgctctctgccatgagagcgatcgaaggcctcggcctcgatgtccagcaagctgtcatcagttgcttcaatgggttttccttggacatcttcaaggccgagctgtgcaaggaaggccctgggcttctgccggaggagatcaagtccgtgctcctgcagtccgctgggttccatggcggcgtgatgccgtgagctaggacaacaagaccgctgaaaaagagacagagagagagagaaaagaaagaacaatgtagctaaggggaagtttacatgaactggtgtttccagtctcagggttggttttcgtcttttaacagtttgagaccgttacagacctgctagtcttcctttaattagtctgatagagtagaaaataatgccggtgttctccttcctggtctgttctagttcttggtacatgcttttgccctgttcagttagctagctctatctcatgaaattccgaatcgaaatcaggtgccagtcaaatccgtgtcaggctctgttcggttgttatggatttgagctctggattgattcctagccggattacttctctaatttatatagattttgatgagctggaat

SEQ ID NO: 39037 - DNA, 521 bp, Zea Mays
catctttctcctcgctgccagaacccgacacctgcctgtgcaaggaaggccctgggcttctgccggaggagatcaagtccgtgctcctgcagtccgctgggttccatggcggcgtgatgccgtgagctaggacaacaagaccgctgaaaaagagacagagagagagagaaaagaaagaacaatgtagctaaggggaagtttacatgaactggtgtttccagtctcagggttggttttcgtcttttaacagtttgagaccgttacagacctgctagtcttcctttaattagtctgatagagtagaaaataatgccggtgttctccttcctggtctgttctagttcttggtacatgcttttgccctgttcagttagctagctctatctcatgaaattccgaatcgaaatcaggtgccagtcaaatccgtgtcaggctctgttcggttgttatggatttgagctctggattgattcctagccggattacttctctaatttatatagattttgatgagctggaat

SEQ ID NO: 39038 - DNA, 474 bp, Zea Mays
gtttggttcccggggcattccgatgcgaccgcactgagaattcttctcgagggagcaggcgaggaaggatcctgacaacttcttcaatttgagaatgctcacatgtcctgcaaccgagatggtggatggttcaagggtgctttactttgagcaggcattttggagatctccagaaaagccttttagacaatcctccagagattctacatggtaaagccctgtccgaaggagatgaaatgcgatgttgagttgagttcatatgcaattagggatgctgaagagtacaagaatttctgtgaccgtcaaaaggatcagaggccacaggcagaagaagtaattgcagtatgtcatttcgaacacaatcttacttttcagactgtttgtttctgaagtttcccccttcatttacttatgcctgttaatggctaaactctggagggacagctgcaaatgaaatgaaggaaatatttacaa

SEQ ID NO: 39039 - DNA, 409 bp, Zea Mays
aactaacccctctataccaggaaagaggattttgggaatgctcacatgtcctgcaaccgagatggtggatggttcaagggtgctttactttgagcaggcattttggagatctccagaaaagccttttagacaaagattctacatggtaaagccctgtccgaaggagatgaaatgcgatgttgagttgagttcatatgcaattagggatgctgaagagtacaagaatttctgtgaccgtcaaaaggatcagaggccacaggcagaagaagtaattgcagtatgtcatttcgaacacaatcttacttttcagactgtttgtttctgaagtttcccccttcatttacttatgcctgttaatggctaaactctggagggacagctgcaaatgaaatgaaggaaatatttacaa

SEQ ID NO: 39040 - DNA, 791 bp, Zea Mays
caggccctcgcgaggacaaaaacgctcgcacagactccaaccaagtcccgtcctgatcactcaggcgcaccacgcacaggaaagagtgagagggaggcggccgtaaccgcaatggcgacgctgccgcagcggttcaagctgctggcgacgcggtgcgcggcgggggcgccgagcccgtcacgcagccccgcgccggcctacgcgggagccgccagccccgggtaccgcctgcgccgccgggtccggggcgctgggaccaccaccgccaccgccaggcgccgcggccgcctgcgccgcttcttgagccgccgcggcggcggtgccgcggccggggcagaggcgctagcggccgcgcggcaggaggacgacaggaagccgctcttcggcggccgaccgggcggcggccgcacgctgcgggatctgttcgtcgcgtccccggaggccgggcgccgccgcggcgggtgcagctgcgactgcggcgacgacgaggatgacgacggcggaagggtcggcggtgccggtgcggatcccggcggcggcggcggcggcggcgcgtggctagggggccggaggttcagctccggcgggctgcggagcctgctgatgcgacggagctggcggccggtgctggtggccatccccgaggcggatggcaacaagatcgagctcggcgccatcgaggaataaagtacaaagagtggaaacggctggggggctgcaagaaataatgtgcagctccaatgcaattctgagaccagttgcaggtttcgattgctggtcttggcgtcttc

SEQ ID NO: 39041 - DNA, 494 bp, Zea Mays
agcggaaataactaacggagaaaaccgagtaacatggcgaagcctagccacgctactcctcctggtcctctcctgcggaagcaataacccactcgaccgtctatcccggtggcagggatgaaggccaagtcacaccatcaaccaatcgacctaagaagtacctgcaaaaattatgccacaagcaaggctgagtatactaatactcagctagacttacccggtgtgaggagtctactctacctctagacatgcagctgtttggctgaggggtttggtttgccaaaagcactagctgagtctaaaaacaagttttagcttttcaagttttagtagaatcctttagactagatgtgtacctagctaatcatacatggtatcaaacattttatcaatcaacatcttttgccagtcacctcatttccacttattactcaatgcagtacaatggatcaagcagtctcattagctgcgagaagcagacgattcgaatcgag

SEQ ID NO: 39042 - DNA, 724 bp, Zea Mays
cttattccaatttcatctcgtagaccacgcatccccatggatccgtgtccacagaccatcaccattatgttatcaaagtggatacaatcaattcctgacctcgcgcgagtgctagaaaaatcactcgacttctaccgagatcctaattagtaaagcagctactcgacctagcatactagtatccatctcaaaaaggaatcctgagttcatgcaactagggtttcaatcaactcctacacttaagtgcacagtacaatcctacaaacattaagtgcggtaaaatagcatatagaacaggttatgcataaaaccggggcttgcctttaatttaacacttagacagtgtttgctgggtggcactcgcttggcgagcatccactgattatgtccattcttcaggtcgtccaccaacggcatcttgtgggtggcaccacatcactgctcgatcatcatctctcggtcctatatgaggtgcaagatgcatatgtatgaatataatgaaagtagcacaaaagtagcacaagacatacaaggacacagtggcgaactaaacaataaaatggaagacaccgtaacaaccacatgttcgctttagttatctacacattatcgacgttcagcattaacaccattaaaaagacgataacatgtttgtttatttacgcaacacaataacaacatcacaagtacgcgcattttatttatttggacacggcttttcatt

SEQ ID NO: 39043 - DNA, 1913 bp, Zea Mays
gttaggtctgagaagacgactagaatgagcatgcatgcatcatgattgtcgcataattgtctcttgtgcactaacatgcttctctcacctatattccaataataagaacttgtgaataatgtgatgtactgctatgttagaaatgtcttacctcgtgtcagtttggtaagccttgttaggtcgtgctaagtgtttctcttgccttgctagctaggtggtattgtaattgttcaaccctcttcgccaataaaaattgttgtctgttttgcccatcaaaagacccccccttctttaaacatcctagtggttagcaagtaaaacctcaaaaaaaatatttatgcttgtgttagtttttctaacccttgtgtgttttacccataaagttacacctgcacagcttatagaaccccacagcttgaccgctagaccaaccccagtctccttctgcacatgttacaaaaaaatgtggtttggtgtctagttgcgcaaaccatgatcaaggccatgttcctttccatagatcctgtcccgaaatttcataacctttctggtgctcgtcctaagcaatctcatgcgactacctctctttttcacctgaatctggtaatcattttcgttgtgaatcatgttgtggccttatcatccaaatctctggatccttcatcgattctgccccattatctggttatctgctgtaacctgttctcaagtatcggatgttgatcttgcctaaatctctcatttctcgtcattctcatacccccttctccgaggatcatgacgcttgttttatcaacttatctctaaacgacatatccatgtggattaatgaatgttgctgttatcttgggatctctcatgtctctaaaagcttatcattctcgatctcatggttggttcatcctcatattaaatatcgtatcaatctttggctgataatccccgtgatgatcataaaatagttctctgagttaaaggaaattctcatgtgatgctcttttgtcggcagtctctgtttcaactctgatcacattcttattttctgagccatactctcatgggctccatctatctgtgctatgtgaatttcttattggttgcgttggtaatgatgtcatgactaacgaccgatggtgccgcgacgaaaccgagagcctcctgtgggcgcgcacacaaggatgagctgctcggcacgcgctggtgtcatggttaatagttgtgatccattacgaggctataccgatgtactatcttttgtggacactctctcagaatgatcactgcatttcgtctcaatatgtcgtgatattctctcaaatccatcttcagtatcttgtcagatcccatctcatgaatttgcatctatctccagtctgggagttacatgcttctccacccttaaagatcctcattcgaatctcgggacgagattctttttaaggggggaaggctgtgacaccccaggtgtcagtttcgggttatgtcagaagaattttcctaatctcggatgctcagtgaaaatttctatttctcgatcgtgtctatctctgtctatcaggctttctcttggaagttcaccgaattcagagttaatcgatcgcgagaaacaacccatttcggagcgtgttaaaaacttttatctctcgaaacgaatgcaaactcgatgatcagtctcgaattataaatctcgtctaaagctcatattaatcaaacgctcgaccgttgctggtcgcgctgtgtccgaatccaatttctcgatgttcgatcgacgtccaactattttaatccgagtccgtacactcagacgggatactcaatttgtcgtcctctaatcaattttatccgactcggccaaatatattatgttcgaaccaaactcaaaaccccgtatcgacagcaattttaaaatatca

SEQ ID NO: 39044 - DNA, 2633 bp, Zea Mays
tcaacgcttcctcggtttctctcctggcgacgtcgagtgacacatctggtttgagggaaataattgcctccgctgctgcagcgcacacgtgtagtaccccatccccacaggccagtaggccacagcccagaagaattgtatctcgggcggacctacttcctcgactcctttgcgcatcgccgggcgtcctggtcttctgcgagaagcacacgaagcaaccggggcacctccgcctgcgcctcccctctcagctactctgtttgtacgcggccgcatccatttcgtctgcccaggaatggaggaagaatatctgcagtgagggactgaggggatcccaagttccaaacaaaactcaccgaggaaaatcattttccgacatggtgaggacgagaaggaggttggtgctgctgctgctcctcctcggcctcacggtgctttccccgctcgcgctctacactagccgcctctccgtggcgcttaactctatacaagcgcgggttttccctggagagatcacgaatcagggccgtggcgtcaaggcagataagctgaatgcgcttcctctgcaaacagtgagctccttgaaagaacctgtcgacattgtcttctcagaggagctgactgaatctaagagccaagaattgcgattgccaaaggtaggtgcgcacaagagccgcgtgctctctgaagtcacggttgctgatgatgatacatcatcgaaagataatgaagtgattgagcaagtaattacgctggaagcacaggatggtggcttggtgaagggagcaggtgtttcagatgagcaggagaaaaacattggatcactgcagcaatcttcttctgaggaaagttcacaggacactatgcctaaacagacacctgcaaaggttgttgcggagaactcccaatcagctagaacagacggtaaaactaaaaccactgttctacctgatatgcggatccgaaatatcaaggatcagttaatcaaggcgaaggtataccttggtcttggatccattagagcgagttctcaatatcttaaagacctacggcagaggatacgggaagttcaaaaagtgcttggtgatgcatccaaggactctgatctaccaaagaatgcacatgaaaaggttaaagcactggagcagatgctgattaagggaaaacagatgcaggatgattgttctattattgtaaaaaagcttcgagctatgcttcattcagcagaggagcagctgcatgcacacaaaaaacagactgtttttctgacacaacttgcagctaaaacccttcctaaaggtcttcactgcctccccctgagactagctaatgaatacttttcattggatcctgttcggcagcagttcccaaaccaacaaaatctcattaacccaaaactgtatcattatgcgttgttctcggataacatactagcaacagcggttgttgttaactcaacagtgttaaatgctaagcatccttctgatcatgttatccacatagtaactgacaaactgaattatgctccaatgagaatgtggttcctctctaatcctccggggaaagcaacaattgaagtacagaatattgaggagtttacatggctaaatgacagctacagtccagtactcaaacatcttgggtcccaatccatgattgattactactttggaacgaatcgtgcaaactcagattcaaacctaaaatatcgaaacccaaagtacctgtcaatcctcaatcatctccgcttttacctacctgagatttatccaaagcttgacaagatggtctttcttgatgatgacatcgtagtaaagaaggatctggctggcctttggtcaatcaacatgaaggggaaggcggcagaacataactgaaatttatcactcgtggcagaagcttaatgaagatagatcactctggaaacttggtactctccctccgggtttggtcacattctggaacaagacatttcccctcagccggtcatggcatgttcttggtctaggttacaatccccatgttaacagcagagacattgagcatgctgcagtcatacattacaatggcaacatgaagccctggttggagattggtctacccaagttccggagctactggtccaagtatctggattatgaccaatctttccttcgggaatgcaacatcaatccatgaaggaacctggtgcttttagtcccttctgacataaccaatagcctgttttctgtcgatgtgcgctttagtgtagtcagcatagtactctcttgctttagatatcagttgttaacaagatttcttattgcctgtgcttcttgtcagaccctttgcataattgcaggaatatctgttatgtttttagagtacatgctttggagcagggcaaactttagatagtgcaatgctcttatgcgatatcgcctttatgtactgaacgtttgctgcaatcctgtaatttggaagcaaactttcccaacaatttaataggtattcaattgggtatcatattgcattgcacccatgagtttgttgcgatgttgccctttcttttttggacagacggtaacagaacttaattgtcattgtacatattgaagtttgtgtgtcctattgaatacaatattgttctccgg

SEQ ID NO: 39045 - DNA, 2843 bp, Zea Mays
cttcctcggtttctctcctggcgacgtcgagtgacacatctggtttgagggaaataattggtattttgtcactctcaacatcccgtgtctatgttttatgagatcatttgtatctgagttgtgaccgatcgcaaattggcaaagcctccgctgctgcagcgcacacgtgtagtaccccatccccacaggccagtaggccacagcccagaagaattgtatctcgggcggacctacttcctcgactcctttgcgcatcgccgggcgtcctggtcttctgcgagaagcacacgaagcaaccggggcacctccgcctgcgcctcccctctcagctactctgtttgtacgcggccgcatccatttcgtctgcccaggaatggaggaagaatatctgcagtgagggactgaggggatcccaagttccaaacaaaactcaccgaggaaaatcattttccgacatggtgaggacgagaaggaggttggtgctgctgctgctcctcctcggcctcacggtgctttccccgctcgcgctctacactagccgcctctccgtggcgcttaactctatacaagcgcgggttttccctggagagatcacgaatcagggccgtggcgtcaaggcagataagctgaatgcgcttcctctgcaaacagtgagctccttgaaagaacctgtcgacattgtcttctcagaggagctgactgaatctaagagccaaggtaggtgcgcacaagagccgcgtgctctctgaagtcacggttgctgatgatgatacatcatcgaaagataatgaagtgattgagcaagtaattacgctggaagcacaggatggtggcttggtgaagggagcaggtgtttcagatgagcaggagaaaaacattggatcactgcagcaatcttcttctgaggaaagttcacaggacactatgcctaaacagacacctgcaaaggttgttgcggagaactcccaatcagctagaacagacggtaaaactaaaaccactgttctacctgatatgcggatccgaaatatcaaggatcagttaatcaaggcgaaggtataccttggtcttggatccattagagcgagttctcaatatcttaaagacctacggcagaggatacgggaagttcaaaaagtgcttggtgatgcatccaaggactctgatctaccaaagaatgcacatgaaaaggttaaagcactggagcagatgctgattaagggaaaacagatgcaggatgattgttctattattgtaaaaaagcttcgagctatgcttcattcagcagaggagcagctgcatgcacacaaaaaacagactgtttttctgacacaacttgcagctaaaacccttcctaaaggtcttcactgcctccccctgagactagctaatgaatacttttcattggatcctgttcggcagcagttcccaaaccaacaaaatctcattaacccaaaactgtatcattatgcgttgttctcggataacatactagcaacagcggttgttgttaactcaacagtgttaaatgctaagcatccttctgatcatgttatccacatagtaactgacaaactgaattatgctccaatgagaatgtggttcctctctaatcctccggggaaagcaacaattgaagtacagaatattgaggagtttacatggctaaatgacagctacagtccagtactcaaacatcttgggtcccaatccatgattgattactactttggaacgaatcgtgcaaactcagattcaaacctaaaatatcgaaacccaaagtacctgtcaatcctcaatcatctccgcttttacctacctgagatttatccaaagcttgacaagatggtctttcttgatgatgacatcgtagtaaagaaggatctggctggcctttggtcaatcaacatgaaggggaaggtaaacggtgccgttgagacttgtggagagagtttccatcgctatgatcgatacctgaatttttcaaatcccattatcaccaagagttttgacccacatgcttgtgtttgggcttttggaatgaatgtgtttgacctggctgaatggaggcggcagaacataactgaaatttatcactcgtggcagaagcttaatgaagatagatcactctggaaacttggtactctccctccgggtttggtcacattctggaacaagacatttcccctcagccggtcatggcatgttcttggtctaggttacaatccccatgttaacagcagagacattgagcatgctgcagtcatacattacaatggcaacatgaagccctggttggagattggtctacccaagttccggagctactggtccaagtatctggattatgaccaatctttccttcgggaatgcaacatcaatccatgaaggaacctggtgcttttagtcccttctgacataaccaatagcctgttttctgtcgatgtgcgctttagtgtagtcagcatagtactctcttgctttagatatcagttgttaacaagatttcttattgcctgtgcttcttgtcagaccctttgcataattgcaggaatatctgttatgtttttagagtacatgctttggagcagggcaaactttagatagtgcaatgctcttatgcgatatcgcctttatgtactgaacgtttgctgcaatcctgtaatttggaagcaaactttcccaacaatttaataggtattcaattgggtatcatattgcattgcacccatgagtttgttgcgatgttgccctttcttttttggacagacggtaacagaacttaattgtcattgtacatattgaagtttgtgtgtcctattgaatacaatattgttctccgg

SEQ ID NO: 39046 - DNA, 2818 bp, Zea Mays
tggcgacgtcgagtgacacatctggtttgagggaaataattggtattttgtcactctcaacatcccgtgtctatgttttatgagatcatttgtatctgagttgtgaccgatcgcaaattggcaaagcctccgctgctgcagcgcacacgtgtagtaccccatccccacaggccagtaggccacagcccagaagaattgtatctcgggcggacctacttcctcgactcctttgcgcatcgccgggcgtcctggtcttctgcgagaagcacacgaagcaaccggggcacctccgcctgcgcctcccctctcagctactctgtttgtacgcggccgcatccatttcgtctgcccaggaatggaggaagaatatctgcagtgagggactgaggggatcccaagttccaaacaaaactcaccgaggaaaatcattttccgacatggtgaggacgagaaggaggttggtgctgctgctgctcctcctcggcctcacggtgctttccccgctcgcgctctacactagccgcctctccgtggcgcttaactctataccgcgggttttccctggagagatcacgaatcagggccgtggcgtcaaggcagataagctgaatgcgcttcctctgcaaacagtgagctccttgaaagaacctgtcgacattgtcttctcagaggagctgactgaatctaagagccaaggtgcgcacaagagccgcgtgctctctgaagtcacggttgctgatgatgatacatcatcgaaagataatgaagtgattgagcaagtaattacgctggaagcacaggatggtggcttggtgaagggagcaggtgtttcagatgagcaggagaaaaacattggatcactgcagcaatcttcttctgaggaaagttcacaggacactatgcctaaacagacacctgcaaaggttgttgcggagaactcccaatcagctagaacagacggtaaaactaaaaccactgttctacctgatatgcggatccgaaatatcaaggatcagttaatcaaggcgaaggtataccttggtcttggatccattagagcgagttctcaatatcttaaagacctacggcagaggatacgggaagttcaaaaagtgcttggtgatgcatccaaggactctgatctaccaaagaatgcacatgaaaaggttaaagcactggagcagatgctgattaagggaaaacagatgcaggatgattgttctattattgtaaaaaagcttcgagctatgcttcattcagcagaggagcagctgcatgcacacaaaaaacagactgtttttctgacacaacttgcagctaaaacccttcctaaaggtcttcactgcctccccctgagactagctaatgaatacttttcattggatcctgttcggcagcagttcccaaaccaacaaaatctcattaacccaaaactgtatcattatgcgttgttctcggataacatactagcaacagcggttgttgttaactcaacagtgttaaatgctaagcatccttctgatcatgttatccacatagtaactgacaaactgaattatgctccaatgagaatgtggttcctctctaatcctccggggaaagcaacaattgaagtacagaatattgaggagtttacatggctaaatgacagctacagtccagtactcaaacatcttgggtcccaatccatgattgattactactttggaacgaatcgtgcaaactcagattcaaacctaaaatatcgaaacccaaagtacctgtcaatcctcaatcatctccgcttttacctacctgagatttatccaaagcttgacaagatggtctttcttgatgatgacatcgtagtaaagaaggatctggctggcctttggtcaatcaacatgaaggggaaggtaaacggtgccgttgagacttgtggagagagtttccatcgctatgatcgatacctgaatttttcaaatcccattatcaccaagagttttgacccacatgcttgtgtttgggcttttggaatgaatgtgtttgacctggctgaatggaggcggcagaacataactgaaatttatcactcgtggcagaagcttaatgaagatagatcactctggaaacttggtactctccctccgggtttggtcacattctggaacaagacatttcccctcagccggtcatggcatgttcttggtctaggttacaatccccatgttaacagcagagacattgagcatgctgcagtcatacattacaatggcaacatgaagccctggttggagattggtctacccaagttccggagctactggtccaagtatctggattatgaccaatctttccttcgggaatgcaacatcaatccatgaaggaacctggtgcttttagtcccttctgacataaccaatagcctgttttctgtcgatgtgcgctttagtgtagtcagcatagtactctcttgctttagatatcagttgttaacaagatttcttattgcctgtgcttcttgtcagaccctttgcataattgcaggaatatctgttatgtttttagagtacatgctttggagcagggcaaactttagatagtgcaatgctcttatgcgatatcgcctttatgtactgaacgtttgctgcaatcctgtaatttggaagcaaactttcccaacaatttaataggtattcaattgggtatcatattgcattgcacccatgagtttgttgcgatgttgccctttcttttttggacagacggtaacagaacttaattgtcattgtacatattgaagtttgtgtgtcctattgaatacaatattgttctccgg

SEQ ID NO: 39047 - DNA, 2678 bp, Zea Mays
cacacgtgtagtaccccatccccacaggccagtaggccacagcccagaagaattgtatctcgggcggacctacttcctcgactcctttgcgcatcgccgggcgtcctggtcttctgcgagaagcacacgaagcaaccggggcacctccgcctgcgcctcccctctcagctactctgtttgtacgcggccgcatccatttcgtctgcccaggaatggaggaagaatatctgcagtgagggactgaggggatcccaagttccaaacaaaactcaccgaggaaaatcattttccgacatggtgaggacgagaaggaggttggtgctgctgctgctcctcctcggcctcacggtgctttccccgctcgcgctctacactagccgcctctccgtggcgcttaactctatacaagcgcgggttttccctggagagatcacgaatcagggccgtggcgtcaaggcagataagctgaatgcgcttcctctgcaaacagtgagctccttgaaagaacctgtcgacattgtcttctcagaggagctgactgaatctaagagccaaggtgcgcacaagagccgcgtgctctctgaagtcacggttgctgatgatgatacatcatcgaaagataatgaagtgattgagcaagtaattacgctggaagcacaggatggtggcttggtgaagggagcaggtgtttcagatgagcaggagaaaaacattggatcactgcagcaatcttcttctgaggaaagttcacaggacactatgcctaaacagacacctgcaaaggttgttgcggagaactcccaatcagctagaacagacggtaaaactaaaaccactgttctacctgatatgcggatccgaaatatcaaggatcagttaatcaaggcgaaggtataccttggtcttggatccattagagcgagttctcaatatcttaaagacctacggcagaggatacgggaagttcaaaaagtgcttggtgatgcatccaaggactctgatctaccaaagaatgcacatgaaaaggttaaagcactggagcagatgctgattaagggaaaacagatgcaggatgattgttctattattgtaaaaaagcttcgagctatgcttcattcagcagaggagcagctgcatgcacacaaaaaacagactgtttttctgacacaacttgcagctaaaacccttcctaaaggtcttcactgcctccccctgagactagctaatgaatacttttcattggatcctgttcggcagcagttcccaaaccaacaaaatctcattaacccaaaactgtatcattatgcgttgttctcggataacatactagcaacagcggttgttgttaactcaacagtgttaaatgctaagcatccttctgatcatgttatccacatagtaactgacaaactgaattatgctccaatgagaatgtggttcctctctaatcctccggggaaagcaacaattgaagtacagaatattgaggagtttacatggctaaatgacagctacagtccagtactcaaacatcttgggtcccaatccatgattgattactactttggaacgaatcgtgcaaactcagattcaaacctaaaatatcgaaacccaaagtacctgtcaatcctcaatcatctccgcttttacctacctgagatttatccaaagcttgacaagatggtctttcttgatgatgacatcgtagtaaagaaggatctggctggcctttggtcaatcaacatgaaggggaaggtaaacggtgccgttgagacttgtggagagagtttccatcgctatgatcgatacctgaatttttcaaatcccattatcaccaagagttttgacccacatgcttgtgtttgggcttttggaatgaatgtgtttgacctggctgaatggaggcggcagaacataactgaaatttatcactcgtggcagaagcttaatgaagatagatcactctggaaacttggtactctccctccgggtttggtcacattctggaacaagacatttcccctcagccggtcatggcatgttcttggtctaggttacaatccccatgttaacagcagagacattgagcatgctgcagtcatacattacaatggcaacatgaagccctggttggagattggtctacccaagttccggagctactggtccaagtatctggattatgaccaatctttccttcgggaatgcaacatcaatccatgaaggaacctggtgcttttagtcccttctgacataaccaatagcctgttttctgtcgatgtgcgctttagtgtagtcagcatagtactctcttgctttagatatcagttgttaacaagatttcttattgcctgtgcttcttgtcagaccctttgcataattgcaggaatatctgttatgtttttagagtacatgctttggagcagggcaaactttagatagtgcaatgctcttatgcgatatcgcctttatgtactgaacgtttgctgcaatcctgtaatttggaagcaaactttcccaacaatttaataggtattcaattgggtatcatattgcattgcacccatgagtttgttgcgatgttgccctttcttttttggacagacggtaacagaacttaattgtcattgtacatattgaagtttgtgtgtcctattgaatacaatattgttctccgg

SEQ ID NO: 39048 - DNA, 2601 bp, Zea Mays
gaagaattgtatctcgggcggacctacttcctcgactcctttgcgcatcgccgggcgtcctggtcttctgcgagaagcacacgaagcaaccggggcacctccgcctgcgcctcccctctcagctactctgtttgtacgcggccgcatccatttcgtctgcccaggaatggaggaagaatatctgcagtgagggactgaggggatcccaagttccaaacaaaactcaccgaggaaaatcattttccgacatggtgaggacgagaaggaggttggtgctgctgctgctcctcctcggcctcacggtgctttccccgctcgcgctctacactagccgcctctccgtggcgcttaactctatacaagcgcgggttttccctggagagatcacgaatcagggccgtggcgtcaaggcagataagctgaatgcgcttcctctgcaaacagtgagctccttgaaagaacctgtcgacattgtcttctcagaggagctgactgaatctaagagccaagaattgcgattgccaaaggtaggtgcgcacaagagccgcgtgctctctgaagtcacggttgctgatgatgatacatcatcgaaagataatgaagtgattgagcaagtaattacgctggaagcacaggatggtggcttggtgaagggagcaggtgtttcagatgagcaggagaaaaacattggatcactgcagcaatcttcttctgaggaaagttcacaggacactatgcctaaacagacacctgcaaaggttgttgcggagaactcccaatcagctagaacagacggtaaaactaaaaccactgttctacctgatatgcggatccgaaatatcaaggatcagttaatcaaggcgaaggtataccttggtcttggatccattagagcgagttctcaatatcttaaagacctacggcagaggatacgggaagttcaaaaagtgcttggtgatgcatccaaggactctgatctaccaaagaaatgcaggatgattgttctattattgtaaaaaagcttcgagctatgcttcattcagcagaggagcagctgcatgcacacaaaaaacagactgtttttctgacacaacttgcagctaaaacccttcctaaaggtcttcactgcctccccctgagactagctaatgaatacttttcattggatcctgttcggcagcagttcccaaaccaacaaaatctcattaacccaaaactgtatcattatgcgttgttctcggataacatactagcaacagcggttgttgttaactcaacagtgttaaatgctaagcatccttctgatcatgttatccacatagtaactgacaaactgaattatgctccaatgagaatgtggttcctctctaatcctccggggaaagcaacaattgaagtacagaatattgaggagtttacatggctaaatgacagctacagtccagtactcaaacatcttgggtcccaatccatgattgattactactttggaacgaatcgtgcaaactcagattcaaacctaaaatatcgaaacccaaagtacctgtcaatcctcaatcatctccgcttttacctacctgagatttatccaaagcttgacaagatggtctttcttgatgatgacatcgtagtaaagaaggatctggctggcctttggtcaatcaacatgaaggggaaggtaaacggtgccgttgagacttgtggagagagtttccatcgctatgatcgatacctgaatttttcaaatcccattatcaccaagagttttgacccacatgcttgtgtttgggcttttggaatgaatgtgtttgacctggctgaatggaggcggcagaacataactgaaatttatcactcgtggcagaagcttaatgaagatagatcactctggaaacttggtactctccctccgggtttggtcacattctggaacaagacatttcccctcagccggtcatggcatgttcttggtctaggttacaatccccatgttaacagcagagacattgagcatgctgcagtcatacattacaatggcaacatgaagccctggttggagattggtctacccaagttccggagctactggtccaagtatctggattatgaccaatctttccttcgggaatgcaacatcaatccatgaaggaacctggtgcttttagtcccttctgacataaccaatagcctgttttctgtcgatgtgcgctttagtgtagtcagcatagtactctcttgctttagatatcagttgttaacaagatttcttattgcctgtgcttcttgtcagaccctttgcataattgcaggaatatctgttatgtttttagagtacatgctttggagcagggcaaactttagatagtgcaatgctcttatgcgatatcgcctttatgtactgaacgtttgctgcaatcctgtaatttggaagcaaactttcccaacaatttaataggtattcaattgggtatcatattgcattgcacccatgagtttgttgcgatgttgccctttcttttttggacagacggtaacagaacttaattgtcattgtacatattgaagtttgtgtgtcctattgaatacaatattgttctccgg

SEQ ID NO: 39049 - DNA, 2632 bp, Zea Mays
aagaattgtatctcgggcggacctacttcctcgactcctttgcgcatcgccgggcgtcctggtcttctgcgagaagcacacgaagcaaccggggcacctccgcctgcgcctcccctctcagctactctgtttgtacgcggccgcatccatttcgtctgcccaggaatggaggaagaatatctgcagtgagggactgaggggatcccaagttccaaacaaaactcaccgaggaaaatcattttccgacatggtgaggacgagaaggaggttggtgctgctgctgctcctcctcggcctcacggtgctttccccgctcgcgctctacactagccgcctctccgtggcgcttaactctataccgcgggttttccctggagagatcacgaatcagggccgtggcgtcaaggcagataagctgaatgcgcttcctctgcaaacagtgagctccttgaaagaacctgtcgacattgtcttctcagaggagctgactgaatctaagagccaaggtaggtgcgcacaagagccgcgtgctctctgaagtcacggttgctgatgatgatacatcatcgaaagataatgaagtgattgagcaagtaattacgctggaagcacaggatggtggcttggtgaagggagcaggtgtttcagatgagcaggagaaaaacattggatcactgcagcaatcttcttctgaggaaagttcacaggacactatgcctaaacagacacctgcaaaggttgttgcggagaactcccaatcagctagaacagacggtaaaactaaaaccactgttctacctgatatgcggatccgaaatatcaaggatcagttaatcaaggcgaaggtataccttggtcttggatccattagagcgagttctcaatatcttaaagacctacggcagaggatacgggaagttcaaaaagtgcttggtgatgcatccaaggactctgatctaccaaagaatgcacatgaaaaggttaaagcactggagcagatgctgattaagggaaaacagatgcaggatgattgttctattattgtaaaaaagcttcgagctatgcttcattcagcagaggagcagctgcatgcacacaaaaaacagactgtttttctgacacaacttgcagctaaaacccttcctaaaggtcttcactgcctccccctgagactagctaatgaatacttttcattggatcctgttcggcagcagttcccaaaccaacaaaatctcattaacccaaaactgtatcattatgcgttgttctcggataacatactagcaacagcggttgttgttaactcaacagtgttaaatgctaagcatccttctgatcatgttatccacatagtaactgacaaactgaattatgctccaatgagaatgtggttcctctctaatcctccggggaaagcaacaattgaagtacagaatattgaggagtttacatggctaaatgacagctacagtccagtactcaaacatcttgggtcccaatccatgattgattactactttggaacgaatcgtgcaaactcagattcaaacctaaaatatcgaaacccaaagtacctgtcaatcctcaatcatctccgcttttacctacctgagatttatccaaagcttgacaagatggtctttcttgatgatgacatcgtagtaaagaaggatctggctggcctttggtcaatcaacatgaaggggaaggtaaacggtgccgttgagacttgtggagagagtttccatcgctatgatcgatacctgaatttttcaaatcccattatcaccaagagttttgacccacatgcttgtgtttgggcttttggaatgaatgtgtttgacctggctgaatggaggcggcagaacataactgaaatttatcactcgtggcagaagcttaatgaagatagatcactctggaaacttggtactctccctccgggtttggtcacattctggaacaagacatttcccctcagccggtcatggcatgttcttggtctaggttacaatccccatgttaacagcagagacattgagcatgctgcagtcatacattacaatggcaacatgaagccctggttggagattggtctacccaagttccggagctactggtccaagtatctggattatgaccaatctttccttcgggaatgcaacatcaatccatgaaggaacctggtgcttttagtcccttctgacataaccaatagcctgttttctgtcgatgtgcgctttagtgtagtcagcatagtactctcttgctttagatatcagttgttaacaagatttcttattgcctgtgcttcttgtcagaccctttgcataattgcaggaatatctgttatgtttttagagtacatgctttggagcagggcaaactttagatagtgcaatgctcttatgcgatatcgcctttatgtactgaacgtttgctgcaatcctgtaatttggaagcaaactttcccaacaatttaataggtattcaattgggtatcatattgcattgcacccatgagtttgttgcgatgttgccctttcttttttggacagacggtaacagaacttaattgtcattgtacatattgaagtttgtgtgtcctattgaatacaatattgttctccgg

SEQ ID NO: 39050 - DNA, 2584 bp, Zea Mays
gacctacttcctcgactcctttgcgcatcgccgggcgtcctggtcttctgcgagaagcacacgaagcaaccggggcacctccgcctgcgcctcccctctcagctactctgtttgtacgcggccgcatccatttcgtctgcccaggaatggaggaagaatatctgcagtgagggactgaggggatcccaagttccaaacaaaactcaccgaggaaaatcattttccgacatggtgaggacgagaaggaggttggtgctgctgctgctcctcctcggcctcacggtgctttccccgctcgcgctctacactagccgcctctccgtggcgcttaactctatacaagcgcgggttttccctggagagatcacgaatcagtgagctccttgaaagaacctgtcgacattgtcttctcagaggagctgactgaatctaagagccaagaattgcgattgccaaaggtaggtgcgcacaagagccgcgtgctctctgaagtcacggttgctgatgatgatacatcatcgaaagataatgaagtgattgagcaagtaattacgctggaagcacaggatggtggcttggtgaagggagcaggtgtttcagatgagcaggagaaaaacattggatcactgcagcaatcttcttctgaggaaagttcacaggacactatgcctaaacagacacctgcaaaggttgttgcggagaactcccaatcagctagaacagacggtaaaactaaaaccactgttctacctgatatgcggatccgaaatatcaaggatcagttaatcaaggcgaaggtataccttggtcttggatccattagagcgagttctcaatatcttaaagacctacggcagaggatacgggaagttcaaaaagtgcttggtgatgcatccaaggactctgatctaccaaagaatgcacatgaaaaggttaaagcactggagcagatgctgattaagggaaaacagatgcaggatgattgttctattattgtaaaaaagcttcgagctatgcttcattcagcagaggagcagctgcatgcacacaaaaaacagactgtttttctgacacaacttgcagctaaaacccttcctaaaggtcttcactgcctccccctgagactagctaatgaatacttttcattggatcctgttcggcagcagttcccaaaccaacaaaatctcattaacccaaaactgtatcattatgcgttgttctcggataacatactagcaacagcggttgttgttaactcaacagtgttaaatgctaagcatccttctgatcatgttatccacatagtaactgacaaactgaattatgctccaatgagaatgtggttcctctctaatcctccggggaaagcaacaattgaagtacagaatattgaggagtttacatggctaaatgacagctacagtccagtactcaaacatcttgggtcccaatccatgattgattactactttggaacgaatcgtgcaaactcagattcaaacctaaaatatcgaaacccaaagtacctgtcaatcctcaatcatctccgcttttacctacctgagatttatccaaagcttgacaagatggtctttcttgatgatgacatcgtagtaaagaaggatctggctggcctttggtcaatcaacatgaaggggaaggtaaacggtgccgttgagacttgtggagagagtttccatcgctatgatcgatacctgaatttttcaaatcccattatcaccaagagttttgacccacatgcttgtgtttgggcttttggaatgaatgtgtttgacctggctgaatggaggcggcagaacataactgaaatttatcactcgtggcagaagcttaatgaagatagatcactctggaaacttggtactctccctccgggtttggtcacattctggaacaagacatttcccctcagccggtcatggcatgttcttggtctaggttacaatccccatgttaacagcagagacattgagcatgctgcagtcatacattacaatggcaacatgaagccctggttggagattggtctacccaagttccggagctactggtccaagtatctggattatgaccaatctttccttcgggaatgcaacatcaatccatgaaggaacctggtgcttttagtcccttctgacataaccaatagcctgttttctgtcgatgtgcgctttagtgtagtcagcatagtactctcttgctttagatatcagttgttaacaagatttcttattgcctgtgcttcttgtcagaccctttgcataattgcaggaatatctgttatgtttttagagtacatgctttggagcagggcaaactttagatagtgcaatgctcttatgcgatatcgcctttatgtactgaacgtttgctgcaatcctgtaatttggaagcaaactttcccaacaatttaataggtattcaattgggtatcatattgcattgcacccatgagtttgttgcgatgttgccctttcttttttggacagacggtaacagaacttaattgtcattgtacatattgaagtttgtgtgtcctattgaatacaatattgttctccgg

SEQ ID NO: 39051 - DNA, 295 bp, Zea Mays
ggagttgctggcgcgcgagtcgctggcggcgaagcaaaggagtggcaggacaacatcgtcaccgaggtcctaccggcgcagcggttcaaccccgccgaggagtaccaccagcagtacctcgagaagggcgggcaatctgccacctcgtcatctccttcgtccctcgttgtccagttgcgctacgactgtacattcgaatcaaaatacgacatcatcttcaacctaatcagtagattggaatgggacctgttcactcggatctgaagatgaagaaatcgaagaacatgtcactgag

SEQ ID NO: 39052 - DNA, 791 bp, Zea Mays
ttcaggtgaagtttcattgccaggaggaaaggtcgaggagggtgatgctgatgatgtagcaacagcgttaagagagtcaaaagaggagattggacttgatccagctctggtaactgtggttgcctctcttgaacacttcttgtccaagcatcttctggtagttgttcctgttgttggcatactgttagacagacaagcatttaaacctgctcttaatattgctgaggtagacgaaatatttgatgtacccctggagatgttcctcaaggacatcggaggagcgagaaaagatgggccagacattcacagttcattacttcacttatgagaacggaatccagaagtacttaatctggggtctgaccgcccgcgtcttgatccatgctgcttcagttgtatacgagcgaccgccagactttacagagcgaagagcgcatttcaaattgccaaagttcacaaaggactgctcttcaatgctagcaggacctgctaaacattagtgcacactgcctacgctgctatctcagctacatgctatttggagtacaggatgttgcaccaacatagtttatagaatcgaagagacgtccaaatcacttgatgtcatatgaatttagattctttcgacaaaacactatagtggcatttatgttcagaacaatgttcatatatgaattatgatgcaccacaaatcatccatgttgatgctgttaatgacatggagcacttgctcggatgcaataatgcaattggctcgtatatacacgtcagattgttctactgaatccatt

SEQ ID NO: 39053 - DNA, 719 bp, Zea Mays
tcaggtgaagtttcattgccaggaggaaaggtcgaggagggtgatgctgatgatgtagcaacagcgttaagagagtcaaaagaggagattggacttgatccagctctggtaactgtggttgcctctcttgaacacttcttgtccaagacgaaatatttgatgtacccctggagatgttcctcaaggatgagaacaggacatcggaggagcgagaaaagatgggccagacattcacagttcattacttcacttatgagaacggaatccagaagtacttaatctggggtctgaccgcccgcgtcttgatccatgctgcttcagttgtatacgagcgaccgccagactttacagagcgaagagcgcatttcaaattgccaaagttcacaaaggactgctcttcaatgctagcaggacctgctaaacattagtgcacactgcctacgctgctatctcagctacatgctatttggagtacaggatgttgcaccaacatagtttatagaatcgaagagacgtccaaatcacttgatgtcatatgaatttagattctttcgacaaaacactatagtggcatttatgttcagaacaatgttcatatatgaattatgatgcaccacaaatcatccatgttgatgctgttaatgacatggagcacttgctcggatgcaataatgcaattggctcgtatatacacgtcagattgttctactgaatccatt

SEQ ID NO: 39054 - DNA, 670 bp, Zea Mays
tcaggtgaagtttcattgccaggaggaaaggtcgaggagggtgatgctgatgatgtagcaacagcgttaagagagtcaaaagaggagattggacttgatccagctctggtaactgtggttgcctctcttgaacacttcttgtccaaggacatcggaggagcgagaaaagatgggccagacattcacagttcattacttcacttatgagaacggaatccagaagtacttaatctggggtctgaccgcccgcgtcttgatccatgctgcttcagttgtatacgagcgaccgccagactttacagagcgaagagcgcatttcaaattgccaaagttcacaaaggactgctcttcaatgctagcaggacctgctaaacattagtgcacactgcctacgctgctatctcagctacatgctatttggagtacaggatgttgcaccaacatagtttatagaatcgaagagacgtccaaatcacttgatgtcatatgaatttagattctttcgacaaaacactatagtggcatttatgttcagaacaatgttcatatatgaattatgatgcaccacaaatcatccatgttgatgctgttaatgacatggagcacttgctcggatgcaataatgcaattggctcgtatatacacgtcagattgttctactgaatccatt

SEQ ID NO: 39055 - DNA, 759 bp, Zea Mays
ccaaaatgcgcggtcgcgtgcactattcatccgcccaatgagctctgctctgcatccaggcgtggaaaatggaggccggcttgtggactcccttttcctccgcgttctctctctcccccgcactccaacgctgctttccaaatagttcgtcttcttcaagcacgagcgtcgcctctagttcctgtctgtggctccggccgtgttgttgtccatgtgatggaagcctgaccagagtgtaaacctcatcgggctagagagagattcccgggaagcgcatgatgctcatcgtcgacgattggtcgctcaagtcaccgctaagagggaagaagttattcaagcttaggatacatccaccacaacagatgaagccacagatgaaggtgcgagcagtgaaggtgcgagccgaagttggtaacttcgacaatggagaaaagcttcgagcgcaagccagcgaaggagaagaagtcaaaacttgcgcagcaaaaaagaaagggaaaagacgacaatgtccctgtatcatttgtaaatcatgtgtgtaaaccccatggacatgtatgtaattttctacgatgccattcaactttcttatatataggtgaacagtgccctacttaggcggacctttttgaagggccttagcttcattttgcttagcatccaaaacacctttgtattattttgtgccaaaaagcccaaggtatgtgtacatttgtttaacatgaatgaaaatgaaataaaaatgataaggcattcaagatg

SEQ ID NO: 39056 - DNA, 712 bp, Zea Mays
ctctgctctgcatccaggcgtggaaaatggaggccggcttgtggactcccttttcctccgcgttctctctctcccccgcactccaacgctgctttccaaatagttcgtcttcttcaagcacgagcgtcgcctctagttcctgtctgtggctccggccgtgttgttgtccatgtgatggaagcctgaccagagtgtaaacctcatcgggctagagagagattcccgggaagcgcatgatgctcatcgtcgacgattggtcgctcaagtcaccgagggaagaagttattcaagcttaggatacatccaccacaacagatgaagccacagatgaaggtgcgagcagtgaaggtgcgagccgaagttggtaacttcgacaatggagaaaagcttcgagcgcaagccagcgaaggagaagaagtcaaaacttgcgcagcaaaaaagaaagggaaaagacgacaatgtccctgtatcatttgtaaatcatgtgtgtaaaccccatggacatgtatgtaattttctacgatgccattcaactttcttatatataggtgaacagtgccctacttaggcggacctttttgaagggccttagcttcattttgcttagcatccaaaacacctttgtattattttgtgccaaaaagcccaaggtatgtgtacatttgtttaacatgaatgaaaatgaaataaaaatgataaggcattcaagatg

SEQ ID NO: 39057 - DNA, 1968 bp, Zea Mays
ctgctctgcatccaggcgtggaaaatggaggccggcttgtggactcccttttcctccgcgttctctctctcccccgcactccaacgctgctttccaaatagttcgtcttcttcaagcacgagcgtcgcctctagttcctgtctgtggctccggccgtgttgttgtccatgtgatggaagcctgaccagagtgtaaacctcatcgggctagagagagattcccgggaagcgcatgatgctcatcgtcgacgattggtcgctcaagtcaccggtaacagatccgggttgtccctctcactcgcttgaaatctcgccgatctgaatgccataaagcttccaaggttttcaattaggggtttattcgttcgggttttcgatgaactctgaggccgtgtccactcccttcaaactgacagcacgccctacaatttaaggcaaatcttcacagttttttttgttccccattaatcagtggtgtccacaacacctttgttacaactgcacacttaataatcctaaacccgcacgataggggcgggcccaggatttcaaggatggtattccgaatctcagtgaccacaattttcttggtagcctaaatttattatttatgaaaaacagataattatcctttatccatcgaacacagatatgatataatttgttgtccacgagtacgagtatgagtataaaggcatccattggtaaacatttcgtagatatgaatatacagtatccatacccgttacccgatgtgtatctgacattagtatatatctatatatgcgaacctatatgggtacaagtataaatctaattttgtcttgtagttatagatttgtaaactatatacttgtgtcctaaccacgcgattgttatccctagtcacacggtagggaaataaaaaacactagcgaaaagcgaagtttaggacaaaatagctgtaaagtagtgttattttatgttttgacaatattttagtgtataaacataatatatatagatataaataaattttgttgccagaaaataatgggtattcaattgaatacccttgcttctacatgggcccgcccctgccacacgacaccatagattccatgtcgaaatctaacgtgggctactactttgctaaacgtttataatggacctccaattttttttgttccccatacaaatttggacacagatgttgttgggaacatagccaaataactacctagctagagtctggaatataggaatgcacaaatcataccatctttcaccctacatagtactatttgatttaggcacatcgtacatgttcttgtcatattaagtgtcacctatgctcaagagttggtagtgtagataattttctctatgcaaatgcaattgttagagaccgcatttattctatgatggtattttttagtaccaacaatggacaaggaccccatcgaaatggtagagagcacagtgtgagtgatccagggaagccttgatatcattcgcagcctggtcactaatggtgttgtgaatctaagagggaagaagttattcaagcttaggatacatccaccacaacagatgaagccacagatgaaggtgcgagcagtgaaggtgcgagccgaagttggtaacttcgacaatggagaaaagcttcgagcgcaagccagcgaaggagaagaagtcaaaacttgcgcagcaaaaaagaaagggaaaagacgacaatgtccctgtatcatttgtaaatcatgtgtgtaaaccccatggacatgtatgtaattttctacgatgccattcaactttcttatatataggtgaacagtgccctacttaggcggacctttttgaagggccttagcttcattttgcttagcatccaaaacacctttgtattattttgtgccaaaaagcccaaggtatgtgtacatttgtttaacatgaatgaaaatgaaataaaaatgataaggcattcaagatg

SEQ ID NO: 39058 - DNA, 2990 bp, Zea Mays
caccgtacctttcttggatccgaagatcagaagaagctaggcttctcatcaggttacgaaggtgattgagttcatctgtggtaaggaactggagatctagatcgctgctgctgctgctagctagctagcagctagcaccatcacttcactagcacaaaggccaagcagcagaggagtctgttgcgttctcgggagcgcgcgcgcccactgatcgggagatcgatcgatcggcggccgctagccccaacgggcgggtgaagtacgtgcatccatatatggcgccgccgccgagctcttggtggggcagcgaggagcagcgcggcacgccggtggtggtgaagatggacaacccctactccctggtggagatcgacgggccgggcatgccgccctccgacaaggcccggggcaagaacgcgaagcagttcacgtgggtgctgctgctgcgcgctcaccgcgccgtggggtgcgtggcctggctcgcgggcggcttctggggtgtcctgggcgccgtgaaccgccgcgtgcgccgcagccgcgacgccgacgacgagcccgacgccgaggcctcgggccgtggccgggtcatgctgcggttcctgcgcgcgttcctgctgctctccctggccatgctggccttcgagaccgtggcgcacctcaagggctggcagttcccgcagcacctgatgccggggaacctgcaggagctggaggagcagctgcagcacctgccggagcacctgcgccacctccccgagaacctccgccagctgccggaccacctccgcgtgcccgagcggcaggagatccagggctggctgcaccgcgcgtacgtggcctggctggagttccgcgtcgactacatcgcctgggccatccagaagctgtccaccttctgcatcctgctcttcatggtgcagtccgtggaccgcatcgtgcaatgcctcgcgtgcttctggatcaagatccgcggcatcaagcctcgtatccccgcgtccgccggcggcaagccccgtggaggaactactggaaggaagagagtggacgacgttgagaacggtgacgccgacgacgaccgctacttccccatggtgctcgtccagatgcccatgtgcaacgagaaagaggtctacgagacgtcgatctcgcacgtgtgccagatggactggccgcgggaccggctgctgatccaggtgctggacgactcggacgacgaggtgtgccagatgctgatcaaggcggaggtgaccaagtggagccagcgcggcgtcaacgtcatctaccgccaccgcctgtcgcgcaccggctacaaggccggcaacctcaaatccgccatggcctgcgactacgtcaaggactacgagttcgtcgccatcttcgacgccgacttccagcccaacccggacttcctcaagctcaccgtgccacacttcaaggagaacccggagctcggcctggtccaggctcgctggagcttcgtgaacaaggacgagaaccttctgacgcggctgcagaacataaacctgtgcttccacttcgaggtcgagcagcaggtcaatggcgtctacctcaacttcttcggcttcaacggcacggccggcgtgtggcgcatcaaggcgctggaggactcgggcggctggatggagcgcaccaccgtcgaggacatggacatcgccgtccgcgctcacctcaacggctggaagttcatattcctcaacgacgtcaaggtcctctgcgagctgccggagtcttacgaggcttacaggaagcagcagcacaggtggcactccggccccatgcagctcttccgcctctgcatcccgaccgtctttaggtccaagatcccgttctggaagaaggcgaacctggtgatgctcttcttcctgctgcggaagctggtgctgcccttctactccttcacgctcttctgcgtgatcctgccgctcaccatgttcgtgccggaagcggagctgcccatctgggtcatctgctacatccccgtgctcatgtccatcctcaacatcctgccggcgcccaagtccttcccgttcatcatcccctacctgctcttcgagaacaccatgtccgtcaccaagttcaacgccatggtgtccgggctgttccagctgggcagctcctacgagtggatcgtcaccaagaaggcgggccgcacctcgtcggcctccgacatcctcgcgctcgccgaggccgacgcccacgcccacgcgccggcgccggcggccaagctcgtgcgcggcgtctccgagggcggcctccaggagtggggcaggctgagggagcaggaggccgccgagtgggccaacaaggaggacgccgccgcggctctggctgccgccgcggccccggccacgcccaagaagagcagcaacaaggccaagaagccgccaaaccggatcttcaagaaggagctcgcgcttgcgtgcctcctcctcacggccgccacgcggagcctgctctccaagcaggggctgcacttctacttcctgctcttccagggcgtcacgttcctcgccgtcggcctcgacctcatcggcgagcaggtcagctagccggccgccgccacagaagaataaacttaaattagcggccggctcggcatgcacggcctgcaagccacatgcacagggcatgcgtgcaggcggtgtaaccatgcatcaccgtggcagtggatcgacggatcggattaatttttagactttcttccgttaattttatccttttgatattttttgttcagagatcaacaaagagtctgtgtggtgaactctactcttctgtagctagtgcttctttgttggtatattgctagcgctactaggggaggcagtccggttgttccttacattcatatatcagtactacttcatgcatgtattcagtagccttgttttctttcaaacattacattatgatcgatatggtgtaacagaaacattttaatggataaatcaatcttgtatcctttcaaa

SEQ ID NO: 39059 - DNA, 3051 bp, Zea Mays
cactattcattcgaaccagtttgtccggaccaggacccgatgctgtcaaaaagtaagcagccacagtatgaaagggaagcgtttttccctttccttggggcgggtcggagaccaggcgccaggcggagcagagcgcgcggggcgcggcggggccggaacacgcgcgcactatgcccagcccaactgctacctgaccggcaccggcaccggcaccggcacgggctgtgcgacgctgccgcctttgcacgtgacgtgcgctctctgctctgctcccttggccgccggtgtgtactgtacgagtcctacgtccaaacagatgagaaggaagcgaagcactgcactgcacacgccgccttgggccttggctcggctggctgctcgcggctgcgctgcatattataaagcccgcgccagctcttgccgacccgagcgcagagcttgctgcttgccttgccttgcctttgcctgccaatccaatccagtcctgcacctgctcgggcggctagtagctggccaaagctccggtgccagcttcgactcgagtgcggttgcaggctgcctgtctagtcaactcgctcgccggctcgtcgctcctccagggagggagggagtgtgtgtgtgtctagcagacagagatagaatacgagagatagagagagaggccatggacgatgcagagagatcccaggcgccgcccgagagctgcgtggactggcgcgggcgcccctgccggccgcgccacggcggcatgcgcgccgccgccttcgtcctaggtgcgtgcgtacgtttccgctgcctctccctccctccctccctccctccctggggacggattattactgctactctgctcgtagcaccagtcaccagacccccaacaagtcgaagggcaagacccaggccgacgccgcgccggcgcccgggcaatgccgtgtatatacagcaacagattaagaaggcgtctggttgttgtgcgcattgcagtgttccaggcgtcgcagacgatggcgctggcggcggtggggagcaacctcatcaccttcgtgttcggggagctgcacttcccgctgccgcaggcggccaacgtggtgaccaacttcgtcggcaccgtcttcatcctctcgcccctcggcggcttcctctccgactcctacgccggctgcctgcgcacgctgctggccttcgccgccgtcgagctcgcgggcctggtactactggcggtgcaagcgcatctcccgcagctgaggtcggcgccgtgcaacatgctgaccatggagggcagctgcgagcgggccggcggcaccagggccgccgtcttcttcgtggcgctgtacctggtggcgctcggcgccggctgcgtcatgcccaacatgaccgcgtacggcggcgaccagttcgcggcgggggagaagggcgccaagcgcctctccacctacttcaacctctcctacctgggctactgcgtcgccgaggtcgccgcgctgacggccgtggtctgggcgcagacgcgcttcgggatggccgtcggcttcggcctcgccgccgccgccctgggcgccgggctcctcgccctcgcgtcaggcgcggcggtgtaccgcaacaagcccccccggggcagcgtcatcttcactcccattgcaagggttttcgttgctgcgttcagcaagaggaagcagatctgcccttccggctcctccaaccctgcccacaccgcggccggagatgcggcggctgtcgtcgacggcggcgacttccgccacgccaacaagttcaggttcttggacaaggcgtgcatcagggacgcggcggacacggtgccggagagcgagtggcggctgtgcacggcgggcgaggtgcggcagaccaagaccctgctggccgtgctgcccatcgtggcgtgcaccgtcgtcaccaacaccgtgctggcgcagctgcagacgttctcggtgcagcagggcagcgccatggacacgaggctggcgccgtcatccttccgaatcccgccggcgtcgctgcaggccatcccgtacgccatgctgctggcgctggtcccggcctacgagctcctgctggtgccgctcgcgcggcggctcacgggcgcgcgggccgggatcgccccgctccagcgcatcggcgtcggcctctgcctcgtcgcgctgtccatggcctccgccgcggccgtcgagcgcaggcgccgggacgccgccgtgccggcgtccggcgggcggcggcagcagcagctgtccgtgctctggctcgtgccgcagttcttcgtcttcggcctgtcggagctgttcaccaacgtgggcctcatggagttcttctacgagcaggcgtcgtcgaccgccgggacggcggcgcacatgcaggccttcttcatggccttcttctactgctccttctcgttcgggttctacctcagctcggtgctcgtgtcgctggtgaacagggccacggcgggcggcggccgccctggctggctcggcgacaacgacctcaacaaggacaggctcgacctgttctactgggtgctcgccgcgctcagcgtcctcaacttcttctgctacctgctgtgcgcgaggtggtataattctggtgccgccggctctgggcctgatggggctgcccccggtggcgaggtcgcctctgaggaggaggacgatggcaaggggctcatctgaacatcactggaacgaccatggcactaaaaagctgatgtatatggcaaccattcgtacgcacggcacatccctctcttcttacaaagcatatattatatttatataacaaggcctcctatatatacaagagccgtagataataatattagcatgcacacaaggttgccacgatgataggcttaagatgtcaatcgtgccgcatcgcattctcatccctgaactattcacacaaacgactacttgggcatagtgtttgttttttttggtgttgttgctatgcataggtgttttagagtgtgtttggtgcactagattgtggaaacttgtttgtagcttgtgaaattgtaaaagctaaacagaaactggcttg

SEQ ID NO: 39060 - DNA, 469 bp, Zea Mays
ccttgctggaggcacagaggtctgacgccgacctctcccctgtccattggagacctatgaagaactgcaacaacatttctgtgggtagaaagaatgctattgtcttgccgaatatcacagaagcggaagagacgacacacgtcaggctaaagcaccggttatcgtacatcgctgtacaaaaccagtctcatctttactgtcatcgctgatcgcatgtcataggctcgcagctcctaggtcttagatgttaccaaagaagtatcttttcatgagaacaatggatgtgatggagttctattctttattaaggtaatcatataactccaagataaaagggctagtttgacaaccctattttcaaagagaaattagttcattttttctggaaaaaatgagaatctcttagaaaaaatggagttgccctaaatatattgttaatttagttgactttattcttcctcaattaatt

SEQ ID NO: 39061 - DNA, 2647 bp, Zea Mays
aacaacctgaagaacggagttcccaaaggaaagccccacaaaacctcggttgctccccttggcccttgccatcctcgttcctatcgccagttcgccacctcctttgctctcgcctcgcgcgcgctcccccccgcgcatcgtgccgttcgccaccgcaccgcgccgatggaggtcgccgccgtgcccagatccgccgcggcctgccgtgcggcgcccctgctcccggccgtccgagccgctgcgtgccacctggccctgccccggcgcgcgttctccgcatccgtcgcggcggcaccggcgccgcgccgcctcgccgctcgtcgcgctgcggatggtgacagcgtggagacggcgccggaggcggtccccattgagaaaaggttccctcccttcccgagcgtcatggacatcaaccagatccgcgagatcctcccccacaggtgagtgccggaagcttgattcctcgtccttggggttgctcaaacatgtttggcattgcaatcccacgacacaactcaggttgatgcaacagcttgaaaatatttgacattttgaccatgcaattcctttgcaaatatgagtatacactgcttttaactctgttgttccacactcacacctctagatcccagcagttgtagtcatgtaaaggactagcggcccgtgttcatagagcatacgtctacacgttgttaatgttaagaggctatcccaggtttggagttgaagcattgacataatgagaacagtttagcagttttgtctccttgtgagctgatgtagagtcagtttgtttctaaacaatggaaagaaacaatcagaaaatgtgatgacagacaaggtggatagttgatgtaaacctgaaatctaatgcaacttcagtcgactgcttactcaaaagtccaaagaagagttttgatacaaaacccaaaggcttctgcaatttcactactgtcttagctgtggaggctgctggagtcaccacgattccatctccatatcaacccctgatacatagtactttagcctgcatttctttatggattccagatatttgatctgttttcttgtgctatatgcaactgtaccctggatctcatatatatctgtgacaagttttacttgctactgaaaaggatgctgtccaaaatggaaatcaagtagcatgcctcattgatttcatgatgtgttgtgctctagagatcgataagcattatcatttaaataaccatgcacctgtttaaaactatttaatacctatgcatgtgggtatgcatgttaggttcccattccttttggttgatagagtaattgaatacaaggctggagaatatgcagtggggatcaagaatgttacaataaatgataatttcttcccaggacattttcctgaacgccccataatgcccggtgtcctcatggtcgaggtatgcaccaattcattgtgttgctgatcatgtttagggtctggatcttactaacaattttgatatttaattgtccttacatcaccagaggtgatgatcccatttcctattctctagtcttttaaaacttgcataaataaataataatttgatacgcagctctcttgcatgttcaagaaagaaaaaaatgcaaatttttcatatgattatgttttatgtcgagttcaatggaagtttttctttctctcagatattataggcacataatacactgtcatatgcccatgtctccttaacagtatgtctttatttttcttttcaccttttctttgccattctgctgataggaattgatttcctcacaagttttctgatataaactgactattgtgaaccatagctacccaacatatggacatgtagcagtatgttcagcagtgtaaactttcatacaggttacgccatttgatctatgactgatgtctactatgtaatggaatctgaatcagtatattagattacccaaaccagctgatatatatataatgcctacattaatgcttagtttgtatcctgttgaccccatgcctggattcagtaactcacattagaaactatttgcacctttatccacaggctatggcccaggttgggggtctggtgatgctgcaacctgaagttggtggatctcgagacaacttctttttcgccgggattgacaaagttaggttcaggaagccagtgattgctggcgatacactgatcatgaggatgacactgactaagtatcagaagaggtttggactcgccaagatggaaggaaaagcttatgttggtggtgacctagtttgtgaaggggagttcctcctagtcagcgcaaccgagtagtgcaaagacacttcatgattctctgggaagaatcattggttggaatcagatctggttggatgtttgaaagaaccgagttttgaactaattatacaatcggcagttgaggcgatcctttacctgttcttaagcatgttgttgagtccatgtggtgatttctatcggttaccaagggcccaaggctgaatccacgccatgttatgttgcaattgaggattacaatatattgggtaattgtttgatggaataaacgataatgcttttgtagtttcttgccttttcttgcctgaaccttctcatttaccaggtgaccatacaaaattcttagtttc

SEQ ID NO: 39062 - DNA, 1646 bp, Zea Mays
ctcccctcaacctagcgccgccactcgcgcccaccacgccgccgcaccgccgctggtgaacggatctgtccatcccatacaccagccatgtcctaacacactgacacacacctggtggaggaggaggcgccacctccgtccgccggcggcgcaggggaggagccggccatcctcagggcggcgcggggctccagcaagctgcgcatcgaggggtcactgagcttcaagcgggcgcaggccgcactgcaggtggagaccgagatctccattcggaccgccgccatgcccgcgccgggaccgggacccctgcctaggggaacccccgagaggaacacacaacaacgtctcaccagtcagccaccaccgcgctccatttcctttctctctctcggctcctccgctctcttgcccgagttgctagcttccctgcccgcctcctcccgtccccatggacagacagccccccacctccgcttccatagcatccgagctaaggtcaactcctccgtcggtggagcgagagcggggaagagatgggagggtcccggatccgagctgagctgtgctccccgcgcgaccgacacccaggtctcgtcgtcccatgcaaatctgctcctcctcctgagataaggtgaccctgaccccttctttcttatacattggaaattataggccatccatggatccgtggcacacaggaagttaagattaatctagacatgataatctacaggcttatgagggcttacataagttcatcttctctacggaaatctgcattgagggctcttgcaaaggcactgacgacagatcaactcttctacctaagagagcagtttacattattcggtccaaacaagagtggccatatatcattgcaaaatatgaagacggccttgatgaaaaattcctcgggtgcaatgaatgattctaggattcttgactttgttaactcaatatgcaatatccaatatggcatgattgattttgaagagttctctgctgcggccattagtgtatatcaaatggaaggcctggagacctgggaagaacatgctcaacaagcatatgaattgtttgacaaggccgcacttgaagaaatcttatatcagtttgaggaaaaactccaagctgaaagagaggaagctactaggaagcaggaagagttgcaagcacaactacaagctcaacaggtcgcacttgaagaaaaccaaagtttgttgcgccaggcccaagaggaagtgaaggggatgcataccaagtttgaagagaccaatgcactgctacgagctgtcttgaaacttcagaaagattgaggtagggatgcataccaagtctgaggatgatgcctttgcttaaggtttttctaccttgctagaacatatctgtggttagaactttgtcagaactacgtgcaatctgtttgaatgcttcaaacctttgtggtggaacctttgtatgtttgaacctctgttgtggaagaactagtgtgctggaattgtgtatgacttgtgatgagaatgttgtgtatgatggcttttctgtgtattatgattctgtgagctatcatgagagctcagtgtgtcgtcactgtatgttcactgtatgtgggtgccataagtgacgatcccaactttaggtgacgc

SEQ ID NO: 39063 - DNA, 1789 bp, Zea Mays
ctcccctcaacctagcgccgccactcgcgcccaccacgccgccgcaccgccgctggtgaacggatctgtccatcccatacaccagccatgtcctaacacactgacacacacctggtggaggaggaggcgccacctccgtccgccggcggcgcaggggaggagccggccatcctcagggcggcgcggggctccagcaagctgcgcatcgaggggtcactgagcttcaagcgggcgcaggccgcactgcaggtggagaccgagatctccattcggaccgccgccatgcccgcgccgggaccgggacccctgcctaggggaacccccgagaggaacacacaacaacgtctcaccagtcagccaccaccgcgctccatttcctttctctctctcggctcctccgctctcttgcccgagttgctagcttccctgcccgcctcctcccgtccccatggacagacagccccccacctccgcttccatagcatccgagctaaggtcaactcctccgtcggtggagcgagagcggggaagagatgggagggtcccggatccgagctgagctgtgctccccgcgcgaccgacacccaggtctcgtcgtcccatgcaaatctgctcctcctcctgaggccatccatggatccgtggcacacaggaagttaagattaatctagacatgataatctacaggcttatgagggcttacataagttcatcttctctacggaaatctgcattgagggctcttgcaaaggcactgacgacagatcaactcttctacctaagagagcagtttacattattcggtccaaacaagagtggccatatatcattgcaaaatatgaagacggccttgatgaaaaattcctcgggtgcaatgaatgattctaggattcttgactttgttaactcaatatgcaatatccaatatggcatgattgattttgaagagttctctgctgcggccattagtgtatatcaaatggaaggcctggagacctgggaagaacatgctcaacaagcatatgaattgtttgacaaggttggaaaggggttgctgaaggactagaatgctcagaagcttgcgttgcagcactggctggaagcggtgagagaaacacgatctaaataaacagttttgtagtttacacatcctttttgcgaatctataaacagttagtttcatagtactagattttcaaaccgaaagcaagcaacctttcttctactggccgcacttgaagaaatcttatatcagtttgaggaaaaactccaagctgaaagagaggaagctactaggaagcaggaagagttgcaagcacaactacaagctcaacaggtcgcacttgaagaaaaccaaagtttgttgcgccaggcccaagaggaagtgaaggggatgcataccaagtttgaagagaccaatgcactgctacgagctgtcttgaaacttcagaaagattgaggtagggatgcataccaagtctgaggatgatgcctttgcttaaggtttttctaccttgctagaacatatctgtggttagaactttgtcagaactacgtgcaatctgtttgaatgcttcaaacctttgtggtggaacctttgtatgtttgaacctctgttgtggaagaactagtgtgctggaattgtgtatgacttgtgatgagaatgttgtgtatgatggcttttctgtgtattatgattctgtgagctatcatgagagctcagtgtgtcgtcactgtatgttcactgtatgtgggtgccataagtgacgatcccaactttaggtgacgc

SEQ ID NO: 39064 - DNA, 2229 bp, Zea Mays
gttgctgccagtacgaacaggatacgattatagcacggctccgttgcagacggggcctgtacttgagaataacccctccaagagtgcaaacgccaaggaccagattctttctggtacagagaatgtgactacaggcaatgcacgtggcgctagctccttgagatcgccaaacggcccaccagagaaggctagctctgtcggaaaagctggagagcaaccttatctctaccagcaaaatgtgtatgcaccacagccacaaccactctatcctggaggatacatgaacccttcaggacaatgggaggaatatccccattatgtgaatatggaggggctccattccgtatctcccggaatctacaatgacaaccagtccctcatgctatctgctggatatgcaaacaacccccaaatgatgtatggagcatattctcctgtttccactgctggagatggccaacaatacttccctgtgcactattccttctcaaatccttactatcaaccaccagcttctcctagcatgggatattcaaactccgcaactggaatgtcccaaggagaccctatgctgcagcaagagtatttccttcctgatggccttctatattcacccacaccagggtatcatcaaccattcagctcatttgacagagcactgacacagccaaataatgctcctgggttgtttggtcaagggagtctaccactggcttctggaatgcatcatggatcgatgtatggtcctggatcctacaagggacgccagtatggtagcaaatttggtggcactactccaagttggagttctgctggccgcagatttggtactttcgacttgagtggcaatcaacaaagggggagcatgtcatttggtagtcataatggctctctggagtttatgaatgagcaaaaccgtgggccacgtgctacaaaaccaaagatacaagacacagagaactcaggagatgagaaaagcgagaaaactgttcctctaattgatagtgaactgtacaatcgctctgattttatcactgagtacaaggatgccaaattctttgtaataaagtcctacaccgaggaccatgtacataggagcattaaatataatgtttgggctagcacagccagcggaaacaggaagctggattctgcttaccgtgcggccagagagaaagaagagcattgccctattttcttgtttttctcggttaatggaagtggccaattctgtggcgtggctgagatgattggacctgtcgattttgacagaagtgttaattactggcagcaggataagtggagtggccagttcccagtgaagtggcacataattaaggatgtaccgaacaaccttctgcggcacatcattcttgagaacaatgacaataagcctgtcacaaatagcagggacacccaggagctggaacagggcctccagatgctaacgatcttcaagagccatgaggctgagacaacaattgtggaagatttcgacttctatgagcagcgggagaaagccttgcaggagaacagacgtcaacagcatgctgccagcaccgatacccagaaactggtggataccaaggctcaagatgctgtggccgacatatcagatgcatttgccaaggccgtccagttgaagaatactgagaacagtgggacaacccccaaaactgagggtgcttcagctgaaaagggttccgctgccacagccaaggttgaaggaagtgcaaacctgaacacaggccctgtggaggaaagcagttgattcgtttcccttctatctgcaaatttggagcagcagatgaatagcatggtgcgatgtgaaggtcagaaaggggaaggtgtgttgaatatggtcgtgcccccgtcagttgtacaacatcataggctttcttttatggccatttaggttataaaatttcaatatcatagttccaaaattgttgttcccggttgtcttcgttcctgttctgttttgcttccgtcttccatgttcctgtgtcgtaccatgaatgatggttcaatttagtgggtttaggcataagaagctgcagaattatgccgcggtaaaagttgcattttctgcagctgaatgtgatactctgcactgtctccatccttgtgtaatttcagagatcctttctctagtgtatcttcgtcttgttgctttcaacatgtacagttctgccacattgcttcaaagaactcatgcatgaccatccg

SEQ ID NO: 39065 - DNA, 4802 bp, Zea Mays
aacacattggtgtcgatgcatcttttactcgatctcattgttagcagaagactattgatcttaaatatgtgccctcaaaatctcagttggcagatttcttcaccaaagcacaaacaagagcacaacatcaatttcacttgatcaaactcaaagcttcagatcctccatttccaccttgagtttgaggaggggtgttaaggcccattaggcctggcccactatctatatgtatataatagtccttagggactgggtaattatctatcaattctcaggtttgtaacagggatctcgtttggatattgattcaaaattggagtgaataatgttcctattgacaaaatagatagaagatatgaaacaaataactccaaggttaaccttcaactattttgatatactaaagatgcgaaagggcctctagctgagttggttaagtggtctgagtagcactccttaggtcctaggtttgactcttcatggaagtgaatttcaggtcgaggttaaaacaagtcactcgctggtttccttggttggcatgggtggaccgacctatggtagacgggccctcatgtaaggggctggtcgtgtgggttaggccccaaagcacgggtcaaggcccgaaccatagggggcaacatcaccatgtatgagggtgctagcttttctcgatcaggctcccgttgatcttttcttagtgaaatagtgtggggcggtctttcccccaccggccgagttttgatatactgaagatatttggatatcaacatatttggtatccttgttggttcctagcaagctttccaggaacaaggagccaagttggctccctttctacagaaatattattgctactcatcaaggattagatgagggattcctcttttgaaatcttgcaaagaaagaatgaaatagtcaatattacataatgacttcttgctccatcaagagtgtggcaaagcaccttggtttgttttcaagttggaaagttaagccacatcgctttggcgtcgactagttgtatacttgtcctatcatgattagacaatgactagccatgatttatcgatgagtacaaatctggagagcacatctcttcattttgggagaaagattacttggaaatggcagtgaagcatcaccactaacaattacagcccaatgtctaaaacacaattgacttcaagattgggaaagagaaaaactttgacgctcaaagtcattgcagcccaatgcctaatcaactcccgatgaaaattaagcatctagcttgcctctagccctctctaggccatgttattatgttgattcgcaagtgctattttttgacgtctaatcactaacatatcaatgattagaagaggatctggtatcatcttgctcattttgcatggccatctaaaaactaatcaagctacaactacaaggaatacaacaagggaggatagaacatttgaggtgcactcatgactcgtcaaacctactagcccaacaaagtaaccgagtatagacaaaaaatgcataagccctaatggtatggttgggggaataggagtttagaaatacatagtttgaaatctctcgtttattttgtggcagtgggagggactgttagggcacaaacgacatgtggttttaccatctatttaggttaaattaaccacaattaccttgctaaatgaggatacggaaagcctatcattgtctcacgaggcaatgagcctagctcgtgctcccagagactttcaccgacgttgtgtgagcgagcgtcattagtgcaagatcgagtgcaggcgcaatggcagcaaattgttcctctcactcgcgaaagcttccatgtagatgcatgttttgccaatggcaaccattgttaatacagaagggcacaaggttgtggccatgagctgatagggtgatggtgacacaaacataagcagatatacggcgcaaggtgatatatctacccttagtgttacatagaatagggtctatggaactaggtcccactagtcacttctcttaccaaatagaagatggatacatccacattgttatttgtgattagatgcatgccctacccatcagttgccaaatgcaccataaggctccccattaccaattattgtgtttggttgccaaagaaattacagaataataatcacatgaaaattctagatcatgtttgattgcaaaagaaattgaagttgccattgattcacacatcttgttcatattccgttcggcttctctccggccattgtcgtcgtcgccaccatggcagggaccatgatcattgttgggcccattcatggaacctaatgggaccaaagcttccttcgtcccataatgatccacctcttcttactctgcaaccccttcgcctttgcttgtaccaccacttctcaactatgagaacaaagaggacatggtggaccttgacgagaaaggtgatgccggtaaaggatctcaacaatatcaacttgcctgcacaatgcttgacatcaccaccatctcatggatggagaggacaactataacagaaacactgacgcccaagcgggcgagagggtgtggcacaaatgttttattgctagtgccaatgaggacccgaagtcccgaaccacatcttgggtggctaatttaaatggtaaccctcaaaattatggcctacctatttcaattccaatccaacttaacaaccaaacactcaacatgaattgggaccattcccattccacaaagtggggctcaattcatgggaccaaagcttctccaatcccatattgctccacctcttcttagtattgcattgccaacccttgactccaatatccctttgcctctactgccacttctctcaactatgagaatgaatacaaggacatggtggatctaggtgggaagttgatgccaacaaaggatctcggcactaccaatttggccaccacaatgcttgacatcaccatctcatagctagagacaccaactattacatgatttcagagacaggtgggtgtcaacaaggaggtgcaaatgttggccgtggcagcaccagaatcaccaaaaagtggagcttacggggcagaatgtcatcatcactgaagacgagggccacatctgtgttgaacaattcagacgatgaccccaaaattatggcctacatattttagttgtccataattcaaacacatttcaagtccagtccaacttaacaaccaaagactcgaaacgaactaggcccatcaattcaaagttgggtccaattcgtgggaccaaagcttccttcatcccacactgccccacctcttcttactgttgcattaccaacccttgactccactacccctcacctttgcctctaccaccaattgaacctggagcaactgatcacagaatgacaaattcagcaaaggtagcataattaggccaatatgaggcttcaattgcagcatggaggcgtcaactgaccactgatctaggtcaatactgttgaagtgtataaatggattggccaccttctcctatcagcttaagcttttgggttgaactggttagttcgtccactctaacatgctatcaaagccagaggcctcgagtttgaattctggcaaagactttatttgtgcctccacacatttatttccatgtttgcgcctttctctctggctgcacgtgagtgtgggtgttgaagtgtataaatggattggccaccttctactatcagcttaagcttttgagttgaactggttagttcgttcactctaacaaatattgtgtggttgccaaccccaacaccaattactttgcattttgcctaatgcctaatgcaactaggggcatgttaaacgcctgtatctacgaaccttcccttctcatcaaccgcctttaattaagcgagatgttatcatgcatcacatgattgtttaaattgcacttaataagacaacaaaataaattaaatttgtaagtgagaaaaaaagacagaaaacatattcctgacatgcaattaaattggctttaactagaagagatgctatcatgcatcatataattacttatttatccttcatacactaacaaagtcatatttatgttataagtgaaaaatacttgtataaaacattgaattaaaccacctcacatattctggagctgagggagatcaaatttccttgaccaacaagtagaagctaacataactttaagttataactaaaatacaaaatagcatgttggatctatagtatttacaaatgttcctaaaagacatactttatggacctcttggcagaaaaatgctagttcataatatcagaaaaacgcagtgaaagatcaaatcacaaccataaatagcaatagttattaatcattagcatctgtctaaaatagcacatccaaaaggtaagggagcataaagattcctaaaatagcacccctactttaatgttcctaagtactccaaagcaatatgtggaataaagttggtagttctagagagcagaagcatgcatatttcacatgcaaaaacacattcttgtacaatcccctactcaaagcatgccatgcaaaaaagaaataactcgattttggagaaacagacccaaaaaagtacattaaactattaagtctaacaaaggaacaatgaatatagctagtaaaagttatttgctttcacagtaccagtcattagcatattacaggcaaagaatttaacagaaagtgtaagtaaccacataaactgcttattcttgccttatttaaataacataacaactgattgaaataaacatgacaaaattaag

SEQ ID NO: 39066 - DNA, 1737 bp, Zea Mays
cttccgtgaaagctgatacaggcctgtacccgccattgcaacgttaacactgaaaaggttccagtttctctgcaacaatataaatttccatggcaatcaggtaagcaccaactaacataccaaggctactatattagcaattaacatattaggcaatcaaatcggaaaaccagatgtaaggacaccaatactatctcagctatgaaaaaacaatcatgcatcactgcataactatgagctcatttcgaagtgtgaaagggcctctagcgtaatggttaaggtttccgagtagcacctccaggtcctgggttcgatccccctcgggagcgaatttctggcttggttaaaaaaaaaacctcgttgtgccccgctcgctcccgggttacgtcctgcgcgccaccctccggctgagccgttgcagagtgggcggtgacggcccgctagtgatgggggtcagggttcggggattttctcggccgggatcatgtttcggtctcttcttaatataataccgggagggcggtctttccctccccggccgagttttttttagctcatttcgaagtcataaataatcaatcaagtgaaaaaaggttttttatattgtctattaagagtccaaactcctaaggacaataaattttatatagataatcagtatgtttaaaatgtttgttgtacgtagagtacaaacacatcagaacaagaattgttgttcactgagatgattagtcttgttgaacatgtgtgaagaagacagaagtatcaagcataaactatacaagcaaatggatatcaaattatcaaccaagttctcatcccagtcccagtacttcaaaaatacacgtccaattcccaaaaattgtattattgtaccatcccagtccatcctctccccacatcgtgttgcatatgcaaacctagcttcctaggacctgcttcaacacttggcggcccttgtcatgcttgccctaccacatgtctcgggctctcggcccttgtcatgacatcagaccatgcctcacgacaatcgcgttcaacaccaccaccgcactctttctactccctcttcaagcaggagctcatgctcattctcatcatctcttcgcacttagggcttgtttggttctagccctaacaaacctgcctgggccaggcagctccccaaggacgttgattttgagcgcagcggctggatcgaccttcctagccgagcactcccaggccaggttggcaggttctgaaccaaacaggcctttagtcccacactcccaaccttcctcacctcccttgacaacgataggaccatcgctgtagtgcactagggtgagtggagcatgtggcatgacggcgtagcggacacgacatggcctaacgtggcaacatggatacggcaccacacagatgatgcaacataggcaggcgcatggtaggaggtcgagcatggtgagtgctatgtggctacatgggcaaggcaggcatgtgtggtttggcgaaggtgatgactatggtacatgggtggatgggaccataatgttacaacaatacaacttcaggggcctgagtgtgcaatttaaaagtaccgggacctgcatgagaacttgggtcaagtttagggggctaaatgcataatttagaaggatggggacctggatgaggacttaggactcgtttaaagagctaaatatgctatttaaaagtatcagaacctggataaggacatggggcaagttaaag

SEQ ID NO: 39067 - DNA, 735 bp, Zea Mays
atggacagtgattgcaaagcactgttccttaccgtaacgccgatcaaactacttgtcgccagtgacgacgacggagtacaagcactcgagcagaactgcccgggcgagcaaggggcgacaacgtgtcgagtttactacaagccaaagcgcaacagctccgggcaagaaatggcggcagcagatactgagggtcgagtgcttcgcccacggtcagccggtcaggccacagttcggatcggcatagctaaggatcaggtgctgtgctgccgcactcggaccagaaatgttgtggggaggaaaacatgctgctacggcaagcaacaaccgggcaaaatcaattccaccacgaaccggggcgcacggaaccccacctcagcctgcgcaggcgcagcccagcaggagctaagattaaggctcgatcgccgtcgctcagaggaacaaccgaagccacaggcacagaaacggacacaaacaacgaacacaaacggaacgatcggcgcaggtggcgccctgtcccccgcgcacaacccgatacggaacaaaacagcgcatgcggagggagaggagagaggaggagggtgggtcggtttattacacttgcttcgcctccggcgacggcggaggaggggagccgagtcagcgaggagaaggggggctcgggcacggtccgatgcggcggcggtcgtctctttcgcgaatcgatctgctggcggtggggatggtgggggttcttga

SEQ ID NO: 39068 - DNA, 2768 bp, Zea Mays
agtatgtcaacaagatctgaaagaaactcaacaacagaacaacattaacattacatactcgtatttgagtttgccttcatgcacaaggcccaagaggtagtcaatcattcttctgcagtcttctgttttgtctgagttcagccacttctggagccagaaccctcgtagggatagatcctttcaaaacatctctctcagtgtattaaccaaattttagacatttagaagcaaaattatataaatgataggaactcaccatcccttgtacacaatgtgaaaccatctatcaaatagtttgtttgtgtcgaatgattaatcacgattaatcacccttacggttcctaccacttgtttaggtactctgattcggtcagagtgattagaagtgtccgatcaatttatcacagttaatcgtcgacttatcgcaaatcgtgataatgcgaccatgtgccctgaccaactagacttcaaataggcagatatgctggggtagctctgtttgggccaagaccattagtgtttctcttttatacctctcccactcttttccttgcctcctcagtcctcactcctcaccccgcagcctccagatgtcagatgcagttgctgtgtgtgcaactgcatctcttcccctcctccatccttcctcggtctatgtcagtaccacaccaaaaagaggaacagattggagcacaagaggttaaataagttggtctatgtcagttactacgaaaatatatcaaacaggtttcaaaaaattaaaaaggttggttgcaaaggacagaagagcaaccctctcatgctagatgaatttcagtgggaaaatgaatgggttgatgagaattgtgatgaattgacttggggtgggatgaagctattggtgcatctgacaatctatggaaccataacttgcctatggcttctgctgctcgtgcagcagcctccgtcagccagacgtatagcaggaagcgcccaaggattgctgcagctccagatatcactgaagaagacgacgatgaccatgatgcaagagatgaagcacaagatcagatgcgtctaattctgaagtaggcgaaagggcctctagtgtaatgattaaggcttccgagtagcacctcctggtcctaggttcgtttaccctcggggacgaatttctggtttggttaaaaaaaaatctcctcactgtgccccgcccactcccgggttacgtcctgcacgccaccctccgactgggccgttgcgcagagtgggcggtgacggcccgctagtgatgggaggccagggttcggggattttctcgaccgggaccatgttttagttcttcttaatataataccggaagggcggtctttccctccccggccgagttttttttttaattctgaagtagaaatggaggaggatgtacttttttggatctggattgagcatctaccgctgtaatgctactgtcacactattcttttacatctacttactcaagttatctgttattcctgcataaaatcagcaaacatatggaagctaggacaagaatatggagttctgatcttctggacacttcacaaatcacatctcacagatatgaaaccaactaaccagaaatagtctcaatgctctatttctactatataagtatatagtatatggtatatatagtagtgttattaaaactacgtttaaacgtcaaaactctaattagagattgaaaccgtgttttgacgtattggcgttctaaactgtaaaatgcagtttcatgcgttttagaccattagctacttttgggcccagtctgttagttacttttggatccaatccggcccagtctccacacgcttgccctactcccctaccatgaagcccaatggctagtagcacaccgctctgctctctatcatcaccgccgcctgaaggtgttgttgctgtcggctgttgcaccttgtgcgccctctccctccgcgccgagtgtgccctcctttcgcgacgtgtgcagccgcttctccgtgccatgtgccgtccatgccgctcctctcccttcgttttgccctctccctctgtgctgccctctctccacgcttctgtttgctagcagccggtggccaacacccagcagtcgactcctctcatcctctctacttttgttttggtaagctactaatctctctgttttggtatttaacttcatgttattgtctgaaattatgatgatatattggtatttttcctatgtcgtttaaacttcatccatgaacattttatcgttttaataacatacatatatgtcctattaaatacatgatgattatatagatgattgaggttgatcaatcgtcctggtcatcgactaatcatcctggtcggtaccagggcgactagcgatgactagcagatataataacattgtttgtctcaacatgctcatacttcagcactagtttcttaccattgtcatctgagagtaacattgctcacataaaataggcagtttactataataacatttacaacgtttgaagtggcctaacaaaataagtagagtaaaactgcagatgcataaagtctcacaagcagggtcttctgtacagaccttaaaaatgaaatatgaagtagggacagtgacaggtctcttggacattccaccatatgtcaccatggtgcctccttgcctacagaacaagagttatgtctatgcgtgggagaaaaaggattattctagttgtttttccaattcaaaacattacttcaaaagcttgagtattagagaagca

SEQ ID NO: 39069 - DNA, 2056 bp, Zea Mays
gttatttataaatatccgccactggacttggagacgaacctgcggcgacctcaacctttcagacaacagcacagcacggatcatgaagcatcaatcacggatccgacggctgggcgtgggcgggcaacgaagtacgcgggcgcgtcccacgtgagccacgagacggatccgagcgaaccagcggcggagcagacacggtagctcacgcgcctcacgcgccgacgcacaagaaacgaagaaacggccgccgaaacgcgcttggttgggggcggcgccccgggcccccactgcccccacgtacgcccaagcccggtccacagacagatcagacctcaccttccgtgcgtctgctctcctcctcccacactccacctcaccctgcctgtcaccgtccgccgccctcccttggtcctgtcccgtctgtgtatatatattcccgcgcctcgccagcggcagcggcattcccattcccacccgtccatccatcctccgaagctcctcggcagacaagcagcagcgagagaaagcaagcaaggcagaggcagttgtgttgctggtcggtccgtccatggcgcccaagagaccagtgtcggcggcggcggcggcggagcagccgaggctgcgcggcgtgcggaagcggccgtggggccggtacgcggcggagatccgcgacccggtgcggaaggcgcgcgtgtggctgggcaccttcgacacgccggagcaggcggcgcgggcgtacgacgccgccgcgcgcaagctccgcgggcccggcgccgccaccaactaccccgccccggagccgacggcggaggcgttggcggaggctccagcggcgagcgggagcgggagcgccgtggtgtacgagtcgtcgtcggcgtcggcgtcggcgtcgtcgtgctccctgccgctggcggccccgtcgctggacctcagcctggcgctgccggctgcggcggcggccgcagagccgtaccagctgttcgcggacccggcggcggcggccgccgtgacgccggcgctgctgcacttcttgccgcccaagagcgaggagcagcagagctactctgggtcatcgtcgctgtcctcgtcgtcgtcgtctgtagtgttcgacgcggcgccgcccgtgggcctgcggctggacctcaacctggcgctgccgccggccgagatggtgatgtgattgctgccgtccaggaggctaatcgattgctcagttaattagtcaccattagtagctaatcgatcaaggcagccgtcaggcagaggtgtaaataggatgcagatttgctcggttttcgttgactgtgatggcatggtttgtttcttcgctgcgagtcacgcaacaatgcaaaagcaaaatgaaaagagagagggagagggataattatgccccagcggctctcattttattccctggattcacttctgagctctcgttttattttttactcgacccgcttctgaaacctctcaaggtctgagagctgaaccgtaacgtgtcacgcagcgtggagttcgcagacgcaggcacggggacgccgacgacagcacgaatggatggatggataccgtagagcagctacagccacatggcccacatgggcatcgcagaagcatcgatcaatagactgggagcgccgccgccgcctgaacgcgtcgctgggcggctgggcaagcacggtgaggtttcgctgcaggtgcgtgcgccccatgtcggcagggaggaataaataaatttattattggtacggcgggcggtggggaggggcgccgggcgcgcgcgcggcagacgcggcaccgcccagacctgactgacgacatttgcgtggcgtggcgatccggttgcccgttccacctcccacctccacagatggcagacgccagcaggggatgcacgcgcgcgtcgctttcggggaaactccagcaggcaactacccacggaggccggaggccagagcagagctggtggcaggagctccaccgctcatcggccccacggcgcgtggcgtagcgtagtgtggctgttggacccgcggccgccgcgagcgctcgtgtg

SEQ ID NO: 39070 - DNA, 1731 bp, Zea Mays
caaatattctagaattgaagtacataataatctgtcgtgacaatctactcagtgcctatgccgtgacattccctttctaccaagaagccaactcgtaaaagagacctcaccagataagctacgacagcattttaacatcgtttgaagtaggaacctcacccagattcattgaaccgccagctctgccatcttatccttgccacgtgaagtgacgttcttggcgaccccatcaatctcctcgatttggatgtccacgagcttattgagctgttgctcctgcgtcctgagatcctctggctgctgctcaacaacgcttcctgttagttccagaggcactgccaaggatctcccccttcatgaggtcatatatgcaggccctgaagttgtccatgctcttatgatcctgagagtcgaggcttaggaagatcagaatttcccagcaccggaggaactgtttcttctttatcttcagcttctaacgaacagtctccatcaggtcagccggtggaaccattctcaaactttgggccctttttgacaggttggtctccttcagagacgagacaatagcaccaagtgcaggtttgatcggatcaaacatgagcaaacggaggcagtcaacggatgatctcacatactgcaggtcaagaagcggaaggcgcgggtgcctctcgacgtcgccgacgccgtgatggagccagtacggcggtccggccggctcgccaacctcccggataagcccgtgtaccgcgagaaggttcccgattttgggatgaagattaggaggacgtacggatcggtgagaagagatctgaccaaccgggtgtacgcgaccgacgatgcgaggagctacgccatctctaaggcggaggatctggagcaagagctggactccagcttccccatcttcatcaagcccatgacccagtcccatgtcaccgggggcttctggctgggccttccgattcatttctgccggaagtatctgcccaagcgtgacgagatgatcaccctggtggatgaggatgatgacgagtccgacacgctgtacctcgcaatgaagcgggggctcagtgctggatggagagggtttgccgtccagcagaagctggtggatggagattgcctggtcttccagctgattgagcaaacaaagttcaaggtctacataactagagcaagttcctactacgaaagcgaggactgatgaaactagtagcttgtaatctggtgattggagctcagttatggaggtggctgcgttggacaagcttgcatctgggaatcgctggggtgtcttgaaactttttggtggcagaaagttagctgatagaattgcggaggtcgtggagggaagaggtgagacgacgagggactgggtgccaccgccgaaactgtagtcatcgctggagaggaactggccattgctgttgtagcctgcaggcgcaggaggatgcggcggcacagacaggaggggcagactctgttgtatggttttcgcttagatttttttggtagcagttgtatgttctatatacaaactaccccttcttcttgagaggagagagtgcacaccccttcatcaaattgaatagcacgtatgtgtaccgctatctccagcagcttattagctcctatttcttattttaaactccactgtatacagtacaaaacactatatacatggtcctattggccatagcttagtaaccaggttttcggatcaatgag

SEQ ID NO: 39071 - DNA, 2304 bp, Zea Mays
caaatattctagaattgaagtacataataatctgtcgtgacaatctactcagtgcctatgccgtgacattccctttctaccaagaagccaactcgtaaaagagacctcaccagataagctacgacagcattttaacatcgtttgaagtaggaacctcacccagattcattgaaccgccagctctgccatcttatccttgccacgtgaagtgacgttcttggcgaccccatcaatctcctcgatttggatgtccacgagcttattgagctgttgctcctgcgtcctgagatcctctggctgctgctcaacagtttgttcatcctcatccccaatctcatgtgtccaatacacagcaaaagatgcctccttattgaaactggttggcatctgcaacagacgcttcctgttagttccagaggcactgccaaggatctcccccttcatgaggtcatatatgcaggccctgaagttgtccatgctcttatgatcctgagagtcgaggcttaggaagatcagaatttcccagcaccggaggaactgtttcttctttatcttcagcttctaacgaacagtctccatcaggtcagccggtggaaccattctcaaactttgggccctttttgacaggttggtctccttcagagacgagacaatagcaccaagtgcaggtttgatcggatcaaacatgagcaaacggaggcagtcaacggatgatctcacatactgcagcaataacaatatacacaaagacgggagagagaagagagatggcggaagcgacgccgtacgaggagcagcggcggaggcaggtggaggcgaacaaacggaagctggaggagctgcagctccaccacctctctgctgccatcagagaggccgccgccgccgccaagccctcgctggtcaagaagcggaaggcgcgggtgcctctcgacgtcgccgacgccgtgatggagccagtacggcggtccggccggctcgccaacctcccggataagcccgtgtaccgcgagaaggttcccgattttgggatgaagattaggaggacgtacggatcggtgagaagagatctgaccaaccgggtgtacgcgaccgacgatgcgaggagctacgccatctctaaggcggaggatctggagcaagagctggactccagcttccccatcttcatcaagcccatgacccagtcccatgtcaccgggggcttctggctgggccttccgattcatttctgccggaagtatctgcccaagcgtgacgagatgatcaccctggtggatgaggatgatgacgagtccgacacgctgtacctcgcaatgaagcgggggctcagtgctggatggagagggtttgccgtccagcagaagctggtggatggagattgcctggtcttccagctgattgagcaaacaaagttcaagtgctgaccatgcaacttatgttgggcaaatggtgcaggtctacataactagagcaagttcctactacgaaagcgaggactgatgaaactagtagcttgtaatctggtgattggagctcagttatggaggtggctgcgttggacaagcttgcatctgggaatcgctggggtgtcttgaaactttttggtggcagaaagttagctgatgtatgaaacccagtatctcctaccaattgttgctgatttgtgtacttcttgggcttaccacttgcacggttcagaaacctgcactatgtaagggggttgttggtggcagctaacctcgttttgtaaatgattggtgcccgtccatgtttctcttagcgttcaatctggcctgttagttcaatttttaatagctacttccatcatgccaccagtattggctttgtcaactgggctaggctggccatttctcattgtgaggaacatggttgatgggcagagaattgcggaggtcgtggagggaagaggtgagacgacgagggactgggtgccaccgccgaaactgtagtcatcgctggagaggaactggccattgctgttgtagcctgcaggcgcaggaggatgcggcggcacagacaggaggggcagactctgttgtatggttttcgcttagatttttttggtagcagttgtatgttctatatacaaactaccccttcttcttgagaggagagagtgcacaccccttcatcaaattgaatagcacgtatgtgtaccgctatctccagcagcttattagctcctatttcttattttaaactccactgtatacagtacaaaacactatatacatggtcctattggccatagcttagtaaccaggttttcggatcaatgag

SEQ ID NO: 39072 - DNA, 1904 bp, Zea Mays
caaatattctagaattgaagtacataataatctgtcgtgacaatctactcagtgcctatgccgtgacattccctttctaccaagaagccaactcgtaaaagagacctcaccagataagctacgacagcattttaacatcgtttgaagtaggaacctcacccagattcattgaaccgccagctctgccatcttatccttgccacgtgaagtgacgttcttggcgaccccatcaatctcctcgatttggatgtccacgagcttattgagctgttgctcctgcgtcctgagatcctctggctgctgctcaacaacgcttcctgttagttccagaggcactgccaaggatctcccccttcatgaggtcatatatgcaggccctgaagttgtccatgctcttatgatcctgagagtcgaggcttaggaagatcagaatttcccagcaccggaggaactgtttcttctttatcttcagcttctaacgaacagtctccatcaggtcagccggtggaaccattctcaaactttgggccctttttgacaggttggtctccttcagagacgagacaatagcaccaagtgcaggtttgatcggatcaaacatgagcaaacggaggcagtcaacggatgatctcacatactgcagcaataacaatatacacaaagacgggagagagaagagagatggcggaagcgacgccgtacgaggagcagcggcggaggcaggtggaggcgaacaaacggaagctggaggagctgcagctccaccacctctctgctgccatcagagaggccgccgccgccgccaagccctcgctggtcaagaagcggaaggcgcgggtgcctctcgacgtcgccgacgccgtgatggagccagtacggcggtccggccggctcgccaacctcccggataagcccgtgtaccgcgagaaggttcccgattttgggatgaagattaggaggacgtacggatcggtgagaagagatctgaccaaccgggtgtacgcgaccgacgatgcgaggagctacgccatctctaaggcggaggatctggagcaagagctggactccagcttccccatcttcatcaagcccatgacccagtcccatgtcaccgggggcttctggctgggccttccgattcatttctgccggaagtatctgcccaagcgtgacgagatgatcaccctggtggatgaggatgatgacgagtccgacacgctgtacctcgcaatgaagcgggggctcagtgctggatggagagggtttgccgtccagcagaagctggtggatggagattgcctggtcttccagctgattgagcaaacaaagttcaaggtctacataactagagcaagttcctactacgaaagcgaggactgatgaaactagtagcttgtaatctggtgattggagctcagttatggaggtggctgcgttggacaagcttgcatctgggaatcgctggggtgtcttgaaactttttggtggcagaaagttagctgatagaattgcggaggtcgtggagggaagaggtgagacgacgagggactgggtgccaccgccgaaactgtagtcatcgctggagaggaactggccattgctgttgtagcctgcaggcgcaggaggatgcggcggcacagacaggaggggcagactctgttgtatggttttcgcttagatttttttggtagcagttgtatgttctatatacaaactaccccttcttcttgagaggagagagtgcacaccccttcatcaaattgaatagcacgtatgtgtaccgctatctccagcagcttattagctcctatttcttattttaaactccactgtatacagtacaaaacactatatacatggtcctattggccatagcttagtaaccaggttttcggatcaatgag

SEQ ID NO: 39073 - DNA, 1824 bp, Zea Mays
gtgattatgagaactcaaaaagacgacagtcacaataaagcaaatagacaaaagggacatcgattttactcgtggttcggctaatgactactccacattgtaatgacatcctttgggtcaagggttgcactcaatatgtgatccaaagattaaacctaagtgctatatttttttcctcatatcaaattccgtttgtgataaatctttataagttagagtctcccacatcttacataaataatcttaataaaaaacggagtaaaaaaacacaagaacataaccgcagcaataacaatatacacaaagacgggagagagaagagagatggcggaagcgacgccgtacgaggagcagcggcggaggcaggtggaggcgaacaaacggaagctggaggagctgcagctccaccacctctctgctgccatcagagaggccgccgccgccgccaagccctcgctggtcaagaagcggaaggcgcgggtgcctctcgacgtcgccgacgccgtgatggagccagtacggcggtccggccggctcgccaacctcccggataagcccgtgtaccgcgagaaggttcccgattttgggatgaagattaggaggacgtacggatcggtgagaagagatctgaccaaccgggtgtacgcgaccgacgatgcgaggagctacgccatctctaaggcggaggatctggagcaagagctggactccagcttccccatcttcatcaagcccatgacccagtcccatgtcaccgggggcttctggctgggccttccgattcatttctgccggaagtatctgcccaagcgtgacgagatgatcaccctggtggatgaggatgatgacgagtccgacacgctgtacctcgcaatgaagcgggggctcagtgctggatggagagggtttgccgtccagcagaagctggtggatggagattgcctggtcttccagctgattgagcaaacaaagttcaaggtctacataactagagcaagttcctactacgaaagcgaggactgatgaaactagtagcttgtaatctggtgattggagctcagttatggaggtggctgcgttggacaagcttgcatctgggaatcgctggggtgtcttgaaactttttggtggcagaaagttagctgatgtatgaaacccagtatctcctaccaattgttgctgatttgtgtacttcttgggcttaccacttgcacggttcagaaacctgcactatgtaagggggttgttggtggcagctaacctcgttttgtaaatgattggtgcccgtccatgtttctcttagcgttcaatctggcctgttagttcaatttttaatagctacttccatcatgccaccagtattggctttgtcaactgggctaggctggccatttctcattgtgaggaacatggttgatgggcagagaattgcggaggtcgtggagggaagaggtgagacgacgagggactgggtgccaccgccgaaactgtagtcatcgctggagaggaactggccattgctgttgtagcctgcaggcgcaggaggatgcggcggcacagacaggaggggcagactctgttgtatggttttcgcttagatttttttggtagcagttgtatgttctatatacaaactaccccttcttcttgagaggagagagtgcacaccccttcatcaaattgaatagcacgtatgtgtaccgctatctccagcagcttattagctcctatttcttattttaaactccactgtatacagtacaaaacactatatacatggtcctattggccatagcttagtaaccaggttttcggatcaatgag

SEQ ID NO: 39074 - DNA, 773 bp, Zea Mays
catacattagagggaaaataataattttataaataagcactagaagccgtcaaggcaacaatacaatacaagcaggtcatagacgatagaggaacaacttatctgctggagcataatagtgagcttaccagccaaacagaagccgcacggtcgaacaatgctggcaatcgtcacttcagctagacttgtttacctgctgaacataacgaaaagtttttgtggcgtgtcggacacacctacacggccgtagatggtagaaacaagcagtaaaacagcagcattgtccaaaagaaagccgctgaggtcaatgctgatgagaacgagaacccaatccgagcacacaaggagggtcaccgattaggttagcaccccaaaagcgagcggaaggcaagtgaggcaatcaatctatcggccacaataagaactgattggggggatctcgtccgaggaagggcgacttttttgggtgggtgggtgtggggggtttgattcaatttctcaaccccaatcgaggatgagggaggggagagttgaaaatcgggccggagcttaccggatttcctccgcgcgacattaattccgcggcccgaccaggtagcaatgaggcgggcaggaatcgaaagctgcggcacgggtgggaggaggaagggcaggcggcgggcgtgctcagcagcggtgatggtcccccctcgggagtttggagatgatgccgtattgccgtggcccgtggtggtgcgctatgcttttgagacacgaggggaggggggcgtggg

SEQ ID NO: 39075 - DNA, 1864 bp, Zea Mays
caaacgcgcagcccgccaggtttgcggctccaacgggtggggttggcagcttgcagcaggcccatggcgctatcagccgttacgattgggttggacgtgcccttgccgaccgagcctttcgttctatcctcgccgccgccgtcgccgtcgccgccgtctcgtatccctcggagattctccattcccgcctctccggccgccgcagattaccaaatacggtgaaccgtgtggtccagtggaattttgcacctcattgtactttgaaggcaaataaagccattctccaatctgaaggcgaaacaaggagtgcacatctttgttgtagagggcaaagtttgctcagctgctgctggacattggagagcgcagtggtggttgtacgcctgaaaggaattctttgtaaatttcccctatatctggttctgttatcatcattattttccttgcgttagacaataatgtcggagaacgaattagcagtaataaaaccagaggcattgaaaacttatatttggcttcagtgctttgatggctccatacaacaagtggaggaagaagttgcgatgttctgccctatgatatgtctggaaatagtgaaaaatgggacaggatcatctaagaatcatgctatagtactaccagaaagagttagtccggcaagtttgagtttgattcttaattattgtcgctttcatcaggtccctgggcgctcaaacaaggagcggaagtcatttgatgaaaagtttgtccggatagacacagaaaaactctgcaagttggcttccgcagcccttggtctgcagttaaggccactagttgatcttacttgtggagcgcttgctcgaatcattggaggaaagacacccgatgaagttagagatattttccatttaccagatgacttaacagaggaagagaaactagagccactaaaaaatgtaaatgatgatcctacgattcgattattgaaccgattgtatgcaaagaagcggaaagaactgcaggaacgccagaaactaaaggatgtccaaacacaagagcaaaaagatgagagatctttggatgaattactttgttttataaatggacatggagattccagaggtgggaaagcgtctaagaataagaaaaggaataaaagaaggaaagatcaagttaagaatcccacaaaagcggactctgaacctgtaaataaggagggagcttcctgtgtggttccgtgcaaagaagatagtaataacctctctaggcatccttgccaaagtccaaatttgcaagatgatgttgagtaccccttcgacaatgctgaccttgatgatggacttgatcctgcaatgagggaagagcttgatagagaagtggcggaatttgagatgaagctgaaattagcttggtctgaaagaatggttctgggacaggatcaaccaatggaatcggatgttgatacgcggtgaaaaccttagctggaaggagttttgttcgagagatacaggatgacattgcgaggtgcaatagtcatgttctgtgatttgtatgtaaccctgctcttcaagagagtagtgtccaaccgtatgttaccccaaaaaaagggtggagtgactggaaaccggaagttttgaatctatgtatgttcattaattttgacaggaactatcttgtgaatgattcaaagggaaaatgctgtgttgttggaagttgggcggaaacaatgagtccgttggtttaatggtgctccaatttttttttctatccccgtttgaatctcactctcggtttgttgagttgttcttagagtaaaccccctgtccaaaagcagttcacaaatatattacatcgtcaattttttttcaaaaattttgagcac

SEQ ID NO: 39076 - DNA, 1755 bp, Zea Mays
gccaggtttgcggctccaacgggtggggttggcagcttgcagcaggcccatggcgctatcagccgttacgattgggttggacgtgcccttgccgaccgagcctttcgttctatcctcgccgccgccgtcgccgtcgccgccgtctcgtatccctcggagattctccattcccgcctctccggccgccgcagattaccaaatacggtgaaccgtgtggtccagtggaattttgcacctcattgtactttgaaggcaaataaagccattctccaatctgaaggcgaaacaaggagtgcacatctttgttgtagagggcaaagtttgctcagctgctgctggacattggagagcgcagtggtggttgtacgcctgaaaggaattctttgcattgaaaacttatatttggcttcagtgctttgatggctccatacaacaagtggaggaagaagttgcgatgttctgccctatgatatgtctggaaatagtgaaaaatgggacaggatcatctaagaatcatgctatagtactaccagaaagagttagtccggcaagtttgagtttgattcttaattattgtcgctttcatcaggtccctgggcgctcaaacaaggagcggaagtcatttgatgaaaagtttgtccggatagacacagaaaaactctgcaagttggcttccgcagcccttggtctgcagttaaggccactagttgatcttacttgtggagcgcttgctcgaatcattggaggaaagacacccgatgaagttagagatattttccatttaccagatgacttaacagaggaagagaaactagagccactaaaaaatgtaaatgatgatcctacgattcgattattgaaccgattgtatgcaaagaagcggaaagaactgcaggaacgccagaaactaaaggatgtccaaacacaagagcaaaaagatgagagatctttggatgaattactttgttttataaatggacatggagattccagaggtgggaaagcgtctaagaataagaaaaggaataaaagaaggaaagatcaagttaagaatcccacaaaagcggactctgaacctgtaaataaggagggagcttcctgtgtggttccgtgcaaagaagatagtaataacctctctaggcatccttgccaaagtccaaatttgcaagatgatgttgagtaccccttcgacaatgctgaccttgatgatggacttgatcctgcaatgagggaagagcttgatagagaagtggcggaatttgagatgaagctgaaattagcttggtctgaaagaatggttctgggacaggatcaaccaatggaatcggatgttgatacgcggtgaaaaccttagctggaaggagttttgttcgagagatacaggatgacattgcgaggtgcaatagtcatgttctgtgatttgtatgtaaccctgctcttcaagagagtagtgtccaaccgtatgttaccccaaaaaaagggtggagtgactggaaaccggaagttttgaatctatgtatgttcattaattttgacaggaactatcttgtgaatgattcaaagggaaaatgctgtgttgttggaagttgggcggaaacaatgagtccgttggtttaatggtgctccaatttttttttctatccccgtttgaatctcactctcggtttgttgagttgttcttagagtaaaccccctgtccaaaagcagttcacaaatatattacatcgtcaattttttttcaaaaattttgagcac

SEQ ID NO: 39077 - DNA, 2426 bp, Zea Mays
cttgcagcaggcccatggcgctatcagccgttacgattgggttggacgtgcccttgccgaccgagcctttcgttctatcctcgccgccgccgtcgccgtcgccgccgtctcgtatccctcggagattctccattcccgcctctccggccgccgcagctgtatgctgcaagcctgccttgtcttcttccatcacctccagcggcccagcgtgcacgcaaactcccacccactgatggctggccctaccgtcgctgccgccctacctcgtctcctcctacggcgacgagcacccccatacgcgctgccctgtctccccttcctgctattaccaaatacggtgaaccgtgtggtccagtggaattttgcacctcattgtactttgaaggcaaataaagccattctccaatctgaaggcgaaacaaggagtgcacatctttgttgtagagggcaaagtttgctcagctgctgctggacattggagagcgcagtggtggttgtacgcctgaaaggaattctttgtaaatttcccctatatctggttctgttatcatcattattttccttgcgttagacaataatgtcggagaacgaattagcagtaataaaaccagaggcattgaaaacttatatttggcttcagtgctttgatggctccatacaacaagtggaggaagaagttgcgatgttctgccctatgatatgtctggaaatagtgaaaaatgggacaggatcatctaagaatcatgctatagtactaccagaaagagttagtccggcaagtttgagtttgattcttaattattgtcgctttcatcaggtccctgggcgctcaaacaaggagcggaagtcatttgatgaaaagtttgtccggatagacacagaaaaactctgcaagttggcttccgcagcccttggtctgcagttaaggccactagttgatcttacttgtggagcgcttgctcgaatcattggaggaaagacacccgatgaagttagagatattttccatttaccagatgacttaacagaggaagagaaactagagccactaaaaaatgtaaatgatgatcctacgattcgattattgaaccgattgtatgcaaagaagcggaaagaactgcaggaacgccagaaactaaaggatgtccaaacacaagagcaaaaagatgagagatctttggatgaattactttgttttataaatggacatggagattccagaggtgggaaagcgtctaagaataagaaaaggaataaaagaaggaaagatcaagttaagaatcccacaaaagcggactctgaacctgtaaataaggagggagcttcctgtgtggttccgtgcaaagaagatagtaataacctctctaggcatccttgccaaagtccaaatttgcaagatgatgttgagtaccccttcgacaatgctgaccttgatgatggacttgatcctgcaatgagggaagagcttgataggtgagggcattagatgtcttataggttgatgcatgtaggctcttcgctgtgatactggcctgtttttcaattgaaaaaggcctgtttttgtatgcgacacagcaaaatttctaatgtttatatgctggcattttaataagtacaggctgatttctggacgtaaaatcgatgaattctgttacttgcttccactcttcattcaagttctgcttgaaacttgtggttgctgtctgttccgtcgcttgatctccaggctgtgtttttaggatgctattaaaccacatttactgttgagatgcatgaaacagtgccctgttttgttataacaaccgactgttgttgacaatacagagaagtggcggaatttgagatgaagctgaaattagcttggtctgaaagaatggttctgggacaggatcaaccaatggaatcggatgttgatacgcggtggtaatggttctatgacagcggattctctgttagttttttttttcgcgtagaattttcttgatgaggtcttcttttgctgttagagtgggcagaaaaccttagctggaaggagttttgttcgagagatacaggatgacattgcgaggtgcaatagtcatgttctgtgatttgtatgtaaccctgctcttcaagagagtagtgtccaaccgtatgttaccccaaaaaaagggtggagtgactggaaaccggaagttttgaatctatgtatgttcattaattttgacaggaactatcttgtgaatgattcaaagggaaaatgctgtgttgttggaagttgggcggaaacaatgagtccgttggtttaatggtgctccaatttttttttctatccccgtttgaatctcactctcggtttgttgagttgttcttagagtaaaccccctgtccaaaagcagttcacaaatatattacatcgtcaattttttttcaaaaattttgagcac

SEQ ID NO: 39078 - DNA, 1729 bp, Zea Mays
cttgcagcaggcccatggcgctatcagccgttacgattgggttggacgtgcccttgccgaccgagcctttcgttctatcctcgccgccgccgtcgccgtcgccgccgtctcgtatccctcggagattctccattcccgcctctccggccgccgcagattaccaaatacggtgaaccgtgtggtccagtggaattttgcacctcattgtactttgaaggcaaataaagccattctccaatctgaaggcgaaacaaggagtgcacatctttgttgtagagggcaaagtttgctcagctgctgctggacattggagagcgcagtggtggttgtacgcctgaaaggaattctttgcattgaaaacttatatttggcttcagtgctttgatggctccatacaacaagtggaggaagaagttgcgatgttctgccctatgatatgtctggaaatagtgaaaaatgggacaggatcatctaagaatcatgctatagtactaccagaaagagttagtccggcaagtttgagtttgattcttaattattgtcgctttcatcaggtccctgggcgctcaaacaaggagcggaagtcatttgatgaaaagtttgtccggatagacacagaaaaactctgcaagttggcttccgcagcccttggtctgcagttaaggccactagttgatcttacttgtggagcgcttgctcgaatcattggaggaaagacacccgatgaagttagagatattttccatttaccagatgacttaacagaggaagagaaactagagccactaaaaaatgtaaatgatgatcctacgattcgattattgaaccgattgtatgcaaagaagcggaaagaactgcaggaacgccagaaactaaaggatgtccaaacacaagagcaaaaagatgagagatctttggatgaattactttgttttataaatggacatggagattccagaggtgggaaagcgtctaagaataagaaaaggaataaaagaaggaaagatcaagttaagaatcccacaaaagcggactctgaacctgtaaataaggagggagcttcctgtgtggttccgtgcaaagaagatagtaataacctctctaggcatccttgccaaagtccaaatttgcaagatgatgttgagtaccccttcgacaatgctgaccttgatgatggacttgatcctgcaatgagggaagagcttgatagagaagtggcggaatttgagatgaagctgaaattagcttggtctgaaagaatggttctgggacaggatcaaccaatggaatcggatgttgatacgcggtgagtgggcagaaaaccttagctggaaggagttttgttcgagagatacaggatgacattgcgaggtgcaatagtcatgttctgtgatttgtatgtaaccctgctcttcaagagagtagtgtccaaccgtatgttaccccaaaaaaagggtggagtgactggaaaccggaagttttgaatctatgtatgttcattaattttgacaggaactatcttgtgaatgattcaaagggaaaatgctgtgttgttggaagttgggcggaaacaatgagtccgttggtttaatggtgctccaatttttttttctatccccgtttgaatctcactctcggtttgttgagttgttcttagagtaaaccccctgtccaaaagcagttcacaaatatattacatcgtcaattttttttcaaaaattttgagcac

SEQ ID NO: 39079 - DNA, 1824 bp, Zea Mays
cttgcagcaggcccatggcgctatcagccgttacgattgggttggacgtgcccttgccgaccgagcctttcgttctatcctcgccgccgccgtcgccgtcgccgccgtctcgtatccctcggagattctccattcccgcctctccggccgccgcagattaccaaatacggtgaaccgtgtggtccagtggaattttgcacctcattgtactttgaaggcaaataaagccattctccaatctgaaggcgaaacaaggagtgcacatctttgttgtagagggcaaagtttgctcagctgctgctggacattggagagcgcagtggtggttgtacgcctgaaaggaattctttgtaaatttcccctatatctggttctgttatcatcattattttccttgcgttagacaataatgtcggagaacgaattagcagtaataaaaccagaggcattgaaaacttatatttggcttcagtgctttgatggctccatacaacaagtggaggaagaagttgcgatgttctgccctatgatatgtctggaaatagtgaaaaatgggacaggatcatctaagaatcatgctatagtactaccagaaagagttagtccggcaagtttgagtttgattcttaattattgtcgctttcatcaggtccctgggcgctcaaacaaggagcggaagtcatttgatgaaaagtttgtccggatagacacagaaaaactctgcaagttggcttccgcagcccttggtctgcagttaaggccactagttgatcttacttgtggagcgcttgctcgaatcattggaggaaagacacccgatgaagttagagatattttccatttaccagatgacttaacagaggaagagaaactagagccactaaaaaatgtaaatgatgatcctacgattcgattattgaaccgattgtatgcaaagaagcggaaagaactgcaggaacgccagaaactaaaggatgtccaaacacaagagcaaaaagatgagagatctttggatgaattactttgttttataaatggacatggagattccagaggtgggaaagcgtctaagaataagaaaaggaataaaagaaggaaagatcaagttaagaatcccacaaaagcggactctgaacctgtaaataaggagggagcttcctgtgtggttccgtgcaaagaagatagtaataacctctctaggcatccttgccaaagtccaaatttgcaagatgatgttgagtaccccttcgacaatgctgaccttgatgatggacttgatcctgcaatgagggaagagcttgatagagaagtggcggaatttgagatgaagctgaaattagcttggtctgaaagaatggttctgggacaggatcaaccaatggaatcggatgttgatacgcggtgagtgggcagaaaaccttagctggaaggagttttgttcgagagatacaggatgacattgcgaggtgcaatagtcatgttctgtgatttgtatgtaaccctgctcttcaagagagtagtgtccaaccgtatgttaccccaaaaaaagggtggagtgactggaaaccggaagttttgaatctatgtatgttcattaattttgacaggaactatcttgtgaatgattcaaagggaaaatgctgtgttgttggaagttgggcggaaacaatgagtccgttggtttaatggtgctccaatttttttttctatccccgtttgaatctcactctcggtttgttgagttgttcttagagtaaaccccctgtccaaaagcagttcacaaatatattacatcgtcaattttttttcaaaaattttgagcac

SEQ ID NO: 39080 - DNA, 3729 bp, Zea Mays
gttcggctctatataagatgtcgccatccttactctgtcgccatcgttaccctgctttcttctgcgtcgtgcctgtcgcgagcgccgacctacatctgttatcgagtgctcggcaatgtcttcgtcttcgagcgcagccaccgcaccgccgtgggccgaccttctgccggagctgtgcgacctcgtcatggagcatctcgaccccatcaccatacttcgcttccctgccgtctgcaggggttggtccgaagcgtgcgaggagaatccacgcctgttgcgggcgggcgcgcctgcgctgctcacgcccggcctggaccccgacggttgcgagaccgagagcaacgtcgacgcgggcgcattctgcctccacgacgtgtctgccgccggcggcggcggcgggcgcaggtccttttgcggcgaggcagagggattgaagggccgggcctgggtcggcggcaaccatgggtggctggcgaccgcggactggcgctgcgacgtcgagctgctgaaccccgtgactggcgcgcgggttcgcctgccgtccttcgccaccattcccggagtcgaggtcgaggtcaacttccacgtcgtcgcccgtaccgctggtggctactccttaggcaagttccacaagatcctcaaggtcgcgctgtgccggacgccgtcgcacgctgacggccacctcgccatcgctatcttctccggaggtctgctggcgttcacggcggccggcggcggagacaaaggcgagtgcaggtggacggcgttgaagaacgccgcggccgatgtctcgtacatggacgccatcgccctcgatgggaagctgtacgccgtggacgagctcggccgcttgtactcttgggacatcgacgatggagccatgacagagcccacggtggttcagggaccggagaatgacgagatgagccgctatggcactgacctgtgcgggttctacctggctgcttccgtctgcggccagcggcttatgctcatgtgcatacacggctacgacgtcgcccgtgcttacctgtacgggcgaagaagcagatgttgggacagtcgcgtgtggagcagactggtgttcgacgacaggaggagcttctgcgagctcggcatgtcgctccacgagctcgacgctggcggcggcagttggcggcgtgtcacggacctcggcggagatcgcgccctcttcctgggcgcaaactatcctttctacctcacggtccggcacagatttggttctgcggatcttgaggcggactgcgtctacctctccgacacgccctacggctacgacacggccatctttgatctcaaggagggcatcggaggtgacggtcacatcaagcagcagctctattactcactcgtagctgatccgttacagatgcccatgtggtttgtgccaacggactatccacactaataggtggttagccactagtctgtttaatttgtctaagatttagtttctaataataatgagaggcgtgcagtcgtgagttagatagagctacgtgttagagcatctcgaatgttagtcaaaacagatctcacttatcaacaaacagtcacgccttctttcaggggaatatgaagaaatttcatgcaaaaaaggaggatccgggataacagacatgtgcattgccgttcgcccgttcccctaaaaaaaatcgaccctttgtatgtacagctattatttagccccaaagatcgttgaaggccaaactactccgccgcctcatccccctagaactcggttagagcactcccaacgctctccagctcatatggtttttatagaatttattagactgccatatcagctttttgataatgtggcaagagatttattgtgaaaagagcatggaaacgaccaaaatagcgttgagccccgtcggtggtttccatcctcgttttcttccccttccctctgagaaacgaagtctgcttcttttgtgaagtcattaaatgtgttctctgcgtagaaactaccatttgcattgagaagattagtttctataaatggttccttgactaggtggcagctatggaaaccacggagcagagttgggagtgctcttacatacatcacatccgggccttctttcctcgcttcctctgcgcaccgaaattctcgctgacggtgattcggcagaaaaaaaaaactgacgggtagcgaatctgttctgttctacgcccatttggcgagcaacgacatgagccccgcgccgaggaacagggcgacgtacgccgccagctggagcttggcgttcgtctgcagcctcgggttgctgaagtccgcggcgaggagatcgaccagggacatgtacaccaggatccctgcggcggccgcgttgaagacgccctccacgaccagggcggtggcgccgtgcctgctgtagccggaagcgatggcgatgcccagcgcgatgcccgcgggagcggtgagcgagaagaaggccgccatgaccacggccgccctcgccttgaactctgcctggataggtatcgacggattgtgctcagggaaaaggacaggttgtttgtttgttttttcttcatggcatggcgtgtgttcttgtcgaggaggtgccccaagtgggcgttcggaatgctgggaaggtgctcacctgagagatcaccctgtgcctgatggacacggcgacggcggaggcatcctgaggcgaggcaccggcgtggccgtgccctccgtgggcgtgcgtgtgcgcgtgcacgtggcccgcgggctcggcggcggcgccctcctcgtccgcgggcgccgcgcggccctggcctccgtcgacggcgtcgtcgtcgacggggcgcgccttgcggatgtgcgcgcgctggtagtagcccgcggcggcggagtcgaccatcatggtggccatggcagagcacatggcgacgagtcccgcgtaggggaacccgccggccctggcgccgccgccgcaggggggcgcgagcgcgtcgaaggccgcgggcaggatgtgcaccatgccggtggcgaggatgacccccgcggcgaacgccttgacggcgaagaagacgtccccgtcggggcgcagcgccgaggcggagcggcccagcagcgggaccagcacccccgccgcgcccgacgccaggatggacgccaccgcgacgagcttcagccgcagcgccccgcgcgcgtcctcctccttgatcgccgccgcctcgccgccgccacaatcgcaccccacgcccgccgctgccgccgcgccgaccccgggcgtcacctgaacgaggagcagtagcacagcgagccacgccggcagagacgggggaagaggaacccgaactcgcgtggcgtccatggcgtgcgcgcacgtgcgcctggcgtgggagagagggccggtgcggtgagtgacggagggagggagtcggcgccgcgcgcgcgctgagctatataaagctccgcggccgcgagtgtggtgacatggtgagctcacactccggcaacgccgctttgaagcgtggtgggccctgagcagtgtgcaccgtccgatctgggtgtgtgggcacgctctccaactggcagcaagtgttggtgttgccgtggaccttttgtcgtgattgtttggaaaaaaacggatcaggtttgccaccttggttccagaaacgctttaattttttttttcatcccaaaaaatggtgggagttcatctgcattctgatgtacttcataaaaaaacgaaaaataag

SEQ ID NO: 39081 - DNA, 4580 bp, Zea Mays
atcgttaccctgctttcttctgcgtcgtgcctgtcgcgagcgccgacctacatctgttatcgagtgctcggcaatgtcttcgtcttcgagcgcagccaccgcaccgccgtgggccgaccttctgccggagctgtgcgacctcgtcatggagcatctcgaccccatcaccatacttcgcttccctgccgtctgcaggggttggtccgaagcgtgcgaggagaatccacgcctgttgcgggcgggcgcgcctgcgctgctcacgcccggcctggaccccgacggttgcgagaccgagagcaacgtcgacgcgggcgcattctgcctccacgacgtgtctgccgccggcggcggcggcgggcgcaggtccttttgcggcgaggcagagggattgaagggccgggcctgggtcggcggcaaccatgggtggctggcgaccgcggactggcgctgcgacgtcgagctgctgaaccccgtgactggcgcgcgggttcgcctgccgtccttcgccaccattcccggagtcgaggtcgaggtcaacttccacgtcgtcgcccgtaccgctggtggctactccttaggcaagttccacaagatcctcaaggtcgcgctgtgccggacgccgtcgcacgctgacggccacctcgccatcgctatcttctccggaggtctgctggcgttcacggcggccggcggcggagacaaaggcgagtgcaggtggacggcgttgaagaacgccgcggccgatgtctcgtacatggacgccatcgccctcgatgggaagctgtacgccgtggacgagctcggccgcttgtactcttgggacatcgacgatggagccatgacagagcccacggtggttcagggaccggagaatgacgagatgagccgctatggcactgacctgtgcgggttctacctggctgcttccgtctgcggccagcggcttatgctcatgtgcatacacggctacgacgtcgcccgtgcttacctgtacgggcgaagaagcagatgttgggacagtcgcgtgtggagcagactggtgttcgacgacaggaggagcttctgcgagctcggcatgtcgctccacgagctcgacgctggcggcggcagttggcggcgtgtcacggacctcggcggagatcgcgccctcttcctgggcgcaaactatcctttctacctcacggtccggcacagatttggttctgcggatcttgaggcggactgcgtctacctctccgacacgccctacggctacgacacggccatctttgatctcaaggagggcatcggaggtgacggtcacatcaagcagcagctctattactcactcgtagctgatccgttacagatgcccatgtggtttgtgccaacggactatccacactaataggtggttagccactagtctgtttaatttgtctaagatttagtttctaataataatgagaggcgtgcagtcgtgagttagatagagctacgtgttagagcatctcgaatgttagtcaaaacagatctcacttatcaacaaacagtcacgccttctttcaggggaatatgaagaaatttcatgcaaaaaaggaggatccgggataacagacatgtgcattgccgttcgcccgttcccctaaaaaaaatcgaccctttgtatgtacagctattatttagccccaaagatcgttgaaggccaaactactccgccgcctcatccccctagaactcggttagagcactcccaacgctctccagctcatatggtttttatagaatttattagactgccatatcagctttttgataatgtggcaagagatttattgtgaaaagagcatggaaacgaccaaaatagcgttgagccccgtcggtggtttccatcctcgttttcttccccttccctctgagaaacgaagtctgcttcttttgtgaagtcattaaatgtgttctctgcgtagaaactaccatttgcattgagaagattagtttctataaatggttccttgactaggtggcagctatggaaaccacggagcagagttgggagtgctcttacatacatcacatccgggccttctttcctcgcttcctctgcgcaccgaaattctcgctgacggtgattcggcagaaaaaaaaaactgacgggtagcgaatctgttctgttctacgcccatttggcgagcaacgacatgagccccgcgccgaggaacagggcgacgtacgccgccagctggagcttggcgttcgtctgcagcctcgggttgctgaagtccgcggcgaggagatcgaccagggacatgtacaccaggatccctgcggcggccgcgttgaagacgccctccacgaccagggcggtggcgccgtgcctgctgtagccggaagcgatggcgatgcccagcgcgatgcccgcgggagcggtgagcgagaagaaggccgccatgaccacggccgccctcgccttgaactctgcctggagtaagttctcggttaggagttatatgaaccatgattgcatcaatgattgacggggtcctagttcttggtcctctcctcactgatctgtgcgatgtagctagtgatagtgacgagctagctcttcgctacaaatatctcggtctatttgtcaccttctgttcggatgtcatgtcactcttcacttcagtgtgaagtgtataaacagatactacatgccgtacgtacctgaacaatgcagccgccaaggccaatgccctcgaagaactggtggaagctgagggctccgacgaggggcctgatggtggacggccgcagggaggcgcccagggacacgccgatgatcaccgagtgcaccaggattcccagctccagaacctgcaccaaccaccacagaattgcccttacggttactgattcgaataatgaatgatcctgccatgttgctcgaagaatctgcaaaggggagggggggcggctccattgtgaggctgggggagaaggaaggcaacaaggcattgttccgttccgcttgtctgcagcaggattctcttgcctttagcaccaacggcagggacgacgccccctttctccgatggagacgacacggaaggcctgtgggtactgctgcgagagctacgcgctgatttgtctctttcgttcactagcactgattggattcctggttccaatcgataagcccaagaacacgagcttttcgacggtacagaacgaggactagtgttactatacttttacttcgttggtattcagagtagtgtttcaatcaacctaatcaatcggttttgactgctaacaactactactgtcatttatcagagcatcttattattagacagatgacacattttttcttatcagttgaagtttcatagtaggtatcgacggattgtgctcagggaaaaggacaggttgtttgtttgttttttcttcatggcatggcgtgtgttcttgtcgaggaggtgccccaagtgggcgttcggaatgctgggaaggtgctcacctgagagatcaccctgtgcctgatggacacggcgacggcggaggcatcctgaggcgaggcaccggcgtggccgtgccctccgtgggcgtgcgtgtgcgcgtgcacgtggcccgcgggctcggcggcggcgccctcctcgtccgcgggcgccgcgcggccctggcctccgtcgacggcgtcgtcgtcgacggggcgcgccttgcggatgtgcgcgcgctggtagtagcccgcggcggcggagtcgaccatcatggtggccatggcagagcacatggcgacgagtcccgcgtaggggaacccgccggccctggcgccgccgccgcaggggggcgcgagcgcgtcgaaggccgcgggcaggatgtgcaccatgccggtggcgaggatgacccccgcggcgaacgccttgacggcgaagaagacgtccccgtcggggcgcagcgccgaggcggagcggcccagcagcgggaccagcacccccgccgcgcccgacgccaggatggacgccaccgcgacgagcttcagccgcagcgccccgcgcgcgtcctcctccttgatcgccgccgcctcgccgccgccacaatcgcaccccacgcccgccgctgccgccgcgccgaccccgggcgtcacctgaacgaggagcagtagcacagcgagccacgccggcagagacgggggaagaggaacccgaactcgcgtggcgtccatggcgtgcgcgcacgtgcgcctggcgtgggagagagggccggtgcggtgagtgacggagggagggagtcggcgccgcgcgcgcgctgagctatataaagctccgcggccgcgagtgtggtgacatggtgagctcacactccggcaacgccgctttgaagcgtggtgggccctgagcagtgtgcaccgtccgatctgggtgtgtgggcacgctctccaactggcagcaagtgttggtgttgccgtggaccttttgtcgtgattgtttggaaaaaaacggatcaggtttgccaccttggttccagaaacgctttaattttttttttcatcccaaaaaatggtgggagttcatctgcattctgatgtacttcataaaaaaacgaaaaataag

SEQ ID NO: 39082 - DNA, 3437 bp, Zea Mays
ctaaaagcccaccaaggccatccgaccaccgcagcctaaatcaccttccgtcgccagctcctagaaacccctctcctgcccggcctcctccctctctcatccgatgggcaagtcaagcaagaaggcggccgccgtggctgcagcgccagcggcggtgcccaaggggaagaagcgggaggcggaggacgagatcgagatggccgtgagcgcgaagaagcagaaggcggcgccaccggcgaaggccgtgccgacgtccaagaaggacgccaaggaggacgccaagtccaagaagcagccgccccccaagaaggctgagaacagcagcagtgactctgaagaggaccccgagtccgaagaggagaatttttataatttgattgagtcggggagggcagacggagatgaggagtttgacgaggacgaggaggacgggttcgagttcggtgacgctgacgaggcgatgcaatgcgtggtgatggcggaaagcagcaccaccgccgcggcgctgcgtgctcacacgcaggactacgaggcgctagctgcgcacaagcgcaaggcccttgccgaggagcaaccccagagggaggagggtcccaaaaggccaagaccggaccaactttcagaagcagaagcagcaaccatgttcgaccaactgatggaaggctttggtcttaggcgtaaaagaaggtcaaaagatggcaagagaaggggaagaaagaaaggaacaaagaataagggcagtgctgaagttattaaaaagttgggtgatgctactctacttttcgctgaagaaaaatttaacgaggcaatacctatactacatgagattgtgcgaattgcaccaaatttgtcagattcatattatctacttggtagcatttatagtgagattggtgaactagataaagccataaacttcttgatgctagctgcatatgtttccccaaaggatgcatctctgtggaagaaacttattcccttggcaaagaaaaagggggatgcttctctggcaagacactgcattttaaaagcaatgaacgcagatccagaagatgtagatctgaagtatctttgtggttatatgtatcacaacctttgtgaatatcagaaagctgcagaaatatatgaacaaatagtcagaatttatcctgccaatagtgctgttcgtaaagtagcagcccagatgtacagagagtgtggtcaaattgacaatgctattaatttgttgaaagactatgccgatactcaaactttcaacattgactggagcgttctagatttattgatatcactttatctaagaaataatgtttttagtgaagcactaaagcagatcaagagggcacaactacatttgggatctcaacagaaactaccagtacaattgcaggcaaaagaagtaatctgccatgcatattgcggtgacatgaaacatgctgagattttccttcgtgatgtgcgtttggagccatcaaaagaaaacattgatgtgctcaaggaactcgcaagcaatttagaaaaaatgggacgatatgagtatgcagtaaagttttacctgctaattgaaaatgttgctactcaaaatgatggtggtttatgctttgatcacaaagaaatgggtagttggtatgtcaaagctgctcagtgctacatgatcttaggggacaaaaaaaatgctattccttatttttataaagcgttacaaagcatgaaggacaatattggtatacgattgaccttatcctcccttcttattgatgacgacaagacagatgaagctgccactttgctttctcctcccaaaattccagagttgcagtctgctaatactccagaccaacagaaaccttggtggtgtgatgggaaagttaagatggcgcttgcaaaactttattacaataaaggaaatttggaagattttgtggacacaatttttcatcctattctagaaactttgaatgttgaatatgctaatcgaaaggtcaagtcaatgagaaagcttccaaacattgttctgcatgaaagagtcaaagtattgggtgagcaacggccagatagtgtatttcaaggattaaggccaatagcatcacctgatgaattacaaaaggcaaacagagcaaagaaattaattgagaaaaggaccgctgcaaatgaagagttaaaacatgattatctgccaagaacaaagcaagttcctcctgttcctggtctactgacaaatgtggagcatcatcagcttgtgttaaatctttgtcgaacattagctttgctgcagcgatattgggatgcactgcagattatcaaccgaaccctcaaacttggaaatgacgcactcactggtgacaaaaaagaggaactcagatccttgggtgctcaaatagcttatagagctccagatcccagtcatggctttaagtatgtccgttacgttgttcagcagcacccatattctcttgccgcatggaattcctactataaggtggtatcaagaatagaggacaggtttccacatcatttcaaatatctccttcggacaagagaagcgaatcctgactgtgtgcctccaataatcatatccgggcatcgatttactgctataagtcagcatcagtcagctgcccgggattaccttgaagcttataagctggacccagaaaaccctcttattaatctatgtgtaggcactgccttgattagtttggcccttggcttcaggcttcagaataagaaccagtgcatcgtccaagcttttgctttcctgtacagataccttcgcctttgtgataacagtcaggaagcctcgtacaacattgctcgagcgtatcaccacattggcctgaataccttggcagctgtttactacgacaaggctttgtcaaccgaggagaaggatcatcccatccccaagcttccgtacgaggctggttcacgtgcgccagaggatctgaggccagggtattgtgatgtgcgaagagaggcagcgttcaatctgcatctaatctatatgaagagtggagctaccgatcttgcgagacggatcctaaaaacttactgcactgtctaaaagctggtatcgggcaatgttgttgggatcggatatcagatccttcaaggctccttgcattagcttaggatcaagctagtctataaagctagaacattggtgtaatatgtcactagtgactttagatgtgtagctgaagagttaacaacgtgcttgatccagatttaaacgtatattctggtttcacaatgctgtgttatagtcaaatggttcagcgatgctttgcttcatgtgatttattggcaattcattattatttttctctcaaacgcacaggagaacgcataggaggactgcacttcattatattaagagaagaaaaggtcaagaggaccaaaatacattgtccatagggcaagccaaaacacttgac

SEQ ID NO: 39083 - DNA, 3255 bp, Zea Mays
ctaaaagcccaccaaggccatccgaccaccgcagcctaaatcaccttccgtcgccagctcctagaaacccctctcctgcccggcctcctccctctctcatccgatgggcaagtcaagcaagaaggcggccgccgtggctgcagcgccagcggcggtgcccaaggggaagaagcgggaggcggaggacgagatcgagatggccgtgagcgcgaagaagcagaaggcggcgccaccggcgaaggccgtgccgacgtccaagaaggacgccaaggaggacgccaagtccaagaagcagccgccccccaagaaggctgagaacagcagcagtgactctgaagaggaccccgagtccgaagaggagaatttttataatttgattgagtcggggagggcagacggagatgaggagtttgacgaggacgaggaggacgggttcgagttcggtgacgctgacgaggcgatgcaatgcgtggtgatggcggaaagcagcaccaccgccgcggcgctgcgtgctcacacgcaggactacgaggcgctagctgcgcacaagcgcaaggcccttgccgaggagcaaccccagagggaggagggtcccaaaaggccaagaccggaccaactttcagaagcagaagcagcaaccatgttcgaccaactgatggaaggctttggtcttaggcgtaaaagaaggtcaaaagatggcaagagaaggggaagaaagaaaggaacaaagaataagggcagtgctgaagttattaaaaagttgggtgatgctactctacttttcgctgaagaaaaatttaacgaggaaaaagggggatgcttctctggcaagacactgcattttaaaagcaatgaacgcagatccagaagatgtagatctgaagtatctttgtggttatatgtatcacaacctttgtgaatatcagaaagctgcagaaatatatgaacaaatagtcagaatttatcctgccaatagtgctgttcgtaaagtagcagcccagatgtacagagagtgtggtcaaattgacaatgctattaatttgttgaaagactatgccgatactcaaactttcaacattgactggagcgttctagatttattgatatcactttatctaagaaataatgtttttagtgaagcactaaagcagatcaagagggcacaactacatttgggatctcaacagaaactaccagtacaattgcaggcaaaagaagtaatctgccatgcatattgcggtgacatgaaacatgctgagattttccttcgtgatgtgcgtttggagccatcaaaagaaaacattgatgtgctcaaggaactcgcaagcaatttagaaaaaatgggacgatatgagtatgcagtaaagttttacctgctaattgaaaatgttgctactcaaaatgatggtggtttatgctttgatcacaaagaaatgggtagttggtatgtcaaagctgctcagtgctacatgatcttaggggacaaaaaaaatgctattccttatttttataaagcgttacaaagcatgaaggacaatattggtatacgattgaccttatcctcccttcttattgatgacgacaagacagatgaagctgccactttgctttctcctcccaaaattccagagttgcagtctgctaatactccagaccaacagaaaccttggtggtgtgatgggaaagttaagatggcgcttgcaaaactttattacaataaaggaaatttggaagattttgtggacacaatttttcatcctattctagaaactttgaatgttgaatatgctaatcgaaaggtcaagtcaatgagaaagcttccaaacattgttctgcatgaaagagtcaaagtattgggtgagcaacggccagatagtgtatttcaaggattaaggccaatagcatcacctgatgaattacaaaaggcaaacagagcaaagaaattaattgagaaaaggaccgctgcaaatgaagagttaaaacatgattatctgccaagaacaaagcaagttcctcctgttcctggtctactgacaaatgtggagcatcatcagcttgtgttaaatctttgtcgaacattagctttgctgcagcgatattgggatgcactgcagattatcaaccgaaccctcaaacttggaaatgacgcactcactggtgacaaaaaagaggaactcagatccttgggtgctcaaatagcttatagagctccagatcccagtcatggctttaagtatgtccgttacgttgttcagcagcacccatattctcttgccgcatggaattcctactataaggtggtatcaagaatagaggacaggtttccacatcatttcaaatatctccttcggacaagagaagcgaatcctgactgtgtgcctccaataatcatatccgggcatcgatttactgctataagtcagcatcagtcagctgcccgggattaccttgaagcttataagctggacccagaaaaccctcttattaatctatgtgtaggcactgccttgattagtttggcccttggcttcaggcttcagaataagaaccagtgcatcgtccaagcttttgctttcctgtacagataccttcgcctttgtgataacagtcaggaagcctcgtacaacattgctcgagcgtatcaccacattggcctgaataccttggcagctgtttactacgacaaggctttgtcaaccgaggagaaggatcatcccatccccaagcttccgtacgaggctggttcacgtgcgccagaggatctgaggccagggtattgtgatgtgcgaagagaggcagcgttcaatctgcatctaatctatatgaagagtggagctaccgatcttgcgagacggatcctaaaaacttactgcactgtctaaaagctggtatcgggcaatgttgttgggatcggatatcagatccttcaaggctccttgcattagcttaggatcaagctagtctataaagctagaacattggtgtaatatgtcactagtgactttagatgtgtagctgaagagttaacaacgtgcttgatccagatttaaacgtatattctggtttcacaatgctgtgttatagtcaaatggttcagcgatgctttgcttcatgtgatttattggcaattcattattatttttctctcaaacgcacaggagaacgcataggaggactgcacttcattatattaagagaagaaaaggtcaagaggaccaaaatacattgtccatagggcaagccaaaacacttgac

SEQ ID NO: 39084 - DNA, 3424 bp, Zea Mays
caccaaggccatccgaccaccgcagcctaaatcaccttccgtcgccagctcctagaaacccctctcctgcccggcctcctccctctctcatccgatgggcaagtcaagcaagaaggcggccgccgtggctgcagcgccagcggcggtgcccaaggggaagaagcgggaggcggaggacgagatcgagatggccgtgagcgcgaagaagcagaaggcggcgccaccggcgaaggccgtgccgacgtccaagaaggacgccaaggaggacgccaagtccaagaagcagccgccccccaagaaggctgagaacagcagcagtgactctgaagaggaccccgagtccgaagaggagaatttttataatttgattgagtcggggagggcagacggagatgaggagtttgacgaggacgaggaggacgggttcgagttcggtgacgctgacgaggcgatgcaatgcgtggtgatggcggaaagcagcaccaccgccgcggcgctgcgtgctcacacgcaggactacgaggcgctagctgcgcacaagcgcaaggcccttgccgaggagcaaccccagagggaggagggtcccaaaaggccaagaccggaccaactttcagaagcagaagcagcaaccatgttcgaccaactgatggaaggctttggtcttaggcgtaaaagaaggtcaaaagatggcaagagaaggggaagaaagaaaggaacaaagaataagggcagtgctgaagttattaaaaagttgggtgatgctactctacttttcgctgaagaaaaatttaacgaggcaatacctatactacatgagattgtgcgaattgcaccaaatttgtcagattcatattatctacttggtagcatttatagtgagattggtgaactagataaagccataaacttcttgatgctagctgcatatgtttccccaaaggatgcatctctgtggaagaaacttattcccttggcaaagaaaaagggggatgcttctctggcaagacactgcattttaaaagcaatgaacgcagatccagaagatgtagatctgaagtatctttgtggttatatgtatcacaacctttgtgaatatcagaaagctgcagaaatatatgaacaaatagtcagaatttatcctgccaatagtgctgttcgtaaagtagcagcccagatgtacagagagtgtggtcaaattgacaatgctattaatttgttgaaagactatgccgatactcaaactttcaacattgactggagcgttctagatttattgatatcactttatctaagaaataatgtttttagtgaagcactaaagcagatcaagagggcacaactacatttgggatctcaacagaaactaccagtacaattgcaggcaaaagaagtaatctgccatgcatattgcggtgacatgaaacatgctgagattttccttcgtgatgtgcgtttggagccatcaaaagaaaacattgatgtgctcaaggaactcgcaagcaatttagaaaaaatgggacgatatgagtatgcagtaaagttttacctgctaattgaaaatgttgctactcaaaatgatggtggtttatgctttgatcacaaagaaatgggtagttggtatgtcaaagctgctcagtgctacatgatcttaggggacaaaaaaaatgctattccttatttttataaagcgttacaaagcatgaaggacaatattggtatacgattgaccttatcctcccttcttattgatgacgacaagacagatgaagctgccactttgctttctcctcccaaaattccagagttgcagtctgctaatactccagaccaacagaaaccttggtggtgtgatgggaaagttaagatggcgcttgcaaaactttattacaataaaggaaatttggaagattttgtggacacaatttttcatcctattctagaaactttgaatgttgaatatgctaatcgaaaggtcaagtcaatgagaaagcttccaaacattgttctgcatgaaagagtcaaagtattgggtgagcaacggccagatagtgtatttcaaggattaaggccaatagcatcacctgatgaattacaaaaggcaaacagagcaaagaaattaattgagaaaaggaccgctgcaaatgaagagttaaaacatgattatctgccaagaacaaagcaagttcctcctgttcctggtctactgacaaatgtggagcatcatcagcttgtgttaaatctttgtcgaacattagctttgctgcagcgatattgggatgcactgcagattatcaaccgaaccctcaaacttggaaatgacgcactcactggtgacaaaaaagaggaactcagatccttgggtgctcaaatagcttatagagctccagatcccagtcatggctttaagtatgtccgttacgttgttcagcagcacccatattctcttgccgcatggaattcctactataaggtggtatcaagaatagaggacaggtttccacatcatttcaaatatctccttcggacaagagaagcgaatcctgactgtgtgcctccaataatcatatccgggcatcgatttactgctataagtcagcatcagtcagctgcccgggattaccttgaagcttataagctggacccagaaaaccctcttattaatctatgtgcactgccttgattagtttggcccttggcttcaggcttcagaataagaaccagtgcatcgtccaagcttttgctttcctgtacagataccttcgcctttgtgataacagtcaggaagcctcgtacaacattgctcgagcgtatcaccacattggcctgaataccttggcagctgtttactacgacaaggctttgtcaaccgaggagaaggatcatcccatccccaagcttccgtacgaggctggttcacgtgcgccagaggatctgaggccagggtattgtgatgtgcgaagagaggcagcgttcaatctgcatctaatctatatgaagagtggagctaccgatcttgcgagacggatcctaaaaacttactgcactgtctaaaagctggtatcgggcaatgttgttgggatcggatatcagatccttcaaggctccttgcattagcttaggatcaagctagtctataaagctagaacattggtgtaatatgtcactagtgactttagatgtgtagctgaagagttaacaacgtgcttgatccagatttaaacgtatattctggtttcacaatgctgtgttatagtcaaatggttcagcgatgctttgcttcatgtgatttattggcaattcattattatttttctctcaaacgcacaggagaacgcataggaggactgcacttcattatattaagagaagaaaaggtcaagaggaccaaaatacattgtccatagggcaagccaaaacacttgac

SEQ ID NO: 39085 - DNA, 3417 bp, Zea Mays
ggccatccgaccaccgcagcctaaatcaccttccgtcgccagctcctagaaacccctctcctgcccggcctcctccctctctcatccgatgggcaagtcaagcaagaaggcggccgccgtggctgcagcgccagcggcggtgcccaaggggaagaagcgggaggcggaggacgagatcgagatggccgtgagcgcgaagaagcagaaggcggcgccaccggcgaaggccgtgccgacgtccaagaaggacgccaaggaggacgccaagtccaagaagcagccgccccccaagaaggctgagaacagcagcagtgactctgaagaggaccccgagtccgaagaggagaatttttataatttgattgagtcggggagggcagacggagatgaggagtttgacgaggacgaggaggacgggttcgagttcggtgacgctgacgaggcgatgcaatgcgtggtgatggcggaaagcagcaccaccgccgcggcgctgcgtgctcacacgcaggactacgaggcgctagctgcgcacaagcgcaaggcccttgccgaggagcaaccccagagggaggagggtcccaaaaggccaagaccggaccaactttcagaagcagaagcagcaaccatgttcgaccaactgatggaaggctttggtcttaggcgtaaaagaaggtcaaaagatggcaagagaaggggaagaaagaaaggaacaaagaataagggcagtgctgaagttattaaaaagttgggtgatgctactctacttttcgctgaagaaaaatttaacgaggcaatacctatactacatgagattgtgcgaattgcaccaaatttgtcagattcatattatctacttggtagcatttatagtgagattggtgaactagataaagccataaacttcttgatgctagctgcatatgtttccccaaaggatgcatctctgtggaagaaacttattcccttggcaaagaaaaagggggatgcttctctggcaagacactgcattttaaaagcaatgaacgcagatccagaagatgtagatctgaagtatctttgtggttatatgtatcacaacctttgtgaatatcagaaagctgcagaaatatatgaacaaatagtcagaatttatcctgccaatagtgctgttcgtaaagtagcagcccagatgtacagagagtgtggtcaaattgacaatgctattaatttgttgaaagactatgccgatactcaaactttcaacattgactggagcgttctagatttattgatatcactttatctaagaaataatgtttttagtgaagcactaaagcagatcaagagggcacaactacatttgggatctcaacagaaactaccagtacaattgcaggcaaaagaagtaatctgccatgcatattgcggtgacatgaaacatgctgagattttccttcgtgatgtgcgtttggagccatcaaaagaaaacattgatgtgctcaaggaactcgcaagcaatttagaaaaaatgggacgatatgagtatgcagtaaagttttacctgctaattgaaaatgttgctactcaaaatgatggtggtttatgctttgatcacaaagaaatgggtagttggtatgtcaaagctgctcagtgctacatgatcttaggggacaaaaaaaatgctattccttatttttataaagcgttacaaagcatgaaggacaatattggtatacgattgaccttatcctcccttcttattgatgacgacaagacagatgaagctgccactttgctttctcctcccaaaattccagagttgcagtctgctaatactccagaccaacagaaaccttggtggtgtgatgggaaagttaagatggcgcttgcaaaactttattacaataaaggaaatttggaagattttgtggacacaatttttcatcctattctagaaactttgaatgttgaatatgctaatcgaaaggtcaagtcaatgagaaagcttccaaacattgttctgcatgaaagagtcaaagtattgggtgagcaacggccagatagtgtatttcaaggattaaggccaatagcatcacctgatgaattacaaaaggcaaacagagcaaagaaattaattgagaaaaggaccgctgcaaatgaagagttaaaacatgattatctgaacaaagcaagttcctcctgttcctggtctactgacaaatgtggagcatcatcagcttgtgttaaatctttgtcgaacattagctttgctgcagcgatattgggatgcactgcagattatcaaccgaaccctcaaacttggaaatgacgcactcactggtgacaaaaaagaggaactcagatccttgggtgctcaaatagcttatagagctccagatcccagtcatggctttaagtatgtccgttacgttgttcagcagcacccatattctcttgccgcatggaattcctactataaggtggtatcaagaatagaggacaggtttccacatcatttcaaatatctccttcggacaagagaagcgaatcctgactgtgtgcctccaataatcatatccgggcatcgatttactgctataagtcagcatcagtcagctgcccgggattaccttgaagcttataagctggacccagaaaaccctcttattaatctatgtgtaggcactgccttgattagtttggcccttggcttcaggcttcagaataagaaccagtgcatcgtccaagcttttgctttcctgtacagataccttcgcctttgtgataacagtcaggaagcctcgtacaacattgctcgagcgtatcaccacattggcctgaataccttggcagctgtttactacgacaaggctttgtcaaccgaggagaaggatcatcccatccccaagcttccgtacgaggctggttcacgtgcgccagaggatctgaggccagggtattgtgatgtgcgaagagaggcagcgttcaatctgcatctaatctatatgaagagtggagctaccgatcttgcgagacggatcctaaaaacttactgcactgtctaaaagctggtatcgggcaatgttgttgggatcggatatcagatccttcaaggctccttgcattagcttaggatcaagctagtctataaagctagaacattggtgtaatatgtcactagtgactttagatgtgtagctgaagagttaacaacgtgcttgatccagatttaaacgtatattctggtttcacaatgctgtgttatagtcaaatggttcagcgatgctttgcttcatgtgatttattggcaattcattattatttttctctcaaacgcacaggagaacgcataggaggactgcacttcattatattaagagaagaaaaggtcaagaggaccaaaatacattgtccatagggcaagccaaaacacttgac

SEQ ID NO: 39086 - DNA, 3412 bp, Zea Mays
ggccatccgaccaccgcagcctaaatcaccttccgtcgccagctcctagaaacccctctcctgcccggcctcctccctctctcatccgatgggcaagtcaagcaagaaggcggccgccgtggctgcagcgccagcggcggtgcccaaggggaagaagcgggaggcggaggacgagatcgagatggccgtgagcgcgaagaagcagaaggcggcgccaccggcgaaggccgtgccgacgtccaagaaggacgccaaggaggacgccaagtccaagaagcagccgccccccaagaaggctgagaacagcagcagtgactctgaagaggaccccgagtccgaagaggagaatttttataatttgattgagtcggggagggcagacggagatgaggagtttgacgaggacgaggaggacgggttcgagttcggtgacgctgacgaggcgatgcaatgcgtggtgatggcggaaagcagcaccaccgccgcggcgctgcgtgctcacacgcaggactacgaggcgctagctgcgcacaagcgcaaggcccttgccgaggagcaaccccagagggaggagggtcccaaaaggccaagaccggaccaactttcagaagcagaagcagcaaccatgttcgaccaactgatggaaggctttggtcttaggcgtaaaagaaggtcaaaagatggcaagagaaggggaagaaagaaaggaacaaagaataagggcagtgctgaagttattaaaaagttgggtgatgctactctacttttcgctgaagaaaaatttaacgaggcaatacctatactacatgagattgtgcgaattgcaccaaatttgtcagattcatattatctacttggtagcatttatagtgagattggtgaactagataaagccataaacttcttgatgctagctgcatatgtttccccaaaggatgcatctctgtggaagaaacttattcccttggcaaagaaaaagggggatgcttctctggcaagacactgcattttaaaagcaatgaacgcagatccagaagatgtagatctgaagtatctttgtggttatatgtatcacaacctttgtgaatatcagaaagctgcagaaatatatgaacaaatagtcagaatttatcctgccaatagtgctgttcgtaaagtagcagcccagatgtacagagagtgtggtcaaattgacaatgctattaatttgttgaaagactatgccgatactcaaactttcaacattgactggagcgttctagatttattgatatcactttatctaagaaataatgtttttagtgaagcactaaagcagatcaagagggcacaactacatttgggatctcaacagaaactaccagtacaattgcaggcaaaagaagtaatctgccatgcatattgcggtgacatgaaacatgctgagattttccttcgtgatgtgcgtttggagccatcaaaagaaaacattgatgtgctcaaggaactcgcaagcaatttagaaaaaatgggacgatatgagtatgcagtaaagttttacctgctaattgaaaatgttgctactcaaaatgatggtggtttatgctttgatcacaaagaaatgggtagttggtatgtcaaagctgctcagtgctacatgatcttaggggacaaaaaaaatgctattccttatttttataaagcatgaaggacaatattggtatacgattgaccttatcctcccttcttattgatgacgacaagacagatgaagctgccactttgctttctcctcccaaaattccagagttgcagtctgctaatactccagaccaacagaaaccttggtggtgtgatgggaaagttaagatggcgcttgcaaaactttattacaataaaggaaatttggaagattttgtggacacaatttttcatcctattctagaaactttgaatgttgaatatgctaatcgaaaggtcaagtcaatgagaaagcttccaaacattgttctgcatgaaagagtcaaagtattgggtgagcaacggccagatagtgtatttcaaggattaaggccaatagcatcacctgatgaattacaaaaggcaaacagagcaaagaaattaattgagaaaaggaccgctgcaaatgaagagttaaaacatgattatctgccaagaacaaagcaagttcctcctgttcctggtctactgacaaatgtggagcatcatcagcttgtgttaaatctttgtcgaacattagctttgctgcagcgatattgggatgcactgcagattatcaaccgaaccctcaaacttggaaatgacgcactcactggtgacaaaaaagaggaactcagatccttgggtgctcaaatagcttatagagctccagatcccagtcatggctttaagtatgtccgttacgttgttcagcagcacccatattctcttgccgcatggaattcctactataaggtggtatcaagaatagaggacaggtttccacatcatttcaaatatctccttcggacaagagaagcgaatcctgactgtgtgcctccaataatcatatccgggcatcgatttactgctataagtcagcatcagtcagctgcccgggattaccttgaagcttataagctggacccagaaaaccctcttattaatctatgtgtaggcactgccttgattagtttggcccttggcttcaggcttcagaataagaaccagtgcatcgtccaagcttttgctttcctgtacagataccttcgcctttgtgataacagtcaggaagcctcgtacaacattgctcgagcgtatcaccacattggcctgaataccttggcagctgtttactacgacaaggctttgtcaaccgaggagaaggatcatcccatccccaagcttccgtacgaggctggttcacgtgcgccagaggatctgaggccagggtattgtgatgtgcgaagagaggcagcgttcaatctgcatctaatctatatgaagagtggagctaccgatcttgcgagacggatcctaaaaacttactgcactgtctaaaagctggtatcgggcaatgttgttgggatcggatatcagatccttcaaggctccttgcattagcttaggatcaagctagtctataaagctagaacattggtgtaatatgtcactagtgactttagatgtgtagctgaagagttaacaacgtgcttgatccagatttaaacgtatattctggtttcacaatgctgtgttatagtcaaatggttcagcgatgctttgcttcatgtgatttattggcaattcattattatttttctctcaaacgcacaggagaacgcataggaggactgcacttcattatattaagagaagaaaaggtcaagaggaccaaaatacattgtccatagggcaagccaaaacacttgac

SEQ ID NO: 39087 - DNA, 3361 bp, Zea Mays
ggccatccgaccaccgcagcctaaatcaccttccgtcgccagctcctagaaacccctctcctgcccggcctcctccctctctcatccgatgggcaagtcaagcaagaaggcggccgccgtggctgcagcgccagcggcggtgcccaaggggaagaagcgggaggcggaggacgagatcgagatggccgtgagcgcgaagaagcagaaggcggcgccaccggcgaaggccgtgccgacgtccaagaaggacgccaaggaggacgccaagtccaagaagcagccgccccccaagaaggctgagaacagcagcagtgactctgaagaggaccccgagtccgaagaggagaatttttataatttgattgagtcggggagggcagacggagatgaggagtttgacgaggacgaggaggacgggttcgagttcggtgacgctgacgaggcgatgcaatgcgtggtgatggcggaaagcagcaccaccgccgcggcgctgcgtgctcacacgcaggactacgaggcgctagctgcgcacaagcgcaaggcccttgccgaggagcaaccccagagggaggagggtcccaaaaggccaagaccggaccaactttcagaagcagaagcagcaaccatgttcgaccaactgatggaaggctttggtcttaggcgtaaaagaaggtcaaaagatggcaagagaaggggaagaaagaaaggaacaaagaataagggcagtgctgaagttattaaaaagttgggtgatgctactctacttttcgctgaagaaaaatttaacgaggcaatacctatactacatgagattgtgcgaattgcaccaaatttgtcagattcatattatctacttggtagcatttatagtgagattggtgaactagataaagccataaacttcttgatgctagctgcatatgtttccccaaaggatgcatctctgtggaagaaacttattcccttggcaaagaaaaagggggatgcttctctggcaagacactgcattttaaaagcaatgaacgcagatccagaagatgtagatctgaagtatctttgtggttatatgtatcacaacctttgtgaatatcagaaagctgcagaaatatatgaacaaatagtcagaatttatcctgccaatagtgctgttcgtaaagtagcagcccagatgtacagagagtgtggtcaaattgacaatgctattaatttgttgaaagactatgccgatactcaaactttcaacattgactggagcgttctagatttattgatatcactttatctaagaaataatgtttttagtgaagcactaaagcagatcaagagggcacaactacatttgggatctcaacagaaactaccagtacaattgcaggcaaaagaagtaatctgccatgcatattgcggtgacatgaaacatgctgagattttccttcgtgatgtgcgtttggagccatcaaaagaaaacattgatgtgctcaaggaactcgcaagcaatttagaaaaaatgggacgatatgagtatgcagtaaagttttacctgctaattgaaaatgttgctactcaaaatgatggtggtttatgctttgatcacaaagaaatgggtagttggtatgtcaaagctgctcagtgctacatgatcttaggggacaaaaaaaatgctattccttatttttataaagcgttacaaagcatgaaggacaatattggtatacgattgaccttatcctcccttcttattgatgacgacaagacagatgaagctgccactttgctttctcctcccaaaattccagagttgcagtctgctaatactccagaccaacagaaaccttggtggtgtgatgggaaagttaagatggcgcttgcaaaactttattacaataaaggaaatttggaagattttgtggacacaatttttcatcctattctagaaactttgaatgttgaatatgctaatcgaaaggtcaagtcaatgagaaagcttccaaacattgttctgcatgaaagagtcaaagtattggacaaaaggcaaacagagcaaagaaattaattgagaaaaggaccgctgcaaatgaagagttaaaacatgattatctgccaagaacaaagcaagttcctcctgttcctggtctactgacaaatgtggagcatcatcagcttgtgttaaatctttgtcgaacattagctttgctgcagcgatattgggatgcactgcagattatcaaccgaaccctcaaacttggaaatgacgcactcactggtgacaaaaaagaggaactcagatccttgggtgctcaaatagcttatagagctccagatcccagtcatggctttaagtatgtccgttacgttgttcagcagcacccatattctcttgccgcatggaattcctactataaggtggtatcaagaatagaggacaggtttccacatcatttcaaatatctccttcggacaagagaagcgaatcctgactgtgtgcctccaataatcatatccgggcatcgatttactgctataagtcagcatcagtcagctgcccgggattaccttgaagcttataagctggacccagaaaaccctcttattaatctatgtgtaggcactgccttgattagtttggcccttggcttcaggcttcagaataagaaccagtgcatcgtccaagcttttgctttcctgtacagataccttcgcctttgtgataacagtcaggaagcctcgtacaacattgctcgagcgtatcaccacattggcctgaataccttggcagctgtttactacgacaaggctttgtcaaccgaggagaaggatcatcccatccccaagcttccgtacgaggctggttcacgtgcgccagaggatctgaggccagggtattgtgatgtgcgaagagaggcagcgttcaatctgcatctaatctatatgaagagtggagctaccgatcttgcgagacggatcctaaaaacttactgcactgtctaaaagctggtatcgggcaatgttgttgggatcggatatcagatccttcaaggctccttgcattagcttaggatcaagctagtctataaagctagaacattggtgtaatatgtcactagtgactttagatgtgtagctgaagagttaacaacgtgcttgatccagatttaaacgtatattctggtttcacaatgctgtgttatagtcaaatggttcagcgatgctttgcttcatgtgatttattggcaattcattattatttttctctcaaacgcacaggagaacgcataggaggactgcacttcattatattaagagaagaaaaggtcaagaggaccaaaatacattgtccatagggcaagccaaaacacttgac

SEQ ID NO: 39088 - DNA, 3208 bp, Zea Mays
aaatcaccttccgtcgccagctcctagaaacccctctcctgcccggcctcctccctctctcatccgatgggcaagtcaagcaagaaggcggccgccgtggctgcagcgccagcggcggtgcccaaggggaagaagcgggaggcggaggacgagatcgagatggccgtgagcgcgaagaagcagaaggcggcgccaccggcgaaggccgtgccgacgtccaagaaggacgccaaggaggacgccaagtccaagaagcagccgccccccaagaaggctgagaacagcagcagtgactctgaagaggaccccgagtccgaagaggagaatttttataatttgattgagtcggggagggcagacggagatgaggagtttgacgaggacgaggaggacgggttcgagttcggtgacgctgacgaggcgatgcaatgcgtggtgatggcggaaagcagcaccaccgccgcggcgctgcgtgctcacacgcaggactacgaggcgctagctgcgcacaagcgcaaggcccttgccgaggagcaaccccagagggaggagggtcccaaaaggccaagaccggaccaactttcagaagcagaagcagcaaccatgttcgaccaactgatggaaggctttggtcttaggcgtaaaagaagggcaagagaaggggaagaaagaaaggaacaaagaataagggcagtgctgaagttattaaaaagttgggtgatgctactctacttttcgctgaagaaaaatttaacgaggaaaaagggggatgcttctctggcaagacactgcattttaaaagcaatgaacgcagatccagaagatgtagatctgaagtatctttgtggttatatgtatcacaacctttgtgaatatcagaaagctgcagaaatatatgaacaaatagtcagaatttatcctgccaatagtgctgttcgtaaagtagcagcccagatgtacagagagtgtggtcaaattgacaatgctattaatttgttgaaagactatgccgatactcaaactttcaacattgactggagcgttctagatttattgatatcactttatctaagaaataatgtttttagtgaagcactaaagcagatcaagagggcacaactacatttgggatctcaacagaaactaccagtacaattgcaggcaaaagaagtaatctgccatgcatattgcggtgacatgaaacatgctgagattttccttcgtgatgtgcgtttggagccatcaaaagaaaacattgatgtgctcaaggaactcgcaagcaatttagaaaaaatgggacgatatgagtatgcagtaaagttttacctgctaattgaaaatgttgctactcaaaatgatggtggtttatgctttgatcacaaagaaatgggtagttggtatgtcaaagctgctcagtgctacatgatcttaggggacaaaaaaaatgctattccttatttttataaagcgttacaaagcatgaaggacaatattggtatacgattgaccttatcctcccttcttattgatgacgacaagacagatgaagctgccactttgctttctcctcccaaaattccagagttgcagtctgctaatactccagaccaacagaaaccttggtggtgtgatgggaaagttaagatggcgcttgcaaaactttattacaataaaggaaatttggaagattttgtggacacaatttttcatcctattctagaaactttgaatgttgaatatgctaatcgaaaggtcaagtcaatgagaaagcttccaaacattgttctgcatgaaagagtcaaagtattgggtgagcaacggccagatagtgtatttcaaggattaaggccaatagcatcacctgatgaattacaaaaggcaaacagagcaaagaaattaattgagaaaaggaccgctgcaaatgaagagttaaaacatgattatctgccaagaacaaagcaagttcctcctgttcctggtctactgacaaatgtggagcatcatcagcttgtgttaaatctttgtcgaacattagctttgctgcagcgatattgggatgcactgcagattatcaaccgaaccctcaaacttggaaatgacgcactcactggtgacaaaaaagaggaactcagatccttgggtgctcaaatagcttatagagctccagatcccagtcatggctttaagtatgtccgttacgttgttcagcagcacccatattctcttgccgcatggaattcctactataaggtggtatcaagaatagaggacaggtttccacatcatttcaaatatctccttcggacaagagaagcgaatcctgactgtgtgcctccaataatcatatccgggcatcgatttactgctataagtcagcatcagtcagctgcccgggattaccttgaagcttataagctggacccagaaaaccctcttattaatctatgtgtaggcactgccttgattagtttggcccttggcttcaggcttcagaataagaaccagtgcatcgtccaagcttttgctttcctgtacagataccttcgcctttgtgataacagtcaggaagcctcgtacaacattgctcgagcgtatcaccacattggcctgaataccttggcagctgtttactacgacaaggctttgtcaaccgaggagaaggatcatcccatccccaagcttccgtacgaggctggttcacgtgcgccagaggatctgaggccagggtattgtgatgtgcgaagagaggcagcgttcaatctgcatctaatctatatgaagagtggagctaccgatcttgcgagacggatcctaaaaacttactgcactgtctaaaagctggtatcgggcaatgttgttgggatcggatatcagatccttcaaggctccttgcattagcttaggatcaagctagtctataaagctagaacattggtgtaatatgtcactagtgactttagatgtgtagctgaagagttaacaacgtgcttgatccagatttaaacgtatattctggtttcacaatgctgtgttatagtcaaatggttcagcgatgctttgcttcatgtgatttattggcaattcattattatttttctctcaaacgcacaggagaacgcataggaggactgcacttcattatattaagagaagaaaaggtcaagaggaccaaaatacattgtccatagggcaagccaaaacacttgac

SEQ ID NO: 39089 - DNA, 3381 bp, Zea Mays
tccgtcgccagctcctagaaacccctctcctgcccggcctcctccctctctcatccgatgggcaagtcaagcaagaaggcggccgccgtggctgcagcgccagcggcggtgcccaaggggaagaagcgggaggcggaggacgagatcgagatggccgtgagcgcgaagaagcagaaggcggcgccaccggcgaaggccgtgccgacgtccaagaaggacgccaaggaggacgccaagtccaagaagcagccgccccccaagaaggctgagaacagcagcagtgactctgaagaggaccccgagtccgaagaggagaatttttataatttgattgagtcggggagggcagacggagatgaggagtttgacgaggacgaggaggacgggttcgagttcggtgacgctgacgaggcgatgcaatgcgtggtgatggcggaaagcagcaccaccgccgcggcgctgcgtgctcacacgcaggactacgaggcgctagctgcgcacaagcgcaaggcccttgccgaggagcaaccccagagggaggagggtcccaaaaggccaagaccggaccaactttcagaagcagaagcagcaaccatgttcgaccaactgatggaaggctttggtcttaggcgtaaaagaagggcaagagaaggggaagaaagaaaggaacaaagaataagggcagtgctgaagttattaaaaagttgggtgatgctactctacttttcgctgaagaaaaatttaacgaggcaatacctatactacatgagattgtgcgaattgcaccaaatttgtcagattcatattatctacttggtagcatttatagtgagattggtgaactagataaagccataaacttcttgatgctagctgcatatgtttccccaaaggatgcatctctgtggaagaaacttattcccttggcaaagaaaaagggggatgcttctctggcaagacactgcattttaaaagcaatgaacgcagatccagaagatgtagatctgaagtatctttgtggttatatgtatcacaacctttgtgaatatcagaaagctgcagaaatatatgaacaaatagtcagaatttatcctgccaatagtgctgttcgtaaagtagcagcccagatgtacagagagtgtggtcaaattgacaatgctattaatttgttgaaagactatgccgatactcaaactttcaacattgactggagcgttctagatttattgatatcactttatctaagaaataatgtttttagtgaagcactaaagcagatcaagagggcacaactacatttgggatctcaacagaaactaccagtacaattgcaggcaaaagaagtaatctgccatgcatattgcggtgacatgaaacatgctgagattttccttcgtgatgtgcgtttggagccatcaaaagaaaacattgatgtgctcaaggaactcgcaagcaatttagaaaaaatgggacgatatgagtatgcagtaaagttttacctgctaattgaaaatgttgctactcaaaatgatggtggtttatgctttgatcacaaagaaatgggtagttggtatgtcaaagctgctcagtgctacatgatcttaggggacaaaaaaaatgctattccttatttttataaagcgttacaaagcatgaaggacaatattggtatacgattgaccttatcctcccttcttattgatgacgacaagacagatgaagctgccactttgctttctcctcccaaaattccagagttgcagtctgctaatactccagaccaacagaaaccttggtggtgtgatgggaaagttaagatggcgcttgcaaaactttattacaataaaggaaatttggaagattttgtggacacaatttttcatcctattctagaaactttgaatgttgaatatgctaatcgaaaggtcaagtcaatgagaaagcttccaaacattgttctgcatgaaagagtcaaagtattgggtgagcaacggccagatagtgtatttcaaggattaaggccaatagcatcacctgatgaattacaaaaggcaaacagagcaaagaaattaattgagaaaaggaccgctgcaaatgaagagttaaaacatgattatctgccaagaacaaagcaagttcctcctgttcctggtctactgacaaatgtggagcatcatcagcttgtgttaaatctttgtcgaacattagctttgctgcagcgatattgggatgcactgcagattatcaaccgaaccctcaaacttggaaatgacgcactcactggtgacaaaaaagaggaactcagatccttgggtgctcaaatagcttatagagctccagatcccagtcatggctttaagtatgtccgttacgttgttcagcagcacccatattctcttgccgcatggaattcctactataaggtggtatcaagaatagaggacaggtttccacatcatttcaaatatctccttcggacaagagaagcgaatcctgactgtgtgcctccaataatcatatccgggcatcgatttactgctataagtcagcatcagtcagctgcccgggattaccttgaagcttataagctggacccagaaaaccctcttattaatctatgtgtaggcactgccttgattagtttggcccttggcttcaggcttcagaataagaaccagtgcatcgtccaagcttttgctttcctgtacagataccttcgcctttgtgataacagtcaggaagcctcgtacaacattgctcgagcgtatcaccacattggcctgaataccttggcagctgtttactacgacaaggctttgtcaaccgaggagaaggatcatcccatccccaagcttccgtacgaggctggttcacgtgcgccagaggatctgaggccagggtattgtgatgtgcgaagagaggcagcgttcaatctgcatctaatctatatgaagagtggagctaccgatcttgcgagacggatcctaaaaacttactgcactgtctaaaagctggtatcgggcaatgttgttgggatcggatatcagatccttcaaggctccttgcattagcttaggatcaagctagtctataaagctagaacattggtgtaatatgtcactagtgactttagatgtgtagctgaagagttaacaacgtgcttgatccagatttaaacgtatattctggtttcacaatgctgtgttatagtcaaatggttcagcgatgctttgcttcatgtgatttattggcaattcattattatttttctctcaaacgcacaggagaacgcataggaggactgcacttcattatattaagagaagaaaaggtcaagaggaccaaaatacattgtccatagggcaagccaaaacacttgac

SEQ ID NO: 39090 - DNA, 3377 bp, Zea Mays
gtcgccagctcctagaaacccctctcctgcccggcctcctccctctctcatccgatgggcaagtcaagcaagaaggcggccgccgtggctgcagcgccagcggcggtgcccaaggggaagaagcgggaggcggaggacgagatcgagatggccgtgagcgcgaagaagcagaaggcggcgccaccggcgaaggccgtgccgacgtccaagaaggacgccaaggaggacgccaagtccaagaagcagccgccccccaagaaggctgagaacagcagcagtgactctgaagaggaccccgagtccgaagaggagaatttttataatttgattgagtcggggagggcagacggagatgaggagtttgacgaggacgaggaggacgggttcgagttcggtgacgctgacgaggcgatgcaatgcgtggtgatggcggaaagcagcaccaccgccgcggcgctgcgtgctcacacgcaggactacgaggcgctagctgcgcacaagcgcaaggcccttgccgaggagcaaccccagagggaggagggtcccaaaaggccaagaccggaccaactttcagaagcagaagcagcaaccatgttcgaccaactgatggaaggctttggtcttaggcgtaaaagaagggcaagagaaggggaagaaagaaaggaacaaagaataagggcagtgctgaagttattaaaaagttgggtgatgctactctacttttcgctgaagaaaaatttaacgaggcaatacctatactacatgagattgtgcgaattgcaccaaatttgtcagattcatattatctacttggtagcatttatagtgagattggtgaactagataaagccataaacttcttgatgctagctgcatatgtttccccaaaggatgcatctctgtggaagaaacttattcccttggcaaagaaaaagggggatgcttctctggcaagacactgcattttaaaagcaatgaacgcagatccagaagatgtagatctgaagtatctttgtggttatatgtatcacaacctttgtgaatatcagaaagctgcagaaatatatgaacaaatagtcagaatttatcctgccaatagtgctgttcgtaaagtagcagcccagatgtacagagagtgtggtcaaattgacaatgctattaatttgttgaaagactatgccgatactcaaactttcaacattgactggagcgttctagatttattgatatcactttatctaagaaataatgtttttagtgaagcactaaagcagatcaagagggcacaactacatttgggatctcaacagaaactaccagtacaattgcaggcaaaagaagtaatctgccatgcatattgcggtgacatgaaacatgctgagattttccttcgtgatgtgcgtttggagccatcaaaagaaaacattgatgtgctcaaggaactcgcaagcaatttagaaaaaatgggacgatatgagtatgcagtaaagttttacctgctaattgaaaatgttgctactcaaaatgatggtggtttatgctttgatcacaaagaaatgggtagttggtatgtcaaagctgctcagtgctacatgatcttaggggacaaaaaaaatgctattccttatttttataaaggttacaaagcatgaaggacaatattggtatacgattgaccttatcctcccttcttattgatgacgacaagacagatgaagctgccactttgctttctcctcccaaaattccagagttgcagtctgctaatactccagaccaacagaaaccttggtggtgtgatgggaaagttaagatggcgcttgcaaaactttattacaataaaggaaatttggaagattttgtggacacaatttttcatcctattctagaaactttgaatgttgaatatgctaatcgaaaggtcaagtcaatgagaaagcttccaaacattgttctgcatgaaagagtcaaagtattgggtgagcaacggccagatagtgtatttcaaggattaaggccaatagcatcacctgatgaattacaaaaggcaaacagagcaaagaaattaattgagaaaaggaccgctgcaaatgaagagttaaaacatgattatctgccaagaacaaagcaagttcctcctgttcctggtctactgacaaatgtggagcatcatcagcttgtgttaaatctttgtcgaacattagctttgctgcagcgatattgggatgcactgcagattatcaaccgaaccctcaaacttggaaatgacgcactcactggtgacaaaaaagaggaactcagatccttgggtgctcaaatagcttatagagctccagatcccagtcatggctttaagtatgtccgttacgttgttcagcagcacccatattctcttgccgcatggaattcctactataaggtggtatcaagaatagaggacaggtttccacatcatttcaaatatctccttcggacaagagaagcgaatcctgactgtgtgcctccaataatcatatccgggcatcgatttactgctataagtcagcatcagtcagctgcccgggattaccttgaagcttataagctggacccagaaaaccctcttattaatctatgtgtaggcactgccttgattagtttggcccttggcttcaggcttcagaataagaaccagtgcatcgtccaagcttttgctttcctgtacagataccttcgcctttgtgataacagtcaggaagcctcgtacaacattgctcgagcgtatcaccacattggcctgaataccttggcagctgtttactacgacaaggctttgtcaaccgaggagaaggatcatcccatccccaagcttccgtacgaggctggttcacgtgcgccagaggatctgaggccagggtattgtgatgtgcgaagagaggcagcgttcaatctgcatctaatctatatgaagagtggagctaccgatcttgcgagacggatcctaaaaacttactgcactgtctaaaagctggtatcgggcaatgttgttgggatcggatatcagatccttcaaggctccttgcattagcttaggatcaagctagtctataaagctagaacattggtgtaatatgtcactagtgactttagatgtgtagctgaagagttaacaacgtgcttgatccagatttaaacgtatattctggtttcacaatgctgtgttatagtcaaatggttcagcgatgctttgcttcatgtgatttattggcaattcattattatttttctctcaaacgcacaggagaacgcataggaggactgcacttcattatattaagagaagaaaaggtcaagaggaccaaaatacattgtccatagggcaagccaaaacacttgac

SEQ ID NO: 39091 - DNA, 2675 bp, Zea Mays
caagcaggacgcaagctaagagggctaaatagcaaactataaggcaatacctatactacatgagattgtgcgaattgcaccaaatttgtcagattcatattatctacttggtagcatttatagtgagattggtgaactagataaagccataaacttcttgatgctagctgcatatgtttccccaaaggatgcatctctgtggaagaaacttattcccttggcaaagaaaaagggggatgcttctctggcaagacactgcattttaaaagcaatgaacgcagatccagaagatgtagatctgaagtatctttgtggttatatgtatcacaacctttgtgaatatcagaaagctgcagaaatatatgaacaaatagtcagaatttatcctgccaatagtgctgttcgtaaagtagcagcccagatgtacagagagtgtggtcaaattgacaatgctattaatttgttgaaagactatgccgatactcaaactttcaacattgactggagcgttctagatttattgatatcactttatctaagaaataatgtttttagtgaagcactaaagcagatcaagagggcacaactacatttgggatctcaacagaaactaccagtacaattgcaggcaaaagaagtaatctgccatgcatattgcggtgacatgaaacatgctgagattttccttcgtgatgtgcgtttggagccatcaaaagaaaacattgatgtgctcaaggaactcgcaagcaatttagaaaaaatgggacgatatgagtatgcagtaaagttttacctgctaattgaaaatgttgctactcaaaatgatggtggtttatgctttgatcacaaagaaatgggtagttggtatgtcaaagctgctcagtgctacatgatcttaggggacaaaaaaaatgctattccttatttttataaagcgttacaaagcatgaaggacaatattggtatacgattgaccttatcctcccttcttattgatgacgacaagacagatgaagctgccactttgctttctcctcccaaaattccagagttgcagtctgctaatactccagaccaacagaaaccttggtggtgtgatgggaaagttaagatggcgcttgcaaaactttattacaataaaggaaatttggaagattttgtggacacaatttttcatcctattctagaaactttgaatgttgaatatgctaatcgaaaggtcaagtcaatgagaaagcttccaaacattgttctgcatgaaagagtcaaagtattgggtgagcaacggccagatagtgtatttcaaggattaaggccaatagcatcacctgatgaattacaaaaggcaaacagagcaaagaaattaattgagaaaaggaccgctgcaaatgaagagttaaaacatgattatctgccaagaacaaagcaagttcctcctgttcctggtctactgacaaatgtggagcatcatcagcttgtgttaaatctttgtcgaacattagctttgctgcagcgatattgggatgcactgcagattatcaaccgaaccctcaaacttggaaatgacgcactcactggtgacaaaaaagaggaactcagatccttgggtgctcaaatagcttatagagctccagatcccagtcatggctttaagtatgtccgttacgttgttcagcagcacccatattctcttgccgcatggaattcctactataaggtggtatcaagaatagaggacaggtttccacatcatttcaaatatctccttcggacaagagaagcgaatcctgactgtgtgcctccaataatcatatccgggcatcgatttactgctataagtcagcatcagtcagctgcccgggattaccttgaagcttataagctggacccagaaaaccctcttattaatctatgtgtaggcactgccttgattagtttggcccttggcttcaggcttcagaataagaaccagtgcatcgtccaagcttttgctttcctgtacagataccttcgcctttgtgataacagtcaggaagcctcgtacaacattgctcgagcgtatcaccacattggcctgaataccttggcagctgtttactacgacaaggctttgtcaaccgaggagaaggatcatcccatccccaagcttccgtacgaggctggttcacgtgcgccagaggatctgaggccagggtattgtgatgtgcgaagagaggcagcgttcaatctgcatctaatctatatgaagagtggagctaccgatcttgcgagacggatcctaaaaacttactgcactgtctaaaagctggtatcgggcaatgttgttgggatcggatatcagatccttcaaggctccttgcattagcttaggatcaagctagtctataaagctagaacattggtgtaatatgtcactagtgactttagatgtgtagctgaagagttaacaacgtgcttgatccagatttaaacgtatattctggtttcacaatgctgtgttatagtcaaatggttcagcgatgctttgcttcatgtgatttattggcaattcattattatttttctctcaaacgcacaggagaacgcataggaggactgcacttcattatattaagagaagaaaaggtcaagaggaccaaaatacattgtccatagggcaagccaaaacacttgac

SEQ ID NO: 39092 - DNA, 1901 bp, Zea Mays
aattctatgaatcattggagagagaattagagataagtgtagtacacaatagggtggtttatgctttgatcacaaagaaatgggtagttggtatgtcaaagctgctcagtgctacatgatcttaggggacaaaaaaaatgctattccttatttttataaagcgttacaaagcatgaaggacaatattggtatacgattgaccttatcctcccttcttattgatgacgacaagacagatgaagctgccactttgctttctcctcccaaaattccagagttgcagtctgctaatactccagaccaacagaaaccttggtggtgtgatgggaaagttaagatggcgcttgcaaaactttattacaataaaggaaatttggaagattttgtggacacaatttttcatcctattctagaaactttgaatgttgaatatgctaatcgaaaggtcaagtcaatgagaaagcttccaaacattgttctgcatgaaagagtcaaagtattgggtgagcaacggccagatagtgtatttcaaggattaaggccaatagcatcacctgatgaattacaaaaggcaaacagagcaaagaaattaattgagaaaaggaccgctgcaaatgaagagttaaaacatgattatctgccaagaacaaagcaagttcctcctgttcctggtctactgacaaatgtggagcatcatcagcttgtgttaaatctttgtcgaacattagctttgctgcagcgatattgggatgcactgcagattatcaaccgaaccctcaaacttggaaatgacgcactcactggtgacaaaaaagaggaactcagatccttgggtgctcaaatagcttatagagctccagatcccagtcatggctttaagtatgtccgttacgttgttcagcagcacccatattctcttgccgcatggaattcctactataaggtggtatcaagaatagaggacaggtttccacatcatttcaaatatctccttcggacaagagaagcgaatcctgactgtgtgcctccaataatcatatccgggcatcgatttactgctataagtcagcatcagtcagctgcccgggattaccttgaagcttataagctggacccagaaaaccctcttattaatctatgtgtaggcactgccttgattagtttggcccttggcttcaggcttcagaataagaaccagtgcatcgtccaagcttttgctttcctgtacagataccttcgcctttgtgataacagtcaggaagcctcgtacaacattgctcgagcgtatcaccacattggcctgaataccttggcagctgtttactacgacaaggctttgtcaaccgaggagaaggatcatcccatccccaagcttccgtacgaggctggttcacgtgcgccagaggatctgaggccagggtattgtgatgtgcgaagagaggcagcgttcaatctgcatctaatctatatgaagagtggagctaccgatcttgcgagacggatcctaaaaacttactgcactgtctaaaagctggtatcgggcaatgttgttgggatcggatatcagatccttcaaggctccttgcattagcttaggatcaagctagtctataaagctagaacattggtgtaatatgtcactagtgactttagatgtgtagctgaagagttaacaacgtgcttgatccagatttaaacgtatattctggtttcacaatgctgtgttatagtcaaatggttcagcgatgctttgcttcatgtgatttattggcaattcattattatttttctctcaaacgcacaggagaacgcataggaggactgcacttcattatattaagagaagaaaaggtcaagaggaccaaaatacattgtccatagggcaagccaaaacacttgac

SEQ ID NO: 39093 - DNA, 1889 bp, Zea Mays
atcagctatgcgttgctagagagactgtgcaatgaacatgggtggtttatgctttgatcacaaagaaatgggtagttggtatgtcaaagctgctcagtgctacatgatcttaggggacaaaaaaaatgctattccttatttttataaagcgttacaaagcatgaaggacaatattggtatacgattgaccttatcctcccttcttattgatgacgacaagacagatgaagctgccactttgctttctcctcccaaaattccagagttgcagtctgctaatactccagaccaacagaaaccttggtggtgtgatgggaaagttaagatggcgcttgcaaaactttattacaataaaggaaatttggaagattttgtggacacaatttttcatcctattctagaaactttgaatgttgaatatgctaatcgaaaggtcaagtcaatgagaaagcttccaaacattgttctgcatgaaagagtcaaagtattgggtgagcaacggccagatagtgtatttcaaggattaaggccaatagcatcacctgatgaattacaaaaggcaaacagagcaaagaaattaattgagaaaaggaccgctgcaaatgaagagttaaaacatgattatctgccaagaacaaagcaagttcctcctgttcctggtctactgacaaatgtggagcatcatcagcttgtgttaaatctttgtcgaacattagctttgctgcagcgatattgggatgcactgcagattatcaaccgaaccctcaaacttggaaatgacgcactcactggtgacaaaaaagaggaactcagatccttgggtgctcaaatagcttatagagctccagatcccagtcatggctttaagtatgtccgttacgttgttcagcagcacccatattctcttgccgcatggaattcctactataaggtggtatcaagaatagaggacaggtttccacatcatttcaaatatctccttcggacaagagaagcgaatcctgactgtgtgcctccaataatcatatccgggcatcgatttactgctataagtcagcatcagtcagctgcccgggattaccttgaagcttataagctggacccagaaaaccctcttattaatctatgtgtaggcactgccttgattagtttggcccttggcttcaggcttcagaataagaaccagtgcatcgtccaagcttttgctttcctgtacagataccttcgcctttgtgataacagtcaggaagcctcgtacaacattgctcgagcgtatcaccacattggcctgaataccttggcagctgtttactacgacaaggctttgtcaaccgaggagaaggatcatcccatccccaagcttccgtacgaggctggttcacgtgcgccagaggatctgaggccagggtattgtgatgtgcgaagagaggcagcgttcaatctgcatctaatctatatgaagagtggagctaccgatcttgcgagacggatcctaaaaacttactgcactgtctaaaagctggtatcgggcaatgttgttgggatcggatatcagatccttcaaggctccttgcattagcttaggatcaagctagtctataaagctagaacattggtgtaatatgtcactagtgactttagatgtgtagctgaagagttaacaacgtgcttgatccagatttaaacgtatattctggtttcacaatgctgtgttatagtcaaatggttcagcgatgctttgcttcatgtgatttattggcaattcattattatttttctctcaaacgcacaggagaacgcataggaggactgcacttcattatattaagagaagaaaaggtcaagaggaccaaaatacattgtccatagggcaagccaaaacacttgac

SEQ ID NO: 39094 - DNA, 1819 bp, Zea Mays
agcagagttgagcagctcgtgtggactcaatcttttgtgctgatgttagcaagctggtgaaatacattgctagtgctggaagcttgcaaggggggcacagtttatcagagccgtctgccagacattacagctctgaaccttcacttcaggcgacagaagaaaatgggtttaaggggcacagcatgctggctccattcacagcgggatggcagagcactgatgtacacccattggttatagagagatcagagggttcttatgtctatgacagcaatgggaagaagtatattgatgctcttgcaggactgtggtgcacagctttaggtggtaatgagcctcgactagtcaaagcggcaactgagcaattaaacaaattaccgttctaccattccttttggaaccgtacaaccaaaccctcattggatctcgcaaatgatattctcagcatgttcaccgcaagggagatgggaaaggtgttcttcacaaatagtggttcagaagcaaatgactcccaggttaaactagtgtggtattataataatgcactgggaaggccagacaagaagaaatttattgctcgctcaaaatcgtaccatggatcaaccttgattgcagctagtctatcaggtctgccagcgcttcatcagaagtttgatctaccagcaccttttgtcctgcacacagactgccctcactactggcgattccgtcttcctgatgagacagaagaagagttttcaactagacttgccaataatttggagaatcttgtcctcaaagaaggacctgaaacaattgctgctttcattgctgaacctgtgatgggcgctggtggtgttatccttcctccaaagacctattttgagaagattcaggcagttctgaagaagtatgacatcttgttaattgcggatgaggtcattactgcatttggaagactagggacaatgtttggatgtgatatgtataatattaaaccagatcttgtttccatagccaaggctctttcttctgcatatatgccaattggagcaattctcgttagcccagaaataacggatgtaatctattctcagagcaataaacttggttcttttgctcatggctttacatactcgggacatcctgtttcttgtgccgttgctgtagaaaccttgaagatatataaggaaaggaatattgtagaacacgtcaacaaaattgctccaaggttccaggagggaatcaaggccttctcaggcagcccaattgttggggagatacgcggtctgggactgatacttggaactgaatttgtcgacaacaaatctccaaatgatccatttccagctgaatggggtgttggttcgatatttggcgcggagtgcgagaagcgtgggatgctcatcagggtggctggggacagcatcatgctgtcacccccgctgatcatgactcccaatgaagtcgaagaaatcataagcaaattcggcgatgctctgaaggctacagaggaacggattgtagaactgaaatccaggaagaattagccgatgctgctggttgtaacgacagtgaggatggtgatggcagtgtccaatatacagtgtattttcaaactttatttcagtaaagtgctgggctggaatcttgtagtcggttgcatagcgacagttgttccttgttatggagcaataagtaatgcatctgcttaatcagagtagcatacccttgggtttgtgctggtacaggtttttcaaatgaacatagcttggtataatgtagggccatagtacccccccacccccccccccccccccccacacacacacacaaaacg

SEQ ID NO: 39095 - DNA, 2353 bp, Zea Mays
cagcaaacccccaatctcgtgtctcctcccctttcgagcctgtcgttgtctcaatagctcaatcctcattccttcaggcttcagggttctcaatgatcggcggcactgcccttaccaccacacgccgcctccgtcttctgtgaaagatcaagaattcgccgccgtctcagctgatcttcgcgcgtgcagtctacctgttcgacgagatgcctacgaaggtcacgaagccgtgggtgccggttaactggaccggggaagcatcgtcatcacgcgggcactcggtaggaggtgggggactcgaactcgagcccgccgctgaccgcctcagcgcgctgcccgacgtgctcctccaccacgtcatgtcgttcatgaaggcgtgggacgcggtacgcacgtgcgtgctctcgcggcggtggcgcgacctctgggcctctgcgccctgtgtggacatccgtgtggggaggtatagcgaaccgccccaggacttttccaagttcgtgtaccggctgctgcttgctagggaggcccttgcgccgataaacactctcaggctgcggtcaccaactgattacgacgaggatttcgacaattctgatgttaagatgtggatccgccatgcaatcagactgaatgcttgcgctattcagctaactggtcatcccaatttgtctgcggagcttgattctatagacttggtctctcaccacctcaaaatcttgaaactggcctatactttagtgcttgatagcttcaccagacagctctcgtctcggtgcccttctttggaggaactagagctcaaggactgtttggtagagtgccgcgagattacatctgtctctctgaagaggttgaccatggtcaagtgcacttttgcaaagaacttctttgttaatgctccaaaccttgtgtttgtgcagtgcatcgcaccagatacttgggtccctgtgttcaagaactttggggtgctggtaacaggtagtgtgatgcttgatgactctttactgagccgtgactttaaaaagtaccaatacgatgatgatgaatatcctcaaacaagtgatgatgatgatgacaacaacagtacatttgcccctgctaaatatgttcctgattctgatgacagtgatgaaatcctcagtgatgattctgaattcttagatgatttttatgatgagcattttgatgatatcaaggacaattatgattatggaagtgatatcaatagtgatagtgaaacctatgagtacagtgagattgcaaatgactatggagataaccagtttggaacccgtgataatgaacttgatcacactaggggcagtaaagatcatggttgcagtgcaaaacatatcattaatgattataaaaattttggtggccaaaatgttcttcattgcctttcaaatgctcgacatctagagctgttaggtcattctggagaggtcattatgaggagagaatcgttaaattgtccaacttttagcaacctgaagactttggccctgggagaatggtgtatcagtacggttgctgacttcgacatattacttgtcttgcttcagcattcacctagtctggagaagctttatcttcagcttgaaatgatcttcgtatcttgaaggaggagaggggtattgccatcgatgaactgcgtagatcttgatccgattcctattaaaaacagaaatgtgcgatgtgacaaatatgtactctttttcagtaccttgtagacctgtttcagctctagttgatgattggaacatcatttatgcagagaacttgcagggcatgtggcgatagaatgcatgattgtctcgcacatctctattaagttgtcttgtcagctgatatcgtttgaagaacaaagttcagattcgagcaccttggttagtaaatcgtggtttagtagcgtgggttattcgttagcctgttgtcttttaacacatcgtggtttacggtctgtggttcagtttcgagtttctactgtgtaggggctaggggcatctatgttcaacatattctctaatctctaagcacgacagacctacaaatattttagtgttagataggagggaaatttatagtgatagtgtggagtggagacatccttatgggttccattcattagccacattggatattggcaataagtttttttttgaagattttaatagtaaaagtaagggtctgttcggacttaaaaaatttcggtttcatttaagcttcttttatccaaacaagtctagctccacgagctttagctttgaaaaaaaaactttaggtcacctttataaaattcacgaagctcctcaagagtgcttcacaaacaccgtttttatatcttctcgtg

SEQ ID NO: 39096 - DNA, 2336 bp, Zea Mays
cccaatctcgtgtctcctcccctttcgagcctgtcgttgtctcaatagctcaatcctcattccttcaggcttcagggttctcaatgatcggcggcactgcccttaccaccacacgccgcctccgtcttctgtgaaagatcaagaattcgccgccgtctcagctgatcttcgctctacctgttcgacgagatgcctacgaaggtcacgaagccgtgggtgccggttaactggaccggggaagcatcgtcatcacgcgggcactcggtaggaggtgggggactcgaactcgagcccgccgctgaccgcctcagcgcgctgcccgacgtgctcctccaccacgtcatgtcgttcatgaaggcgtgggacgcggtacgcacgtgcgtgctctcgcggcggtggcgcgacctctgggcctctgcgccctgtgtggacatccgtgtggggaggtatagcgaaccgccccaggacttttccaagttcgtgtaccggctgctgcttgctagggaggcccttgcgccgataaacactctcaggctgcggtcaccaactgattacgacgaggatttcgacaattctgatgttaagatgtggatccgccatgcaatcagactgaatgcttgcgctattcagctaactggtcatcccaatttgtctgcggagcttgattctatagacttggtctctcaccacctcaaaatcttgaaactggcctatactttagtgcttgatagcttcaccagacagctctcgtctcggtgcccttctttggaggaactagagctcaaggactgtttggtagagtgccgcgagattacatctgtctctctgaagaggttgaccatggtcaagtgcacttttgcaaagaacttctttgttaatgctccaaaccttgtgtttgtgcagtgcatcgcaccagatacttgggtccctgtgttcaagaactttggggtgctggtaacaggtagtgtgatgcttgatgactctttactgagccgtgactttaaaaagtaccaatacgatgatgatgaatatcctcaaacaagtgatgatgatgatgacaacaacagtacatttgcccctgctaaatatgttcctgattctgatgacagtgatgaaatcctcagtgatgattctgaattcttagatgatttttatgatgagcattttgatgatatcaaggacaattatgattatggaagtgatatcaatagtgatagtgaaacctatgagtacagtgagattgcaaatgactatggagataaccagtttggaacccgtgataatgaacttgatcacactaggggcagtaaagatcatggttgcagtgcaaaacatatcattaatgattataaaaattttggtggccaaaatgttcttcattgcctttcaaatgctcgacatctagagctgttaggtcattctggagaggtcattatgaggagagaatcgttaaattgtccaacttttagcaacctgaagactttggccctgggagaatggtgtatcagtacggttgctgacttcgacatattacttgtcttgcttcagcattcacctagtctggagaagctttatcttcagcttgaaatgatcttcgtatcttgaaggaggagaggggtattgccatcgatgaactgcgtagatcttgatccgattcctattaaaaacagaaatgtgcgatgtgacaaatatgtactctttttcagtaccttgtagacctgtttcagctctagttgatgattggaacatcatttatgcagagaacttgcagggcatgtggcgatagaatgcatgattgtctcgcacatctctattaagttgtcttgtcagctgatatcgtttgaagaacaaagttcagattcgagcaccttggttagtaaatcgtggtttagtagcgtgggttattcgttagcctgttgtcttttaacacatcgtggtttacggtctgtggttcagtttcgagtttctactgtgtaggggctaggggcatctatgttcaacatattctctaatctctaagcacgacagacctacaaatattttagtgttagataggagggaaatttatagtgatagtgtggagtggagacatccttatgggttccattcattagccacattggatattggcaataagtttttttttgaagattttaatagtaaaagtaagggtctgttcggacttaaaaaatttcggtttcatttaagcttcttttatccaaacaagtctagctccacgagctttagctttgaaaaaaaaactttaggtcacctttataaaattcacgaagctcctcaagagtgcttcacaaacaccgtttttatatcttctcgtg

SEQ ID NO: 39097 - DNA, 968 bp, Zea Mays
ctgcgcactgcttctccccacggcgcacgccagccgtcagcccgtcaccgattgttctggctcctgcgcgccgccagccccgcttgttctggctcctgcgcgccgccagccgtcagcccgtcaccgattggagatccttggacacctgcgcgccgccagcccgtcaccgcttggagacccgcgcagccgcgcttccctgcgcgccgccagccgtcgccgatccgtggccgcgtccgccgccgccagccctaaggtcgcgccgtcagccagcccgtctgccgtcgtgagagttatctggtggactaaacatgatatttaggcgctgggccacgaaaaggactgctggatcaacaaaaaatggtcgcgattccaatccaaagtatttgggggtaaagaagtttggtggagagaaagtactaccagggaacatcattgtccgccaaagagggacccgcttccatcctggaaactatgttggcatgggcaaggatcatacacttttctgcctgaaagaaggcaatgtacgctttgagcgcaacaaactctcaggcaggaaatgggttcatgttgatccagttgctggtcatgatcttcaccccatttacgcagatggttttgctactacatccgacactgagccaatgcaataaatgtgcttggggatttgggctgtcattttgttccaactcattcagctgccattttacagtttcatgtgtaaactttagcaggcttgaacgtagctggatcttttctttgtaatcataactactttgaataatataagttatacactgtaagctttgttctcatggttaacttcagatttcaaatatgatgtcactacaatggagttcttatcattgtagaggttgttttaccgtgtttacatattctttatcatgaattgtttgattattctgaaaatgcaatttgcatgagacttaagtgctagtatgttgttattt

SEQ ID NO: 39098 - DNA, 1423 bp, Zea Mays
ctgcgcactgcttctccccacggcgcacgccagccgtcagcccgtcaccgattgttctggctcctgcgcgccgccagccccgcttgttctggctcctgcgcgccgccagccgtcagcccgtcaccgattggagatccttggacacctgcgcgccgccagcccgtcaccgcttggagacccgcgcagccgcgcttccctgcgcgccgccagccgtcgccgatccgtggccgcgtccgccgccgccagccctaaggtcgcgccgtcagccagcccgtctgccgtcgtgaggtactgaggaatttttctggtaatcagcatggcactgtcatcaatgtttaagagaataaatgtgaaagatttgacctccaaggtttcagtctataccagtgctacagagttatctggtggactaaacatgatatttaggcgctgggccacgaaaaggactgctggatcaacaaaaaatggtcgcgattccaatccaaagtatttgggggtaaagaagtttggtggagaggtaccactttcaaataccccattctgattctttaaaagaaaggcattatctttaagcatatagtgagaagcactctccatgattagcatctaaatagctaatttgacagttccagtccattgcactaatcatgtggtcagcggcttgcttcaagtttttcctttggcacttaagcagttgacacatagtaacatatacttggctccagtactatgattcagtatatttatcaactattcgttggtcacttaatcttctacatttttatcttatgataccaaaggttggacatattgaactcttaccgctgctatgctcctcatctgatgacagttcttattttctcagaaagtactaccagggaacatcattgtccgccaaagagggacccgcttccatcctggaaactatgttggcatgggcaaggatcatacacttttctgcctgaaagaaggcaatgtacgctttgagcgcaacaaactctcaggcaggaaatgggttcatgttgatccagttgctggtcatgatcttcaccccatttacgcagatggttttgctactacatccgacactgagccaatgcaataaatgtgcttggggatttgggctgtcattttgttccaactcattcagctgccattttacagtttcatgtgtaaactttagcaggcttgaacgtagctggatcttttctttgtaatcataactactttgaataatataagttatacactgtaagctttgttctcatggttaacttcagatttcaaatatgatgtcactacaatggagttcttatcattgtagaggttgttttaccgtgtttacatattctttatcatgaattgtttgattattctgaaaatgcaatttgcatgagacttaagtgctagtatgttgttattt

SEQ ID NO: 39099 - DNA, 1384 bp, Zea Mays
ctgcgcactgcttctccccacggcgcacgccagccgtcagcccgtcaccgattgttctggctcctgcgcgccgccagccccgcttgttctggctcctgcgcgccgccagccgtcagcccgtcaccgattggagatccttggacacctgcgcgccgccagcccgtcaccgcttggagacccgcgcagccgcgcttccctgcgcgccgccagccgtcgccgatccgtggccgcgtccgccgccgccagccctaaggtcgcgccgtcagccagcccgtctgccgtcgtgaggaatttttctggtaatcagcatggcactgtcatcaatgtttaagagaataaatgtgaaagatttgacctccaaggtttcagtctataccagtgctacaggcgctgggccacgaaaaggactgctggatcaacaaaaaatggtcgcgattccaatccaaagtatttgggggtaaagaagtttggtggagaggtaccactttcaaataccccattctgattctttaaaagaaaggcattatctttaagcatatagtgagaagcactctccatgattagcatctaaatagctaatttgacagttccagtccattgcactaatcatgtggtcagcggcttgcttcaagtttttcctttggcacttaagcagttgacacatagtaacatatacttggctccagtactatgattcagtatatttatcaactattcgttggtcacttaatcttctacatttttatcttatgataccaaaggttggacatattgaactcttaccgctgctatgctcctcatctgatgacagttcttattttctcagaaagtactaccagggaacatcattgtccgccaaagagggacccgcttccatcctggaaactatgttggcatgggcaaggatcatacacttttctgcctgaaagaaggcaatgtacgctttgagcgcaacaaactctcaggcaggaaatgggttcatgttgatccagttgctggtcatgatcttcaccccatttacgcagatggttttgctactacatccgacactgagccaatgcaataaatgtgcttggggatttgggctgtcattttgttccaactcattcagctgccattttacagtttcatgtgtaaactttagcaggcttgaacgtagctggatcttttctttgtaatcataactactttgaataatataagttatacactgtaagctttgttctcatggttaacttcagatttcaaatatgatgtcactacaatggagttcttatcattgtagaggttgttttaccgtgtttacatattctttatcatgaattgtttgattattctgaaaatgcaatttgcatgagacttaagtgctagtatgttgttattt

SEQ ID NO: 39100 - DNA, 1036 bp, Zea Mays
ctgcgcactgcttctccccacggcgcacgccagccgtcagcccgtcaccgattgttctggctcctgcgcgccgccagccccgcttgttctggctcctgcgcgccgccagccgtcagcccgtcaccgattggagatccttggacacctgcgcgccgccagcccgtcaccgcttggagacccgcgcagccgcgcttccctgcgcgccgccagccgtcgccgatccgtggccgcgtccgccgccgccagccctaaggtcgcgccgtcagccagcccgtctgccgtcgtgaggaatttttctggtaatcagcatggcactgtcatcaatgtttaagagaataaatgtgaaagatttgacctccaaggtttcagtctataccagtgctacaggcgctgggccacgaaaaggactgctggatcaacaaaaaatggtcgcgattccaatccaaagtatttgggggtaaagaagtttggtggagagaaagtactaccagggaacatcattgtccgccaaagagggacccgcttccatcctggaaactatgttggcatgggcaaggatcatacacttttctgcctgaaagaaggcaatgtacgctttgagcgcaacaaactctcaggcaggaaatgggttcatgttgatccagttgctggtcatgatcttcaccccatttacgcagatggttttgctactacatccgacactgagccaatgcaataaatgtgcttggggatttgggctgtcattttgttccaactcattcagctgccattttacagtttcatgtgtaaactttagcaggcttgaacgtagctggatcttttctttgtaatcataactactttgaataatataagttatacactgtaagctttgttctcatggttaacttcagatttcaaatatgatgtcactacaatggagttcttatcattgtagaggttgttttaccgtgtttacatattctttatcatgaattgtttgattattctgaaaatgcaatttgcatgagacttaagtgctagtatgttgttattt

SEQ ID NO: 39101 - DNA, 1415 bp, Zea Mays
ctgcgcactgcttctccccacggcgcacgccagccgtcagcccgtcaccgattgttctggctcctgcgcgccgccagccccgcttgttctggctcctgcgcgccgccagccgtcagcccgtcaccgattggagatccttggacacctgcgcgccgccagcccgtcaccgcttggagacccgcgcagccgcgcttccctgcgcgccgccagccgtcgccgatccgtggccgcgtccgccgccgccagccctaaggtcgcgccgtcagccagcccgtctgccgtcgtgaggaatttttctggtaatcagcatggcactgtcatcaatgtttaagagaataaatgtgaaagatttgacctccaaggtttcagtctataccagtgctacagagttatctggtggactaaacatgatatttaggcgctgggccacgaaaaggactgctggatcaacaaaaaatggtcgcgattccaatccaaagtatttgggggtaaagaagtttggtggagaggtaccactttcaaataccccattctgattctttaaaagaaaggcattatctttaagcatatagtgagaagcactctccatgattagcatctaaatagctaatttgacagttccagtccattgcactaatcatgtggtcagcggcttgcttcaagtttttcctttggcacttaagcagttgacacatagtaacatatacttggctccagtactatgattcagtatatttatcaactattcgttggtcacttaatcttctacatttttatcttatgataccaaaggttggacatattgaactcttaccgctgctatgctcctcatctgatgacagttcttattttctcagaaagtactaccagggaacatcattgtccgccaaagagggacccgcttccatcctggaaactatgttggcatgggcaaggatcatacacttttctgcctgaaagaaggcaatgtacgctttgagcgcaacaaactctcaggcaggaaatgggttcatgttgatccagttgctggtcatgatcttcaccccatttacgcagatggttttgctactacatccgacactgagccaatgcaataaatgtgcttggggatttgggctgtcattttgttccaactcattcagctgccattttacagtttcatgtgtaaactttagcaggcttgaacgtagctggatcttttctttgtaatcataactactttgaataatataagttatacactgtaagctttgttctcatggttaacttcagatttcaaatatgatgtcactacaatggagttcttatcattgtagaggttgttttaccgtgtttacatattctttatcatgaattgtttgattattctgaaaatgcaatttgcatgagacttaagtgctagtatgttgttattt

SEQ ID NO: 39102 - DNA, 1705 bp, Zea Mays
ccaaacacaatctaatagaaaacatttcgcgcaccacagaagcaggctggacggtatttgcatcgcgcattcgcgccggtctggccaatctctagttctctactgcacggtgaccgatcaacgacagtcgacagttgcagtgcagccgagttcaagagttcagtttagagagagagagggggagagtgatttgccgacttgccagttgccgcacaaagctcctctagcacctctgtgtggccgacttgtccccggtatcaccaagtctgcaggcctccccagtcgtcgccggcgagggaacgcgccgcccgtgacgccgcgggttgttggcgccggcgttgaggccacaagcgcgccagcatcaggacctcacaggtgattcaatcctgaaggcatcaactatgttcaattttcaagaaatgtcttgctgttttacgtgtgcgacgggcatggaacgaaataatgaaaacgaaggaggaagcaaggtgaggattttttcctacagtgagatgaggaaagctacgcatgattttagtggagcaaacaagattggcgagggcggtttcggctccgttttcagggggaagcttaaagatggaacgatcgtcgcggtgaaagtcctttctgctaattcaagggtcccagaggattcttgtgtacaattatctcgagaacaatagtctttcatatacacttctaggttcgggccggagcaacattcggttcaactggagagcccgtgtcaagattgctgtaggcgttgctcgtgggcttgcttatcttcacgatggaattcggccccctataattcatcgagatataaaggcgagcaacattctccttgacaaggacctcaccccaaagatctctgatttcgggctggcaaggctcctccccccaaacgcaactcatgtgagcactagggttgcaggaacaataggatacctggctcctgaatacgctgtgagggggcaagtgacgaagaaatcggatatctatagtttcggcgttttgctactggaaattgttgctggtagatgtaactacaacagtagattgcctcagggagaccagtttctgcttgagaagacatgggcatactacgtgcagggaaagctagagaaggtcatagacgccgaagcaggggaggacctgaacgtcgaggaggcatgccgtttcttgaaggttggcctactatgcgcccaagacgcgatgaagctgcgtccgaacatggccagcgtcgtcctgatgctgataggagagaagggaatctccgtggacaggatcaccaagccagccgtgatcggtgacccgtacctcgaccggaggccaagcaacgcagactctaccacgatgaagtccttcgccacgaccgaagctttaacgtcatcagaggcaaacacggagtggtctctgtgatggggggaaaaaacgtcatcatcgatggagatttgtttttgtggatgctgcagttgccaaacaaataccgcatcgcttctgttgattatgtttgtttgttatttttgtgtgtgtgtatatatacttgaaatggaaccacgggagtgaaacgaggattgaatatgctttacccatctttggtacaagtagaatcgtttgtgtttctatcatattcactctctttttttttcttctggaacatgtatgttatcttttcagtctgatcacctttgtaggtcagttccag

SEQ ID NO: 39103 - DNA, 1717 bp, Zea Mays
ccaaacacaatctaatagaaaacatttcgcgcaccacagaagcaggctggacggtatttgcatcgcgcattcgcgccggtctggccaatctctagttctctactgcacggtgaccgatcaacgacagtcgacagttgcagtgcagccgagttcaagagttcagtttagagagagagagggggagagtgatttgccgacttgccagttgccgcacaaagctcctctagcacctctgtgtggccgacttgtccccggtatcaccaagtctgcaggcctccccagtcgtcgccggcgagggaacgcgccgcccgtgacgccgcgggttgttggcgccggcgttgaggccacaagcgcgccagcatcaggacctcacaggtgattcaatcctgaaggcatcaactatgttcaattttcaagaaatgtcttgctgttttacgtgtgcgacgggcatggaacgaaataatgaaaacgaaggtgaccagttttgaggaagcaaggtgaggattttttcctacagtgagatgaggaaagctacgcatgattttagtggagcaaacaagattggcgagggcggtttcggctccgttttcagggggaagcttaaagatggaacgatcgtcgcggtgaaagtcctttctgctaattcaagggtcccagaggattcttgtgtacaattatctcgagaacaatagtctttcatatacacttctaggttcgggccggagcaacattcggttcaactggagagcccgtgtcaagattgctgtaggcgttgctcgtgggcttgcttatcttcacgatggaattcggccccctataattcatcgagatataaaggcgagcaacattctccttgacaaggacctcaccccaaagatctctgatttcgggctggcaaggctcctccccccaaacgcaactcatgtgagcactagggttgcaggaacaataggatacctggctcctgaatacgctgtgagggggcaagtgacgaagaaatcggatatctatagtttcggcgttttgctactggaaattgttgctggtagatgtaactacaacagtagattgcctcagggagaccagtttctgcttgagaagacatgggcatactacgtgcagggaaagctagagaaggtcatagacgccgaagcaggggaggacctgaacgtcgaggaggcatgccgtttcttgaaggttggcctactatgcgcccaagacgcgatgaagctgcgtccgaacatggccagcgtcgtcctgatgctgataggagagaagggaatctccgtggacaggatcaccaagccagccgtgatcggtgacccgtacctcgaccggaggccaagcaacgcagactctaccacgatgaagtccttcgccacgaccgaagctttaacgtcatcagaggcaaacacggagtggtctctgtgatggggggaaaaaacgtcatcatcgatggagatttgtttttgtggatgctgcagttgccaaacaaataccgcatcgcttctgttgattatgtttgtttgttatttttgtgtgtgtgtatatatacttgaaatggaaccacgggagtgaaacgaggattgaatatgctttacccatctttggtacaagtagaatcgtttgtgtttctatcatattcactctctttttttttcttctggaacatgtatgttatcttttcagtctgatcacctttgtaggtcagttccag

SEQ ID NO: 39104 - DNA, 1655 bp, Zea Mays
atttgcatcgcgcattcgcgccggtctggccaatctctagttctctactgcacggtgaccgatcaacgacagtcgacagttgcagtgcagccgttcagagttcaagagttcagtttagagagagagagggggagagtgatttgccgacttgccagttgccgcacaaagctcctctagcacctctgtgtggccgacttgtccccggtatcaccaagtctgcaggcctccccagtcgtcgccggcgagggaacgcgccgcccgtgacgccgcgggttgttggcgccggcgttgaggccacaagcgcgccagcatcaggacctcacaggtgattcaatcctgaaggcatcaactatgttcaattttcaagaaatgtcttgctgttttacgtgtgcgacgggcatggaacgaaataatgaaaacgaaggaggaagcaaggtgaggattttttcctacagtgagatgaggaaagctacgcatgattttagtggagcaaacaagattggcgagggcggtttcggctccgttttcagggggaagcttaaagatggaacgatcgtcgcggtgaaagtcctttctgctaattcaagggtcccagaggattcttgtgtacaattatctcgagaacaatagtctttcatatacacttctaggttcgggccggagcaacattcggttcaactggagagcccgtgtcaagattgctgtaggcgttgctcgtgggcttgcttatcttcacgatggaattcggccccctataattcatcgagatataaaggcgagcaacattctccttgacaaggacctcaccccaaagatctctgatttcgggctggcaaggctcctccccccaaacgcaactcatgtgagcactagggttgcaggaacaataggatacctggctcctgaatacgctgtgagggggcaagtgacgaagaaatcggatatctatagtttcggcgttttgctactggaaattgttgctggtagatgtaactacaacagtagattgcctcagggagaccagtttctgcttgagaagacatgggcatactacgtgcagggaaagctagagaaggtcatagacgccgaagcaggggaggacctgaacgtcgaggaggcatgccgtttcttgaaggttggcctactatgcgcccaagacgcgatgaagctgcgtccgaacatggccagcgtcgtcctgatgctgataggagagaagggaatctccgtggacaggatcaccaagccagccgtgatcggtgacccgtacctcgaccggaggccaagcaacgcagactctaccacgatgaagtccttcgccacgaccgaagctttaacgtcatcagaggcaaacacggagtggtctctgtgatggggggaaaaaacgtcatcatcgatggagatttgtttttgtggatgctgcagttgccaaacaaataccgcatcgcttctgttgattatgtttgtttgttatttttgtgtgtgtgtatatatacttgaaatggaaccacgggagtgaaacgaggattgaatatgctttacccatctttggtacaagtagaatcgtttgtgtttctatcatattcactctctttttttttcttctggaacatgtatgttatcttttcagtctgatcacctttgtaggtcagttccag

SEQ ID NO: 39105 - DNA, 1635 bp, Zea Mays
ctcctcctcctcctcctcctctctctctctcctgggttagaagacgctcttttcttacggcggcgccaaagtggtgttcgaccagatgggagcgatgtgcgtcggctattcgcccctttctggtgcggtcaggtttgccgtatgtttcatgtgatctattgaactggattttcgagcgtcgtgctggttgatcttgttattgtaagttcttatgaatgtttgaggcatgaggatatgtaattagtggagtccgtacggtgagttgcctctgcaaaaaaaaaaggacctcacaggtgattcaatcctgaaggcatcaactatgttcaattttcaagaaatgtcttgctgttttacgtgtgcgacgggcatggaacgaaataatgaaaacgaaggtgaccagttttgaggaagcaaggtgaggattttttcctacagtgagatgaggaaagctacgcatgattttagtggagcaaacaagattggcgagggcggtttcggctccgttttcagggggaagcttaaagatggaacgatcgtcgcggtgaaagtcctttctgctaattcaagggtcccagaggattcttgtgtacaattatctcgagaacaatagtctttcatatacacttctaggttcgggccggagcaacattcggttcaactggagagcccgtgtcaagattgctgtaggcgttgctcgtgggcttgcttatcttcacgatggaattcggccccctataattcatcgagatataaaggcgagcaacattctccttgacaaggacctcaccccaaagatctctgatttcgggctggcaaggctcctccccccaaacgcaactcatgtgagcactagggttgcaggaacaataggatacctggctcctgaatacgctgtgagggggcaagtgacgaagaaatcggatatctatagtttcggcgttttgctactggaaattgttgctggtagatgtaactacaacagtagattgcctcagggagaccagtttctgcttgagaagacatgggcatactacgtgcagggaaagctagagaaggtcatagacgccgaagcaggggaggacctgaacgtcgaggaggcatgccgtttcttgaaggttggcctactatgcgcccaagacgcgatgaagctgcgtccgaacatggccagcgtcgtcctgatgctgataggagagaagggaatctccgtggacaggatcaccaagccagccgtgatcggtgacccgtacctcgaccggaggccaagcaacgcagactctaccacgatgaagtccttcgccacgaccgaagctttaacgtcatcagaggcaaacacggagtggtctctgtgatggggggaaaaaacgtcatcatcgatggagatttgtttttgtggatgctgcagttgccaaacaaataccgcatcgcttctgttgattatgtttgtttgttatttttgtgtgtgtgtatatatacttgaaatggaaccacgggagtgaaacgaggattgaatatgctttacccatctttggtacaagtagaatcgtttgtgtttctatcatattcactctctttttttttcttctggaacatgtatgttatcttttcagtctgatcacctttgtaggtcagttccag

SEQ ID NO: 39106 - DNA, 1623 bp, Zea Mays
ctcctcctcctcctcctcctctctctctctcctgggttagaagacgctcttttcttacggcggcgccaaagtggtgttcgaccagatgggagcgatgtgcgtcggctattcgcccctttctggtgcggtcaggtttgccgtatgtttcatgtgatctattgaactggattttcgagcgtcgtgctggttgatcttgttattgtaagttcttatgaatgtttgaggcatgaggatatgtaattagtggagtccgtacggtgagttgcctctgcaaaaaaaaaaggacctcacaggtgattcaatcctgaaggcatcaactatgttcaattttcaagaaatgtcttgctgttttacgtgtgcgacgggcatggaacgaaataatgaaaacgaaggaggaagcaaggtgaggattttttcctacagtgagatgaggaaagctacgcatgattttagtggagcaaacaagattggcgagggcggtttcggctccgttttcagggggaagcttaaagatggaacgatcgtcgcggtgaaagtcctttctgctaattcaagggtcccagaggattcttgtgtacaattatctcgagaacaatagtctttcatatacacttctaggttcgggccggagcaacattcggttcaactggagagcccgtgtcaagattgctgtaggcgttgctcgtgggcttgcttatcttcacgatggaattcggccccctataattcatcgagatataaaggcgagcaacattctccttgacaaggacctcaccccaaagatctctgatttcgggctggcaaggctcctccccccaaacgcaactcatgtgagcactagggttgcaggaacaataggatacctggctcctgaatacgctgtgagggggcaagtgacgaagaaatcggatatctatagtttcggcgttttgctactggaaattgttgctggtagatgtaactacaacagtagattgcctcagggagaccagtttctgcttgagaagacatgggcatactacgtgcagggaaagctagagaaggtcatagacgccgaagcaggggaggacctgaacgtcgaggaggcatgccgtttcttgaaggttggcctactatgcgcccaagacgcgatgaagctgcgtccgaacatggccagcgtcgtcctgatgctgataggagagaagggaatctccgtggacaggatcaccaagccagccgtgatcggtgacccgtacctcgaccggaggccaagcaacgcagactctaccacgatgaagtccttcgccacgaccgaagctttaacgtcatcagaggcaaacacggagtggtctctgtgatggggggaaaaaacgtcatcatcgatggagatttgtttttgtggatgctgcagttgccaaacaaataccgcatcgcttctgttgattatgtttgtttgttatttttgtgtgtgtgtatatatacttgaaatggaaccacgggagtgaaacgaggattgaatatgctttacccatctttggtacaagtagaatcgtttgtgtttctatcatattcactctctttttttttcttctggaacatgtatgttatcttttcagtctgatcacctttgtaggtcagttccag

SEQ ID NO: 39107 - DNA, 2041 bp, Zea Mays
ctctgttgcattgattagctaaattcttgttcattggcacctcgtgcaaatctagtttaggtgggctggatagaggggatgcattttgatacggtagattgattacccattccactttcttgtttgctggagctggtgtacttctttcattttgcatctcaaaggaaagaaggaaagtaccgtgcttgtgcatggctggtatacgataggtggatactggataataatgttgttagttcactgttttcattaggaattgttaaaacttaaaatggactatctagtttagttttattccacaatcaagcactatcatgaagtggaaaattttcttaatttgatgataaaaacacagaaatttaacgaaaacaacaatttgcctggtgaagataagactataagagtgcactattccttttttttgtaaaatcaagtagactttaagcaaaggttgttctttgttttatgctcaagtactatatattcccttaccccactagacatgttttataatagcttggcaagttgaccgtttaactccggaataaacactatgttatttaaacagtgctaataatgtgagaggtagaggcaaacctgtacctaatgaagtgtttttttacagccaatgtgtaccagtaagtgggcctatctatgattacacaataatgaccacgaggggccatggggacctcacaggtgattcaatcctgaaggcatcaactatgttcaattttcaagaaatgtcttgctgttttacgtgtgcgacgggcatggaacgaaataatgaaaacgaaggtgaccagttttgaggaagcaaggtgaggattttttcctacagtgagatgaggaaagctacgcatgattttagtggagcaaacaagattggcgagggcggtttcggctccgttttcagggggaagcttaaagatggaacgatcgtcgcggtgaaagtcctttctgctaattcaagggtcccagaggattcttgtgtacaattatctcgagaacaatagtctttcatatacacttctaggttcgggccggagcaacattcggttcaactggagagcccgtgtcaagattgctgtaggcgttgctcgtgggcttgcttatcttcacgatggaattcggccccctataattcatcgagatataaaggcgagcaacattctccttgacaaggacctcaccccaaagatctctgatttcgggctggcaaggctcctccccccaaacgcaactcatgtgagcactagggttgcaggaacaataggatacctggctcctgaatacgctgtgagggggcaagtgacgaagaaatcggatatctatagtttcggcgttttgctactggaaattgttgctggtagatgtaactacaacagtagattgcctcagggagaccagtttctgcttgagaagacatgggcatactacgtgcagggaaagctagagaaggtcatagacgccgaagcaggggaggacctgaacgtcgaggaggcatgccgtttcttgaaggttggcctactatgcgcccaagacgcgatgaagctgcgtccgaacatggccagcgtcgtcctgatgctgataggagagaagggaatctccgtggacaggatcaccaagccagccgtgatcggtgacccgtacctcgaccggaggccaagcaacgcagactctaccacgatgaagtccttcgccacgaccgaagctttaacgtcatcagaggcaaacacggagtggtctctgtgatggggggaaaaaacgtcatcatcgatggagatttgtttttgtggatgctgcagttgccaaacaaataccgcatcgcttctgttgattatgtttgtttgttatttttgtgtgtgtgtatatatacttgaaatggaaccacgggagtgaaacgaggattgaatatgctttacccatctttggtacaagtagaatcgtttgtgtttctatcatattcactctctttttttttcttctggaacatgtatgttatcttttcagtctgatcacctttgtaggtcagttccag

SEQ ID NO: 39108 - DNA, 1375 bp, Zea Mays
atgattacacaataatgaccacgaggggccatggggacctcacaggtgattcaatcctgaaggcatcaactatgttcaattttcaagaaatgtcttgctgttttacgtgtgcgacgggcatggaacgaaataatgaaaacgaaggaggaagcaaggtgaggattttttcctacagtgagatgaggaaagctacgcatgattttagtggagcaaacaagattggcgagggcggtttcggctccgttttcagggggaagcttaaagatggaacgatcgtcgcggtgaaagtcctttctgctaattcaagggtcccagaggattcttgtgtacaattatctcgagaacaatagtctttcatatacacttctaggttcgggccggagcaacattcggttcaactggagagcccgtgtcaagattgctgtaggcgttgctcgtgggcttgcttatcttcacgatggaattcggccccctataattcatcgagatataaaggcgagcaacattctccttgacaaggacctcaccccaaagatctctgatttcgggctggcaaggctcctccccccaaacgcaactcatgtgagcactagggttgcaggaacaataggatacctggctcctgaatacgctgtgagggggcaagtgacgaagaaatcggatatctatagtttcggcgttttgctactggaaattgttgctggtagatgtaactacaacagtagattgcctcagggagaccagtttctgcttgagaagacatgggcatactacgtgcagggaaagctagagaaggtcatagacgccgaagcaggggaggacctgaacgtcgaggaggcatgccgtttcttgaaggttggcctactatgcgcccaagacgcgatgaagctgcgtccgaacatggccagcgtcgtcctgatgctgataggagagaagggaatctccgtggacaggatcaccaagccagccgtgatcggtgacccgtacctcgaccggaggccaagcaacgcagactctaccacgatgaagtccttcgccacgaccgaagctttaacgtcatcagaggcaaacacggagtggtctctgtgatggggggaaaaaacgtcatcatcgatggagatttgtttttgtggatgctgcagttgccaaacaaataccgcatcgcttctgttgattatgtttgtttgttatttttgtgtgtgtgtatatatacttgaaatggaaccacgggagtgaaacgaggattgaatatgctttacccatctttggtacaagtagaatcgtttgtgtttctatcatattcactctctttttttttcttctggaacatgtatgttatcttttcagtctgatcacctttgtaggtcagttccag

SEQ ID NO: 39109 - DNA, 2412 bp, Zea Mays
accaccttccgtcgccagctcctagaaacccctcctgcccaaaaaccctagcagccactagggtttctccgctcccacccggcctcctccctctctcctccgatgggcaagtcaagcaagaaggcggccgccgtggctgcggcgccagcggcggtgcccaaggggaagaaacgggaggcggaggaagagatcgagaaggccgtgagcgcgaagaagcagaaggcggcgccaccggcgaaggccgtgccgacgtccaagaaggacgccaagaagtccaagaagcagcctccccccaagaaggctgagagcagcagcagtgactctgaagaggactccgagtccgaagaggaggttaagaaggtacagccaaagaaggcgcctgctcccaagattgctaaacaagagtccagtgatgatgacaccagcgatgagacctctgaatctgatgaggaacctgcaaagaagcctgctgctaaacccttggctgcagttgcgaaaaatggttcgaagacagtcaagcaagagagcagcagcgatgaggacagttctgaagatgagtcggatgacgacagtgatgatgaacctgcaaagaaggctgctgctaaacccttgggtgccgttgctaaaaatggtttgaagaaaggcaagcaagaaagcagcagcgatgggagcagttctgatgatgagtcagacgatgatgttaaacctgctgccccactaaagaaaacatctgtggctgttgcacaaaagaaaaagggagattcttctgagagtgactctgatgatgactcagatgaggaagtgcctccaaagtcaaaggctccagcagcaactatcaaaaaggaagattccagtgaaagtgagtcagagagtgattctgaggatgcaagtaaaactcagcctgctaagagagctgcttcaaaaatgaaagatgaatcaagtgatgactcagacactgatgaggatgaagaacctcctcaaaagaagcagaaggaagcactttcagctgcaaaaaaagaaagcagcagtgaggatgaagatgacagtagtgaggaaagttcggatgatgagccaacaaaagttgaagaaaagaaggctccaaaagtatcagaaaacagtggatcggaggatgaatcttctgaagacgagagtgataaagacagtgaagagcctgctaatactccaaagaaggctgctgtgcacgcctctgaaaagaaaactgctaccaaagaacctaagacgcctactggctcccaaagtgaatcaacggaggtgaatacactttttatgggaaatgtcccctggaaagctgaatttgatgatgtgaaagaattttttgaggacgttggtgaggttgttgatgttcgttttcctacacatgatgatggcaatcgtaaaggattttgctatgttgaatttgtttcagctgaagctgctgcaaaggcatataaagagaagcaatcaaaggagctgcatggtcgtgaagtaagacttgacttcgctaaaggaagaagtacacaaactcctcgcagcggcaatgatggatctttccagaaggctgctcggggtaacagcagctcaatatttatccggggctttgataaaaatctttcagaggatgagatccggagctctctcgaacaacattttagtgattgtggtgagatgacaagggtctctatcccgactgatcatgaatctggtgcaataaaaggaatggcttacatagacttcaaggatcaggactctgtgtctaaagcccttgagctcagtggctctgacattggtggtggctatgagctttatgttgatgaagccaaaccaagaggcgatggccagcgtggtggtggtagatctggtggccgttctggtgggagatttggtgaccgttctggtggccggcgtggtggtggtagatttggtgaaagatctgggggcagggatggtggcggcagattcggtggccgacgtggtggtagggatggcggccgaggacgtggtggccgtggctttggtaacaagcacagcgctggcactcccagtgcaggaaagaagactacttttggtgatgattgatgatgaacgcggaggatgcggcaaaaggatccaatgaaattgtgtttttttggtcttgttgtggtaccgtaactggaatttggtattttttgtctactatttactgtagtggtttctggattttccttgtgttgcctatgctgcaatacaccgttttgttgttgcgatacatctgtagtttggttttgttatccacctgtcgtttataagaagcggctgtactcaggctactatgccgaactgaaatgggaatggagcaaaacgaaatcttagttctgaagcgactaaaactattactagaggcaatgccatcgttttagttgcatagaaaatagc

SEQ ID NO: 39110 - DNA, 2972 bp, Zea Mays
ccagaccccgtggttcgtactccaatattccctgcacaggctccagcggtcgcctcgcgaccccgacccacctccccgcagcctcactcatctcccccgcccacttgccccacgcctccgggctgcgacctccatccatccatccatgtataaagccgccaacgcccgcctcctcctcagatccctctcccccaactcagctgcgctagcctccgtcaacccgggccgcgccgcctcctccgcccgcctcgcgctctcgctgccgtgcggcgcgtgggtcggccgaagcgggctcgtccgccgcgccgccgccttctccgggacacggccgcgtttcgcgggcgccagggcgcagatcggggccgccgtgcctgccgtcgagcagttccagcgcaggatggcaacccaagctactgtgcatgccttcaaggatattctgaccagcctccctaagcctggaggtggtgaatatggaaagttctacagccttcctgcactaaatgatccaaggattgataagctgccgtactccgtccgtattcttcttgagtcagctatccgtaactgtgataacttccaagttaccaagaatgatgttgagaaaataattgactgggaaaacacatctccaaagctggccgagataccattcaagccagctcgagttcttcttcaggacttcactggagttccagcagttgttgatcttgcagctatgcgtgatgcgatggccaagttgggcagtgatgcgaacaagattaacccattggtcccggtggatcttgttattgatcactcagtgcaggtggatgtagcaaggtcgcagaatgccgtacaagcaaacatggaactggaatttagtcgcaacaaggaaagatttggtttccttaaatggggctctagtgctttccaaaatatgctagttgttcctcctggttctggtattgtgcaccaggtcaatcttgagtatcttggcagagttgttttcaacacagatggcattctctatcctgacagcgtagttggtactgattcacacaccactatgattgatggtttgggtgttgctggctggggggttggtggtatagaagcggaggctacaatgcttggtcagccaatgagcatggttttgcctggtgttgttggcttcaagttaactgggaagttacggagtggtgtcacggccactgatcttgttcttacagtaacacaaatgctaaggaaacatggtgttgttggcaaatttgttgaattctatggtgaaggtatgggtaagctgtctttagctgacagggccacaattgcgaacatgtcaccagaatatggagctaccatgggcttctttcctgtggaccatgtgacattggattaccttaaactgacaggccgcagtgatgaaactgtgtcaatgattgaagcatacctgcgagccaataaaatgtttgtggactacaatgagcctccaacagagagaatatactcatcttatcttgagctgaaccttgatgaggtggagcctagcatgtctggcccaaagaggcctcatgatcgtgtccctttgaaggaaatgaaatcagattggcatgcttgcctggacaacaaagttgggttcaagggttttgcagtgccaaaggagcagcaggataaggttgtcaaatttgactttcatgggcagccagcagaaatgaagcatggtagtgttgttatagcagcaataactagctgcacaaacacctcaaatcctagtgttatgcttggtgctggtcttgtagctaagaaagcttgcgagttgggtcttgaggttaaaccatgggtgaagacaagccttgcccctggatcaggagttgtcacgaagtacttgcttcagagtggtcttcaagaatacctcaaccagcaaggattccatatcgttggctatggctgtaccacttgcattggaaactctggtgatctcgatgaatctgtatcaactgccattacagaaaatgatgttgttgctgctgctgttttgtcgggtaatgatgaagtaatggcaaggggaacgtttgcaaacattaggatcgtgaacaagtttttgaacggagaagttggacccaagaccattcatgttcctactggggagaagctttctgtttttgatgcggccatgagatacaaatctgagggccatgctactataatcctcgctggcgctgagtatggaagcggcagttctcgtgattgggctgctaagggtccgatgctcctgggagttaaagctgtaattgccaagagctttgagcgtatccacagaagcaacttggtggggatgggaatcattcctctgtgcttcaaagctggtgaggatgctgattcacttggcctcactggacatgagcggtacagcatcgatctccctaccaacctcagtgagatccgtcccggccaggatgtgactgttactaccgacaatgggaaatctttcacttgcatcgttcgctttgacactgaggtggagctggcgtacttcaaccatggaggcatcctcccttatgtcatccgcaacttggcagctgcgcataactgaggcaagatcacacaccgtttgacccacaatggcagtggcaggctccatgttcccagggctagcgacctggttctcaatgtagtgacatttgtgatggatctaggggtctctttgtcgattcagcccataaataaagtgtgaaataaaagccgcaggtggaggcaggaacctgctgattgagggaacagttttgcctgtgtttggttacatgaaatatctgtttcacagatgtgtagagcatggtgtaaatgcttcctgtgctgttactttcgtttcgacaaattgattatgctgtagcccttcaggtttcatctagacatttcggtgtcttggagcacattcttttttctgataaaaaaagggaaacaaaggcaaaggagaaccgaaaaacgacgaaacgggg

SEQ ID NO: 39111 - DNA, 3512 bp, Zea Mays
ccagaccccgtggttcgtactccaatattccctgcacaggctccagcggtcgcctcgcgaccccgacccacctccccgcagcctcactcatctcccccgcccacttgccccacgcctccgggctgcgacctccatccatccatccatgtataaagccgccaacgcccgcctcctcctcagatccctctcccccaactcagctgcgctagcctccgtcaacccgggccgcgccgcctcctccgcccgcctcgcgctctcgctgccgtgcggcgcgtgggtcggccgaagcgggctcgtccgccgcgccgccgccttctccgggacacggccgcgtttcgcgggcgccagggcgcagatcggggccgccgtgcctgccgtcgagcagttccagcgcaggatggcaacccaagctactgtgcatgccttcaaggatattctgaccagcctccctaagcctggaggtggtgaatatggaaagttctacagccttcctgcactaaatgatccaaggattgataagctgccgtactccgtccgtattcttcttgagtcagctatccgtaactgtgataacttccaagttaccaagaatgatgttgagaaaataattgactgggaaaacacatctccaaagctggccgagataccattcaagccagctcgagttcttcttcaggacttcactggagttccagcagttgttgatcttgcagctatgcgtgatgcgatggccaagttgggcagtgatgcgaacaagattaacccattggtcccggtggatcttgttattgatcactcagtgcaggtggatgtagcaaggtcgcagaatgccgtacaagcaaacatggaactggaatttagtcgcaacaaggaaagatttggtttccttaaatggggctctagtgctttccaaaatatgctagttgttcctcctggttctggtattgtgcaccaggtcaatcttgagtatcttggcagagttgttttcaacacagatggcattctctatcctgacagcgtagttggtactgattcacacaccactatgattgatggtttgggtgttgctggctggggggttggtggtatagaagcggaggctacaatgcttggtcagccaatgagcatggttttgcctggtgttgttggcttcaagttaactgggaagttacggagtggtgtcacggccactgatcttgttcttacagtaacacaaatgctaaggaaacatggtgttgttggcaaatttgttgaattctatggtgaaggtatgggtaagctgtctttagctgacagggccacaattgcgaacatgtcaccagaatatggagctaccatgggcttctttcctgtggaccatgtgacattggattaccttaaactgacaggccgcagtgatgaaactgtgtcaatgattgaagcatacctgcgagccaataaaatgtttgtggactacaatgagcctccaacagagagaatatactcatcttatcttgagctgaaccttgatgaggtggagcctagcatgtctggcccaaagaggcctcatgatcgtgtccctttgaaggaaatgaaatcagattggcatgcttgcctggacaacaaagttgggttcaagggttttgcagtgccaaaggagcagcaggataaggttgtcaaatttgactttcatgggcagccagcagaaatgaagcatggtagtgttgttatagcagcaataactagctgcacaaacacctcaaatcctagtgttatgcttggtgctggtcttgtagctaagaaagcttgcgagttgggtcttgaggttaaaccatgggtgaagacaagccttgcccctggatcaggagttgtcacgaagtacttgcttcagagtggtcttcaagaatacctcaaccagcaaggattccatatcgttggctatggctgtaccacttgcattggaaactctggtgatctcgatgaatctgtatcaactgccattacagaaaatgatgttgttgctgctgctgttttgtcgggtaaccgtaacttcgagggtcgtgtgcaccctttaactcgggctaactatcttgcttcgccacctcttgttgttgcttatgcacttgccggaactgttgatattgattttgagaaagagcccattggatttggaaaggatggcaaggaagtctacttcagggatatatggccctcgacagaagaaattgcgcaggttgtccaatccagtgtgctgcctgacatgttcaagggcacctatgaggctatcacaaaaggcaacccaatgtggaaccagctaactgtcccagaagcatcactctactcatgggattccaaatccacttacattcatgagcccccttactttaaggacatgaccatgtccccacctggcccctctacagtgaaagatgcctactgcttgctgaacttcggggacagcattactacagatcacatttcacctgcaggaagcatacacaaagacagtcctgctgccaagtatttgatggagcgtggtgtggaccggaaggacttcaactcatatggtagccgtcgtggtaatgatgaagtaatggcaaggggaacgtttgcaaacattaggatcgtgaacaagtttttgaacggagaagttggacccaagaccattcatgttcctactggggagaagctttctgtttttgatgcggccatgagatacaaatctgagggccatgctactataatcctcgctggcgctgagtatggaagcggcagttctcgtgattgggctgctaagggtccgatgctcctgggagttaaagctgtaattgccaagagctttgagcgtatccacagaagcaacttggtggggatgggaatcattcctctgtgcttcaaagctggtgaggatgctgattcacttggcctcactggacatgagcggtacagcatcgatctccctaccaacctcagtgagatccgtcccggccaggatgtgactgttactaccgacaatgggaaatctttcacttgcatcgttcgctttgacactgaggtggagctggcgtacttcaaccatggaggcatcctcccttatgtcatccgcaacttggcagctgcgcataactgaggcaagatcacacaccgtttgacccacaatggcagtggcaggctccatgttcccagggctagcgacctggttctcaatgtagtgacatttgtgatggatctaggggtctctttgtcgattcagcccataaataaagtgtgaaataaaagccgcaggtggaggcaggaacctgctgattgagggaacagttttgcctgtgtttggttacatgaaatatctgtttcacagatgtgtagagcatggtgtaaatgcttcctgtgctgttactttcgtttcgacaaattgattatgctgtagcccttcaggtttcatctagacatttcggtgtcttggagcacattcttttttctgataaaaaaagggaaacaaaggcaaaggagaaccgaaaaacgacgaaacgggg

SEQ ID NO: 39112 - DNA, 1830 bp, Zea Mays
tgcagaggcatttctttgttccagtagctaatcatgttgccttactttgtgtgcagctactgtgcatgccttcaaggatattctgaccagcctccctaagcctggaggtggtgaatatggaaagttctacagccttcctgcactaaatgatccaaggattgataagctgccgtactccgtccgtattcttcttgagtcagctatccgtaactgtgataacttccaagttaccaagaatgatgttgagaaaataattgactgggaaaacacatctccaaagctggccgagataccattcaagccagctcgagttcttcttcaggacttcactggagttccagcagttgttgatcttgcagctatgcgtgatgcgatggccaagttgggcagtgatgcgaacaagattaacccattggtcccggtggatcttgttattgatcactcagtgcaggtggatgtagcaaggtcgcagaatgccgtacaagcaaacatggaactggaatttagtcgcaacaaggaaagatttggtttccttaaatggggctctagtgctttccaaaatatgctagttgttcctcctggttctggtattgtgcaccaggtcaatcttgagtatcttggcagagttgttttcaacacagatggcattctctatcctgacagcgtagttggtactgattcacacaccactatgattgatggtttgggtgttgctggctggggggttggtggtatagaagcggaggctacaatgcttggtcagccaatgagcatggttttgcctggtgttgttggcttcaagttaactgggaagttacggagtggtgtcacggccactgatcttgttcttacagtaacacaaatgctaaggaaacatggtgttgttggcaaatttgttgaattctatggtgaaggtatgggtaagctgtctttagctgacagggccacaattgcgaacatgtcaccagaatatggagctaccatgggcttctttcctgtggaccatgtgacattggattaccttaaactgacaggccgcagtgatgaaactgtgtcaatgattgaagcatacctgcgagccaataaaatgtttgtggactacaatgagcctccaacagagagaatatactcatcttatcttgagctgaaccttgatgaggtggagcctagcatgtctggcccaaagaggcctcatgatcgtgtccctttgaaggaaatgaaatcagattggcatgcttgcctggacaacaaagttgggttcaagggttttgcagtgccaaaggagcagcaggataaggttgtcaaatttgactttcatgggcagccagcagaaatgaagcatggtagtgttgttatagcagcaataactagctgcacaaacacctcaaatcctagtgttatgcttggtgctggtcttgtagctaagaaagcttgcgagttgggtcttgaggttaaaccatgggtgaagacaagccttgcccctggatcaggagttgtcacgaagtacttgcttcagagtggtcttcaagaatacctcaaccagcaaggattccataaataaagtgtgaaataaaagccgcaggtggaggcaggaacctgctgattgagggaacagttttgcctgtgtttggttacatgaaatatctgtttcacagatgtgtagagcatggtgtaaatgcttcctgtgctgttactttcgtttcgacaaattgattatgctgtagcccttcaggtttcatctagacatttcggtgtcttggagcacattcttttttctgataaaaaaagggaaacaaaggcaaaggagaaccgaaaaacgacgaaacgggg

SEQ ID NO: 39113 - DNA, 1426 bp, Zea Mays
gtaaatacttttctctcacaaactattgttgatattgattttgagaaagagcccattggatttggaaaggatggcaaggaagtctacttcagggatatatggccctcgacagaagaaattgcgcaggttgtccaatccagtgtgctgcctgacatgttcaagggcacctatgaggctatcacaaaaggcaacccaatgtggaaccagctaactgtcccagaagcatcactctactcatgggattccaaatccacttacattcatgagcccccttactttaaggacatgaccatgtccccacctggcccctctacagtgaaagatgcctactgcttgctgaacttcggggacagcattactacagatcacatttcacctgcaggaagcatacacaaagacagtcctgctgccaagtatttgatggagcgtggtgtggaccggaaggacttcaactcatatggtagccgtcgtggtaatgatgaagtaatggcaaggggaacgtttgcaaacattaggatcgtgaacaagtttttgaacggagaagttggacccaagaccattcatgttcctactggggagaagctttctgtttttgatgcggccatgagatacaaatctgagggccatgctactataatcctcgctggcgctgagtatggaagcggcagttctcgtgattgggctgctaagggtccgatgctcctgggagttaaagctgtaattgccaagagctttgagcgtatccacagaagcaacttggtggggatgggaatcattcctctgtgcttcaaagctggtgaggatgctgattcacttggcctcactggacatgagcggtacagcatcgatctccctaccaacctcagtgagatccgtcccggccaggatgtgactgttactaccgacaatgggaaatctttcacttgcatcgttcgctttgacactgaggtggagctggcgtacttcaaccatggaggcatcctcccttatgtcatccgcaacttggcagctgcgcataactgaggcaagatcacacaccgtttgacccacaatggcagtggcaggctccatgttcccagggctagcgacctggttctcaatgtagtgacatttgtgatggatctaggggtctctttgtcgattcagcccataaataaagtgtgaaataaaagccgcaggtggaggcaggaacctgctgattgagggaacagttttgcctgtgtttggttacatgaaatatctgtttcacagatgtgtagagcatggtgtaaatgcttcctgtgctgttactttcgtttcgacaaattgattatgctgtagcccttcaggtttcatctagacatttcggtgtcttggagcacattcttttttctgataaaaaaagggaaacaaaggcaaaggagaaccgaaaaacgacgaaacgggg

SEQ ID NO: 39114 - DNA, 2313 bp, Zea Mays
aaaaacttaaaaaggactaaaataaaaaaaagttggcacgccccggacccggatgcttcctggcgcttcccgtcacctattggtcagtggaggcaaaaatatctaagcaagccccacacacatagagaaatctcaatccaaagagagccttctccaccgctcttgctcgtccaaccttctccatcgtctcaccttaggtttcgctccccgccgccgccgccatgatgccgcagcagcagcagcccggcatggcccctcctcctccacaggccgcccccggagcgccgccacactggggcggcatcccgccgcctatggcccctcagcatcagtacgcgccaccaccgacccatcaggccccgcccccgccgcagatgtggggccaggcgcccccgcccccgcccccgcctcaggccgcgtacggtcaggcgcccccgccgccccaggccgcgtatggccaggcgctcccaccaccccaggccgcgtacggccaggcgcctcccccgccacaggccgcctactacggggcggtacccgcgcccgcggcggtggccgcggcacctgtcgggcccagcgaggtcaggacgctctggatcggggatctgcagtactggatggacgataactacatctacgggtgcttcgcatccacgggggaggtgcaaaatgtgaagctaattcgtgacaagcatactggacaacttcagggctatggttttattgaattcataagccgcgctgctgctgaaagagttcttcagacttacaacgggacaatgatgccaaatgttgagttgccattccggttgaattgggctagtgctggtgaaaaacgtgatgacacccccgactatacaatatttgttggtgatttggctgctgatgttacagactatgtattacaagagacatttagggcacattacccttctgtgaagggtgcaaaagttgtaacagacaagctgacaatgcgcacaaagggttatggttttgtgaagtttggtgatcctaatgagcaagctcgtgcaatgactgagatgaatggcatgctatgttcttctaggcctatgcgtattgggcctgctgcaaacaagaaagctactgttgttcaggagaaaggataccaacaggctcttcatataggacttgagctgcgatgcgtgtcttgtgtaatgcatgacctctgttagtaccaagtgctcagggagttcagtctgacaatgatcctaacaatacaaccatttttgttggtggtcttgaccccaatgtcactgaagatatgttgaaacaagttttcaccccttatggggacgtagtccatgttaagattcctgttggcaaaagatgtggttttgttcaatatgctaacagatcttcggcagaggaggcattggtaattctgcaaggcaccttggttggagggcagaatgtgaggctttcatggggtcgcagcccttcaaacaaacaagttcaggactccaaccagtgggccggggctaatgctggatattatggctacggtcaaggctatgaggcctatgggtacccccagtctcaggaccctaatatgtataattatggagctggagcttatgctggctatccaaattaccaacaacaaccagtagcacagcaaccgccgcagcaacagtgagaggtccagtgacgctactgtcatttgggtgattgacgtggaaatatttatgagttgtaagatgagcttcggatgcaagctggattaggtatacagacatgattttcgtagtactcagattctgagttgccctcgtatcagagcttgtggtcccaatagcctgcagctgcagctaaaacgatctattttggtagcggaatgttttatctgcttattttgtaccgtgtcttccgctactgcggcggagccttgataacttgctatgttggatttttcccgagtgttatcgcatgaatgttgtcatttgccttggtgccatgttggtgttggcaaacgagcgagcagaacctgcagatcgagcagtacctgagcaccattttaacatggtttaacctttttagctggctcttgttaggattggtacattttcactgagtagggcacctagccgaaccgctcggttttcggtgttggcattttgagaagttcggtcatccgtgtcggctttctgttttgttaggctgtccacatcacatcgtgtaaaataagaggtttgtatcgtagatagtactatacgtagaggtgtttgaaatagtgatgagataagaaatgagataaaagagttgttggatacagtcttacatcgtacatcgaatcga

SEQ ID NO: 39115 - DNA, 2066 bp, Zea Mays
aaaatatctaagcaagccccacacacatagagaaatctcaatccaaagagagccttctccaccgctcttgctcgtccaaccttctccatcgtctcaccttaggtttcgctccccgccgccgccgccatgatgccgcagcagcagcagcccggcatggcccctcctcctccacaggccgcccccggagcgccgccacactggggcggcatcccgccgcctatggcccctcagcatcagtacgcgccaccaccgacccatcaggccccgcccccgccgcagatgtggggccaggcgcccccgcccccgcccccgcctcaggccgcgtacggtcaggcgcccccgccgccccaggccgcgtatggccaggcgctcccaccaccccaggccgcgtacggccaggcgcctcccccgccacaggccgcctactacggggcggtacccgcgcccgcggcggtggccgcggcacctgtcgggcccagcgaggtcaggacgctctggatcggggatctgcagtactggatggacgataactacatctacgggtgcttcgcatccacgggggaggtgcaaaatgtgaagctaattcgtgacaagcatactggacaacttcagggctatggttttattgaattcataagccgcgctgctgctgaaagagttcttcagacttacaacgggacaatgatgccaaatgttgagttgccattccggttgaattgggctagtgctggtgaaaaacgtgatgacacccccgactatacaatatttgttggtgatttggctgctgatgttacagactatgtattacaagagacatttagggcacattacccttctgtgaagggtgcaaaagttgtaacagacaagctgacaatgcgcacaaagggttatggttttgtgaagtttggtgatcctaatgagcaagctcgtgcaatgactgagatgaatggcatgctatgttcttctaggcctatgcgtattgggcctgctgcaaacaagaaagctactgttgttcaggagaaagatttttgttggtggtcttgaccccaatgtcactgaagatatgttgaaacaagttttcaccccttatggggacgtagtccatgttaagattcctgttggcaaaagatgtggttttgttcaatatgctaacagatcttcggcagaggaggcattggtaattctgcaaggcaccttggttggagggcagaatgtgaggctttcatggggtcgcagcccttcaaacaaacaagttcaggactccaaccagtgggccggggctaatgctggatattatggctacggtcaaggctatgaggcctatgggtacccccagtctcaggaccctaatatgtataattatggagctggagcttatgctggctatccaaattaccaacaacaaccagtagcacagcaaccgccgcagcaacagtgagaggtccagtgacgctactgtcatttgggtgattgacgtggaaatatttatgagttgtaagatgagcttcggatgcaagctggattaggtatacagacatgattttcgtagtactcagattctgagttgccctcgtatcagagcttgtggtcccaatagcctgcagctgcagctaaaacgatctattttggtagcggaatgttttatctgcttattttgtaccgtgtcttccgctactgcggcggagccttgataacttgctatgttggatttttcccgagtgttatcgcatgaatgttgtcatttgccttggtgccatgttggtgttggcaaacgagcgagcagaacctgcagatcgagcagtacctgagcaccattttaacatggtttaacctttttagctggctcttgttaggattggtacattttcactgagtagggcacctagccgaaccgctcggttttcggtgttggcattttgagaagttcggtcatccgtgtcggctttctgttttgttaggtttgtatcgtagatagtactatacgtagaggtgtttgaaatagtgatgagataagaaatgagataaaagagttgttggatacagtcttacatcgtacatcgaatcga

SEQ ID NO: 39116 - DNA, 2079 bp, Zea Mays
ctaagcaagccccacacacatagagaaatctcaatccaaagagagccttctccaccgctcttgctcgtccaaccttctccatcgtctcaccttaggtttcgctccccgccgccgccgccatgatgccgcagcagcagcagcccggcatggcccctcctcctccacaggccgcccccggagcgccgccacactggggcggcatcccgccgcctatggcccctcagcatcagtacgcgccgcagatgtggggccaggcgcccccgcccccgcccccgcctcaggccgcgtacggtcaggcgcccccgccgccccaggccgcgtatggccaggcgctcccaccaccccaggccgcgtacggccaggcgcctcccccgccacaggccgcctactacggggcggtacccgcgcccgcggcggtggccgcggcacctgtcgggcccagcgaggtcaggacgctctggatcggggatctgcagtactggatggacgataactacatctacgggtgcttcgcatccacgggggaggtgcaaaatgtgaagctaattcgtgacaagcatactggacaacttcagggctatggttttattgaattcataagccgcgctgctgctgaaagagttcttcagacttacaacgggacaatgatgccaaatgttgagttgccattccggttgaattgggctagtgctggtgaaaaacgtgatgacacccccgactatacaatatttgttggtgatttggctgctgatgttacagactatgtattacaagagacatttagggcacattacccttctgtgaagggtgcaaaagttgtaacagacaagctgacaatgcgcacaaagggttatggttttgtgaagtttggtgatcctaatgagcaagctcgtgcaatgactgagatgaatggcatgctatgttcttctaggcctatgcgtattgggcctgctgcaaacaagaaagctactgttgttcaggagaaagtaccaagtgctcagggagttcagtctgacaatgatcctaacaatacaaccatttttgttggtggtcttgaccccaatgtcactgaagatatgttgaaacaagttttcaccccttatggggacgtagtccatgttaagattcctgttggcaaaagatgtggttttgttcaatatgctaacagatcttcggcagaggaggcattggtaattctgcaaggcaccttggttggagggcagaatgtgaggctttcatggggtcgcagcccttcaaacaaacaagttcaggactccaaccagtgggccggggctaatgctggatattatggctacggtcaaggctatgaggcctatgggtacccccagtctcaggaccctaatatgtataattatggagctggagcttatgctggctatccaaattaccaacaacaaccagtagcacagcaaccgccgcagcaacagtgagaggtccagtgacgctactgtcatttgggtgattgacgtggaaatatttatgagttgtaagatgagcttcggatgcaagctggattaggtatacagacatgattttcgtagtactcagattctgagttgccctcgtatcagagcttgtggtcccaatagcctgcagctgcagctaaaacgatctattttggtagcggaatgttttatctgcttattttgtaccgtgtcttccgctactgcggcggagccttgataacttgctatgttggatttttcccgagtgttatcgcatgaatgttgtcatttgccttggtgccatgttggtgttggcaaacgagcgagcagaacctgcagatcgagcagtacctgagcaccattttaacatggtttaacctttttagctggctcttgttaggattggtacattttcactgagtagggcacctagccgaaccgctcggttttcggtgttggcattttgagaagttcggtcatccgtgtcggctttctgttttgttaggtttgtatcgtagatagtactatacgtagaggtgtttgaaatagtgatgagataagaaatgagataaaagagttgttggatacagtcttacatcgtacatcgaatcga

SEQ ID NO: 39117 - DNA, 2066 bp, Zea Mays
gagaaatctcaatccaaagagagccttctccaccgctcttgctcgtccaaccttctccatcgtctcaccttaggtttcgctccccgccgccgccgccatgatgccgcagcagcagcagcccggcatggcccctcctcctccacaggccgcccccggagcgccgccacactggggcggcatcccgccgcctatggcccctcagcatcagtacgcgccgcagatgtggggccaggcgcccccgcccccgcccccgcctcaggccgcgtacggtcaggcgcccccgccgccccaggccgcgtatggccaggcgctcccaccaccccaggccgcgtacggccaggcgcctcccccgccacaggccgcctactacggggcggtacccgcgcccgcggcggtggccgcggcacctgtcgggcccagcgaggtcaggacgctctggatcggggatctgcagtactggatggacgataactacatctacgggtgcttcgcatccacgggggaggtgcaaaatgtgaagctaattcgtgacaagcatactggacaacttcagggctatggttttattgaattcataagccgcgctgctgctgaaagagttcttcagacttacaacgggacaatgatgccaaatgttgagttgccattccggttgaattgggctagtgctggtgaaaaacgtgatgacacccccgactatacaatatttgttggtgatttggctgctgatgttacagactatgtattacaagagacatttagggcacattacccttctgtgaagggtgcaaaagttgtaacagacaagctgacaatgcgcacaaagggttatggttttgtgaagtttggtgatcctaatgagcaagctcgtgcaatgactgagatgaatggcatgctatgttcttctaggcctatgcgtattgggcctgctgcaaacaagaaagctactgttgttcaggagaaagtaccaagtgctcagggagttcagtctgacaatgatcctaacaatacaaccatttttgttggtggtcttgaccccaatgtcactgaagatatgttgaaacaagttttcaccccttatggggacgtagtccatgttaagattcctgttggcaaaagatgtggttttgttcaatatgctaacagatcttcggcagaggaggcattggtaattctgcaaggcaccttggttggagggcagaatgtgaggctttcatggggtcgcagcccttcaaacaaacaagttcagcctcaacaggactccaaccagtgggccggggctaatgctggatattatggctacggtcaaggctatgaggcctatgggtacccccagtctcaggaccctaatatgtataattatggagctggagcttatgctggctatccaaattaccaacaacaaccagtagcacagcaaccgccgcagcaacagtgagaggtccagtgacgctactgtcatttgggtgattgacgtggaaatatttatgagttgtaagatgagcttcggatgcaagctggattaggtatacagacatgattttcgtagtactcagattctgagttgccctcgtatcagagcttgtggtcccaatagcctgcagctgcagctaaaacgatctattttggtagcggaatgttttatctgcttattttgtaccgtgtcttccgctactgcggcggagccttgataacttgctatgttggatttttcccgagtgttatcgcatgaatgttgtcatttgccttggtgccatgttggtgttggcaaacgagcgagcagaacctgcagatcgagcagtacctgagcaccattttaacatggtttaacctttttagctggctcttgttaggattggtacattttcactgagtagggcacctagccgaaccgctcggttttcggtgttggcattttgagaagttcggtcatccgtgtcggctttctgttttgttaggtttgtatcgtagatagtactatacgtagaggtgtttgaaatagtgatgagataagaaatgagataaaagagttgttggatacagtcttacatcgtacatcgaatcga

SEQ ID NO: 39118 - DNA, 1985 bp, Zea Mays
ttacatagcccgccgccaccgaaccagttgcttgccgccggcctccaccagctgctagccgtcggccaggccctccgccatcaggaagctgttcgttgccggccccgctctccaccagcctgaagccccgttctccgccgcagccccgttcggctgctactgctgcagcagctttcatccatccaggcatccggcgacaagcagttgcatattctcataacagtggccttgcctatcagctcaacagggcaacaggcctgagcggctgccttggctggggactggggtgaccgtgacctacaggaggagcgttcgctggcgaagagccgaagacagagagctcgagcgagaaagaacaagggcaaatgagggactccagctccggtccagcagattacgagcggcgttaagggcttaaggcaagtgtgtgtgagtgtgtctcggtcccatatctgaaagagtgcaacgttgatgaacaaaagtgaaaacggccatattggtagtctcatttttgcaataagctcatcaaaaagatgcttcttcctcgaaagcttctcccatggcggcgccccgctcaggacgcccaggccctggcaggccgcctcctgcgctcctcttcatcctcctttgaccccgacgacgacgaccctccgttcacgcgggttcctaagctcccacctcgggcgccatcgacgccgccgccgaagcccaaggccctggcgggcaagatcaggcccgatgagcctgcgcactccgaccttccctttgacttccggtactcgtactcggagacagacccgacatggaggcccatcggtttccgcgagcccacccggttctcgcccttcggccccggccgcctcgaccgcccatgggacggcacagccgcggcacgcgtcggcgattatgctagtggcgacgagaggatccgggaggaggttctcggggaacctctgtcggaggaggaggtggcggcgctggtggagaggtaccggcacagtgattgctcacggcagatcaatttggggaaaggtggggtaacacacaatatgcttgatgacatccacaaccattggaaacgtgcagaggctgtgaggatcaaatgtctgggagtgccaacgctcgacatggacaacatttgcttccatctcgaggcggcaaagtcgtatcccgcagcataaacatcattatactgtaccgcggtcggaactatgacccccagaaaaggcctggcgtaccattgatgctgtggaaaccgttagctcctatctatcctaagctcgtgcaaaacgttgctgaagggttgactttcgaggaaacaaaagagttgaggaacagaggattgaattctccaccacttacaaaactgactaggaacggtgtctatgttaatgttgttgataaagtgagagaagcgtttaagactgtggaagttgtccggctagattgcactcatgttgggactactgactgcaagaaaattggtgtgaagttgagggatttggttccatgcattcctatattatttaaagatgaacagattatactatggagagggaaggttcgccaagagcgttctgtttcagcagagtgcagttccagcccacaatgatgcacgcatctgccggtgattcacaggagttattattgcgctgcgatattgatgatggttcgggcggattgctgtctgtggaccgtggtgggggcgaggggcgaggccgctcaccagtgattcagtgaagaagaaaacaaaccaacacatttgtgtaatcaactttgatgaaacttcaattgaggagcggcacaaacatggtatatgacacggacatgatccagtgtggtctgatgctaactgcaccgacaacagcgcacgcttaggcaggagcgcgtgcggcgggcgcccggtgtgtcagctacctgggaatagatcccttggtcagagtggagaggaacggtggccgtaatacgtggggcccaggtgtttc

SEQ ID NO: 39119 - DNA, 3141 bp, Zea Mays
attcgtttgacttcttcattggcttgttcaagatttcttttgatgcaaggtttggcttttcgtggtcatgatgaatcatctagttcattaaataagggaaattttctagaattggtttattggatgaaagataaaattaaagaagtgagagatgcttttcagcatgctccaagaaattgcattatgatatcaccacatattcaaaaagatcttgcaaagtgttgtgctcaacagatcacagagaacatcctaggagaaataggagatagaaacttctctattcttattgatgaatcacgtgatgtatctgttaaagaacaaatggcggtgatattgagatatgtgaataatcaaggccatgtgatggaacggtttcttgccctcaagcatgtcaaggatactacatcagatgccttgaaggaagctatttttggccttcttgatcaccatggattatctatatccaagatcagagggcaaggatatgatggagcatcgaatatgcgaggtgaatttaatggcttacaaagaaagatacttgatattaatccacatgcctattatgttcattgttttgcacatcaactccaacttgtggtggtttctattgctagtagtgcttgttgccaatcggttcatgacttctttgagtacattcacttaattgtcaccaccacaagctcatcttgcaagagaagggatgctctaaaagaaaaacaccaccagaatattttagaaaaactagaaagaggtgaaattttatctggtagaggtgtgaatcaagaaactaaccttgctagacctggtgacacaagatggggttcacattatttaacattgctttgattagagacaatgtgggactcagtattgcatgttcttaccattgtgcatgaagatggtcgtgtaccaacacaggcagcgggattgattgaaaaaatggagagcttcaaatttgttttcattttaaaattgatgttgaaaatgcttgcaatcacaaatgagctctctcaaaccttgcaaaggaagaatgccaacattgttcatgctatggagttgcttgatgttgtgaaaacccgaatggctacaatgaggacagatagtggttgggagtcattctttcaaagcgtgaaagaattctgtgctcaaaagggtattcctgtggtagatatggatgaagaagtgcctattagaggtcgttcaaggcgagatggcttcacaatcacaaaccttcactactaccgcactgagatattctttgttgttcttgataaaatcaacactgagttatgccatcgctttaatgaagtttctagcgagttgcttgtttgcttttcttgcctcgatccaaagaacttattttgcagttttgatattgagaaacttgttcgacttggtactctatatgataaggatttttcagttattgaatgtgcaatgttaagagagcaacttgagacatacattgtccacgtgcgaaggcatgctgcttttggtacttgtgaagatattgcatctctatctatgaagatggttgaaactaaaaagcatcttgtgttccctttggttttcaagctaattgagttggccttgttattacctgtctcaacagcaagtgttgagagaatattttcggcaatgaacatcattaagagagaattgcgtaacaaaattgaaaatgattggatgaatgatttgatggtttgctatacggagaaagagatattcaaatcccttgatgatgagactattactagaagattccagcgtcttaaaactagaagaatgcaattgcctcgagtcacaactacaagattgacaacttagtgattggatttttgttggtgattttggtgccacactacagattaagagagaaatttcggtgccaccagatcagatattaccatctttgtatctgctagatagtattgtgaagaacataggtggggaatatgtagagcattttgcaactaggttgcgaagtgtatttgttgatgcatactacagagttcatccaaaccagtatacttcaatgaggcgcctctttcgtacctggtggccagtgttcccttcttctgtgcttcgcagcattgaggatgaccttcaattttcttcctcggagaataaccgccccaccacatcaacaaatctgcatcaaacagagtcgttatctcctaggccatctcatggcatacatgtaaatcctaaatacctggaagcacaacataagttcaagcaggccaatgtggtgcaccagccagcagctcgggacactaggcaaatgactgatgtgcaggaggatctgataaatggattagcatcgaatagttcgtgtgaacggccttcaattttccagaaatcttctttacagtatgctgatgatcctgatcaacaagagacgtttcggcctcttgctggaacaagggcagcatcaccacatctcttgagtacacatgcatctgatatgaatctagatgggccattagtcaattcaaggagaaacttgtccatatcaccacctcttgatgtgttctctaggaatgtgtcccccaagagagcactagagaggctgccaccatctcattctgtattgggacctgatcccagaaaattcactgatcgaaatggcaggttaagatggggtttggatgatggtgcacaacggcctacaatcagtatgcttgatgaagagtacaggaagcaaagtgcaagggaacttattgatgcatatgggaattgtcaaggacgagatgctgatgaacgacttcctaaagtgcagcgcctggatccaaatggtatggctagcagatctagtgcacgaaattggttaacttccgaggaagaagagtattcatgggaggatatgagcccaactttgactgatcgagtcagtagcagcatgccatcttttcctcctggaaccatgagaactggatttcctggggcaaatgcagggttactggaatctgatgttgggaggcacaatttcccaagccaagctactagattatcggttgatggttcaccgtttaatcttgaagataggttttcaactgcaagtgatcatatgcagacttgtcaacatgatagtgctgtctcgatgaatctatgaacacctattgacacaggaacaccttt

SEQ ID NO: 39120 - DNA, 1934 bp, Zea Mays
agttcattaaataagggaaattttctagaattggtttattggatgaaagataaaattaaagaagtgagagatgcttttcagcatgctccaagaaattgcattatgatatcaccacatattcaaaaagatcttgcaaagtgttgtgctcaacagatcacagagaacatcctaggagaaataggagatagaaacttctctattcttattgatgaatcacgtgatgtatctgttaaagaacaaatggcggtgatattgagatatgtgaataatcaaggccatgtgatggaacggtttcttgccctcaagcatgtcaaggatactacatcagatgccttgaaggaagctatttttggccttcttgatcaccatggattatctatatccaagatcagagggcaaggatatgatggagcatcgaatatgcgagcaagtgttgagagaatattttcggcaatgaacatcattaagagagaattgcgtaacaaaattgaaaatgattggatgaatgatttgatggtttgctatacggagaaagagatattcaaatcccttgatgatgagactattactagaagattccagcgtcttaaaactagaagaatgcaattgcctcgagtcacaactacaagattgacaacttagtgattggatttttgttggtgattttggtgccacactacagattaagagagaaatttcggtgccaccagatcagatattaccatctttgtatctgctagatagtattgtgaagaacataggtggggaatatgtagagcattttgcaactaggttgcgaagtgtatttgttgatgcatactacagagttcatccaaaccagtatacttcaatgaggcgcctctttcgtacctggtggccagtgttcccttcttctgtgcttcgcagcattgaggatgaccttcaattttcttcctcggagaataaccgccccaccacatcaacaaatctgcatcaaacagagtcgttatctcctaggccatctcatggcatacatgtaaatcctaaatacctggaagcacaacataagttcaagcaggccaatgtggtgcaccagccagcagctcgggacactaggcaaatgactgatgtgcaggaggatctgataaatggattagcatcgaatagttcgtgtgaacggccttcaattttccagaaatcttctttacagtatgctgatgatcctgatcaacaagagacgtttcggcctcttgctggaacaagggcagcatcaccacatctcttgagtacacatgcatctgatatgaatctagatgggccattagtcaattcaaggagaaacttgtccatatcaccacctcttgatgtgttctctaggaatgtgtcccccaagagagcactagagaggctgccaccatctcattctgtattgggacctgatcccagaaaattcactgatcgaaatggcaggttaagatggggtttggatgatggtgcacaacggcctacaatcagtatgcttgatgaagagtacaggaagcaaagtgcaagggaacttattgatgcatatgggaattgtcaaggacgagatgctgatgaacgacttcctaaagtgcagcgcctggatccaaatggtatggctagcagatctagtgcacgaaattggttaacttccgaggaagaagagtattcatgggaggatatgagcccaactttgactgatcgagtcagtagcagcatgccatcttttcctcctggaaccatgagaactggatttcctggggcaaatgcagggttactggaatctgatgttgggaggcacaatttcccaagccaagctactagattatcggttgatggttcaccgtttaatcttgaagataggttttcaactgcaagtgtatgattgtctgatctctctttaaataatagtgaatcacagcattagcataaca

SEQ ID NO: 39121 - DNA, 1706 bp, Zea Mays
aaagatcttgcaaagtgttgtgctcaacagatcacagagaacatcctaggagaaataggagatagaaacttctctattcttattgatgaatcacgtgatgtatctgttaaagaacaaatggcggtgatattgagatatgtgaataatcaaggccatgtgatggaacggtttcttgccctcaagcatgtcaaggatactacatcagatgccttgaaggaagctatttttggccttcttgatcaccatggattatctatatccaagatcagagggcaaggatatgatggagcatcgaatatgcgaggtgaatttaatggcttacaaagaaagatacttgatattaatccacatgcctattatgttcattgttttgcacatcaactccaacttgtggtggtttctattgctagtagtgcttgttgccaatcggttcatgacttctttgagtacattcacttaattgtcaccaccacaagctcatcttgcaagagaagggatgctctaaaagaaaaacaccaccagaatattttagaaaaactagaaagaggtgaaattttatctggtagaggtgtgaatcaagaaactaaccttgctagacctggtgacacaagatggggttcacattatttaacattgctttgattagagacaatgtgggactcagtattgcatgttcttaccattgtgcatgaagatggtcgtgtaccaacacaggcagcgggattgattgaaaaaatggagagcttcaaatttgttttcattttaaaattgatgttgaaaatgcttgcaatcacaaatgagctctctcaaaccttgcaaaggaagaatgccaacattgttcatgctatggagttgcttgatgttgtgaaaacccgaatggctacaatgaggacagatagtggttgggagtcattctttcaaagcgtgaaagaattctgtgctcaaaagggtattcctgtggtagatatggatgaagaagtgcctattagaggtcgttcaaggcgagatggcttcacaatcacaaaccttcactactaccgcactgagatattctttgttgttcttgataaaatcaacactgagttatgccatcgctttaatgaagtttctagcgagttgcttgtttgcttttcttgcctcgatccaaagaacttattttgcagttttgatattgagaaacttgttcgacttggtactctatatgataaggatttttcagttattgaatgtgcaatgttaagagagcaacttgagacatacattgtccacgtgcgaaggcatgctgcttttggtacttgtgaagatattgcatctctatctatgaagatggttgaaactaaaaagcatcttgtgttccctttggttttcaagctaattgagttggccttgttattacctgtctcaacagcaagtgttgagagaatattttcggcaatgaacatcattaagagagaattgcgtaacaaaattgaaaatgattggatgaatgatttgatggtttgctatacggagaaagagatattcaaatcccttgatgatgagactattactagaagattccagcgtcttaaaactagaagaatgcaattgcctcgagtcacaactacaagattgacaacttagtgattggatttttgttggtgattttggtgccacactacagattaagagagaaatttcgttgtgcatatggaggtagaaatggg

SEQ ID NO: 39122 - DNA, 2410 bp, Zea Mays
aaagatcttgcaaagtgttgtgctcaacagatcacagagaacatcctaggagaaataggagatagaaacttctctattcttattgatgaatcacgtgatgtatctgttaaagaacaaatggcggtgatattgagatatgtgaataatcaaggccatgtgatggaacggtttcttgccctcaagcatgtcaaggatactacatcagatgccttgaaggaagctatttttggccttcttgatcaccatggattatctatatccaagatcagagggcaaggatatgatggagcatcgaatatgcgaggtgaagaagaatgccaacattgttcatgctatggagttgcttgatgttgtgaaaacccgaatggctacaatgaggacagatagtggttgggagtcattctttcaaagcgtgaaagaattctgtgctcaaaagggtattcctgtggtagatatggatgaagaagtgcctattagaggtcgttcaaggcgagatggcttcacaatcacaaaccttcactactaccgcactgagatattctttgttgttcttgataaaatcaacactgagttatgccatcgctttaatgaagtttctagcgagttgcttgtttgcttttcttgcctcgatccaaagaacttattttgcagttttgatattgagaaacttgttcgacttggtactctatatgataaggatttttcagttattgaatgtgcaatgttaagagagcaacttgagacatacattgtccacgtgcgaaggcatgctgcttttggtacttgtgaagatattgcatctctatctatgaagatggttgaaactaaaaagcatcttgtgttccctttggttttcaagctaattgagttggccttgttattacctgtctcaacagcaagtgttgagagaatattttcggcaatgaacatcattaagagagaattgcgtaacaaaattgaaaatgattggatgaatgatttgatggtttgctatacggagaaagagatattcaaatcccttgatgatgagactattactagaagattccagcgtcttaaaactagaagaatgcaattgcctcgagtcacaactacaagattgacaacttagtgattggatttttgttggtgattttggtgccacactacagattaagagagaaatttcggtgccaccagatcagatattaccatctttgtatctgctagatagtattgtgaagaacataggtggggaatatgtagagcattttgcaactaggttgcgaagtgtatttgttgatgcatactacagagttcatccaaaccagtatacttcaatgaggcgcctctttcgtacctggtggccagtgttcccttcttctgtgcttcgcagcattgaggatgaccttcaattttcttcctcggagaataaccgccccaccacatcaacaaatctgcatcaaacagagtcgttatctcctaggccatctcatggcatacatgtaaatcctaaatacctggaagcacaacataagttcaagcaggccaatgtggtgcaccagccagcagctcgggacactaggcaaatgactgatgtgcaggaggatctgataaatggattagcatcgaatagttcgtgtgaacggccttcaattttccagtatgctgatgatcctgatcaacaagagacgtttcggcctcttgctggaacaagggcagcatcaccacatctcttgagtacacatgcatctgatatgaatctagatgggccattagtcaattcaaggagaaacttgtccatatcaccacctcttgatgtgttctctaggaatgtgtcccccaagagagcactagagaggctgccaccatctcattctgtattgggacctgatcccagaaaattcactgatcgaaatggcaggttaagatggggtttggatgatggtgcacaacggcctacaatcagtatgcttgatgaagagtacaggaagcaaagtgcaagggaacttattgatgcatatgggaattgtcaaggacgagatgctgatgaacgacttcctaaagtgcagcgcctggatccaaatggtatggctagcagatctagtgcacgaaattggttaacttccgaggaagaagagtattcatgggaggatatgagcccaactttgactgatcgagtcagtagcagcatgccatcttttcctcctggaaccatgagaactggatttcctggggcaaatgcagggttactggaatctgatgttgggaggcacaatttcccaagccaagctactagattatcggttgatggttcaccgtttaatcttgaagataggttttcaactgcaagtgatcatatgcagacttgtcaacatgatagtgctgtctcgatgaatctatgaacacctattgacacaggaacaccttt

SEQ ID NO: 39123 - DNA, 1628 bp, Zea Mays
aaacaccctaataatgtattctgataatgtatttaaacacctcttaaaaaacttgcaatagtgaggcgaaaaggaaagcatcgctgaaacgagatcctcgccgtttcgcgaacaaatcggtgactgtctcctgctatctccccctttccgccacttcgctccgctcccatgcctcctgccccctctcgccgtggaggcaccccaaaccctagcccctgaaaccctagatcctcctcccctgttccgatggcgggggccgcggcgtccccagcggcgggccacgtggtggagcggttccggtcgcgactgcgcgaggaagcgggcggcggcgagccgggcgccgccgcggtcgtgcacgtgtacgcggaggcgctccgtgagctaaccttcaactgcaagccggtcatcaccgagctcaccatcatcgcgggccagcacgccacgctcgccgccgggggaatcgccgacgccatctgcgcccgcgtcgccgaggtgccaccagatcagatattaccatctttgtatctgctagatagtattgtgaagaacatagtgttcccttcttctgtgcttcgcagcattgaggatgaccttcaattttcttcctcggagaataaccgccccaccacatcaacaaatctgcatcaaacagagtcgttatctcctaggccatctcatggcatacatgtaaatcctaaatacctggaagcacaacataagttcaagcaggccaatgtggtgcaccagccagcagctcgggacactaggcaaatgactgatgtgcaggaggatctgataaatggattagcatcgaatagttcgtgtgaacggccttcaattttccagaaatcttctttacagtatgctgatgatcctgatcaacaagagacgtttcggcctcttgctggaacaagggcagcatcaccacatctcttgagtacacatgcatctgatatgaatctagatgggccattagtcaattcaaggagaaacttgtccatatcaccacctcttgatgtgttctctaggaatgtgtcccccaagagagcactagagaggctgccaccatctcattctgtattgggacctgatcccagaaaattcactgatcgaaatggcaggttaagatggggtttggatgatggtgcacaacggcctacaatcagtatgcttgatgaagagtacaggaagcaaagtgcaagggaacttattgatgcatatgggaattgtcaaggacgagatgctgatgaacgacttcctaaagtgcagcgcctggatccaaatggtatggctagcagatctagtgcacgaaattggttaacttccgaggaagaagagtattcatgggaggatatgagcccaactttgactgatcgagtcagtagcagcatgccatcttttcctcctggaaccatgagaactggatttcctggggcaaatgcagggttactggaatctgatgttgggaggcacaatttcccaagccaagctactagattatcggttgatggttcaccgtttaatcttgaagataggttttcaactgcaagtgatcatatgcagacttgtcaacatgatagtgctgtctcgatgaatctatgaacacctattgacacaggaacaccttt

SEQ ID NO: 39124 - DNA, 1660 bp, Zea Mays
gaaagcatcgctgaaacgagatcctcgccgtttcgcgaacaaatcggtgactgtctcctgctatctccccctttccgccacttcgctccgctcccatgcctcctgccccctctcgccgtggaggcaccccaaaccctagcccctgaaaccctagatcctcctcccctgttccgatggcgggggccgcggcgtccccagcggcgggccacgtggtggagcggttccggtcgcgactgcgcgaggaagcgggcggcggcgagccgggcgccgccgcggtcgtgcacgtgtacgcggaggcgctccgtgagctaaccttcaactgcaagccggtcatcaccgagctcaccatcatcgcgggccagcacgccacgctcgccgccgggggaatcgccgacgccatctgcgcccgcgtcgccgaggtgccaccagatcagatattaccatctttgtatctgctagatagtattgtgaagaacataggtggggaatatgtagagcattttgcaactaggttgcgaagtgtatttgttgatgcatactacagagttcatccaaaccagtatacttcaatgaggcgcctctttcgtacctggtggccagtgttcccttcttctgtgcttcgcagcattgaggatgaccttcaattttcttcctcggagaataaccgccccaccacatcaacaaatctgcatcaaacagagtcgttatctcctaggccatctcatggcatacatgtaaatcctaaatacctggaagcacaacataagttcaagcaggccaatgtggtgcaccagccagcagctcgggacactaggcaaatgactgatgtgcaggaggatctgataaatggattagcatcgaatagttcgtgtgaacggccttcaattttccagtatgctgatgatcctgatcaacaagagacgtttcggcctcttgctggaacaagggcagcatcaccacatctcttgagtacacatgcatctgatatgaatctagatgggccattagtcaattcaaggagaaacttgtccatatcaccacctcttgatgtgttctctaggaatgtgtcccccaagagagcactagagaggctgccaccatctcattctgtattgggacctgatcccagaaaattcactgatcgaaatggcaggttaagatggggtttggatgatggtgcacaacggcctacaatcagtatgcttgatgaagagtacaggaagcaaagtgcaagggaacttattgatgcatatgggaattgtcaaggacgagatgctgatgaacgacttcctaaagtgcagcgcctggatccaaatggtatggctagcagatctagtgcacgaaattggttaacttccgaggaagaagagtattcatgggaggatatgagcccaactttgactgatcgagtcagtagcagcatgccatcttttcctcctggaaccatgagaactggatttcctggggcaaatgcagggttactggaatctgatgttgggaggcacaatttcccaagccaagctactagattatcggttgatggttcaccgtttaatcttgaagataggttttcaactgcaagtgatcatatgcagacttgtcaacatgatagtgctgtctcgatgaatctatgaacacctattgacacaggaacaccttt

SEQ ID NO: 39125 - DNA, 1624 bp, Zea Mays
gaaagcatcgctgaaacgagatcctcgccgtttcgcgaacaaatcggtgactgtctcctgctatctccccctttccgccacttcgctccgctcccatgcctcctgccccctctcgccgtggaggcaccccaaaccctagcccctgaaaccctagatcctcctcccctgttccgatggcgggggccgcggcgtccccagcggcgggccacgtggtggagcggttccggtcgcgactgcgcgaggaagcgggcggcggcgagccgggcgccgccgcggtcgtgcacgtgtacgcggaggcgctccgtgagctaaccttcaactgcaagccggtcatcaccgagctcaccatcatcgcgggccagcacgccacgctcgccgccgggggaatcgccgacgccatctgcgcccgcgtcgccgaggtgccaccagatcagatattaccatctttgtatctgctagatagtattgtgaagaacataggtggggaatatgtagagcattttgcaactaggttgcgaagtgtatttgttgatgcatactacagagttcatccaaaccagtatacttcaatgaggcgcctctttcgtacctggtggccagtgttcccttcttctgtgcttcgcagcattgaggatgaccttcaattttcttcctcggagaataaccgccccaccacatcaacaaatctgcatcaaacagagtcgttatctcctaggccatctcatggcatacatgtgcaccagccagcagctcgggacactaggcaaatgactgatgtgcaggaggatctgataaatggattagcatcgaatagttcgtgtgaacggccttcaattttccagaaatcttctttacagtatgctgatgatcctgatcaacaagagacgtttcggcctcttgctggaacaagggcagcatcaccacatctcttgagtacacatgcatctgatatgaatctagatgggccattagtcaattcaaggagaaacttgtccatatcaccacctcttgatgtgttctctaggaatgtgtcccccaagagagcactagagaggctgccaccatctcattctgtattgggacctgatcccagaaaattcactgatcgaaatggcaggttaagatggggtttggatgatggtgcacaacggcctacaatcagtatgcttgatgaagagtacaggaagcaaagtgcaagggaacttattgatgcatatgggaattgtcaaggacgagatgctgatgaacgacttcctaaagtgcagcgcctggatccaaatggtatggctagcagatctagtgcacgaaattggttaacttccgaggaagaagagtattcatgggaggatatgagcccaactttgactgatcgagtcagtagcagcatgccatcttttcctcctggaaccatgagaactggatttcctggggcaaatgcagggttactggaatctgatgttgggaggcacaatttcccaagccaagctactagattatcggttgatggttcaccgtttaatcttgaagataggttttcaactgcaagtgatcatatgcagacttgtcaacatgatagtgctgtctcgatgaatctatgaacacctattgacacaggaacaccttt

SEQ ID NO: 39126 - DNA, 846 bp, Zea Mays
atttttgcaaccagtctccaattccaagcctgtcttccagacatcaatgtagtaatgcctgcagaaatcttctttacagtatgctgatgatcctgatcaacaagagacgtttcggcctcttgctggaacaagggcagcatcaccacatctcttgagtacacatgcatctgatatgaatctagatgggccattagtcaattcaaggagaaacttgtccatatcaccacctcttgatgtgttctctaggaatgtgtcccccaagagagcactagagaggctgccaccatctcattctgtattgggacctgatcccagaaaattcactgatcgaaatggcaggttaagatggggtttggatgatggtgcacaacggcctacaatcagtatgcttgatgaagagtacaggaagcaaagtgcaagggaacttattgatgcatatgggaattgtcaaggacgagatgctgatgaacgacttcctaaagtgcagcgcctggatccaaatggtatggctagcagatctagtgcacgaaattggttaacttccgaggaagaagagtattcatgggaggatatgagcccaactttgactgatcgagtcagtagcagcatgccatcttttcctcctggaaccatgagaactggatttcctggggcaaatgcagggttactggaatctgatgttgggaggcacaatttcccaagccaagctactagattatcggttgatggttcaccgtttaatcttgaagataggttttcaactgcaagtgatcatatgcagacttgtcaacatgatagtgctgtctcgatgaatctatgaacacctattgacacaggaacaccttt

SEQ ID NO: 39127 - DNA, 1638 bp, Zea Mays
atgcacgctgcggatttcgccttcctcaagcaccctaagatgtgtgcgctgccgccccaaccccacttaccaccccaccgggcacgccatgacagggagccaccacagccggtggtggctgatgcagttccagtgcgcgctcatggctgcaccgcccatgtcgatccccatcaagaagttgtcctggaagaagagcacccgcatccgttggcctccaccgacgccaccacctcgcctgtgaaccagttctcgttgaggtcccagccaaagagcaagttgatgcactatcaaaggaattgtttgcgctttcaaccgtcacaggatctttcaaggcagtgtaaaacttgtggccttcgatttaaatgccaagaggagcatcgtgctcacatggactggcatgttacaaaaaataggaattcaaagaaccgtaagcaatcttcacgtaaatattttgtcacggtggaggaatggttaagagctgcagaaacagtaggaaacgatggagttcctgcttttgtgccctcagacccagtcccagatagaaaggaagagagagaaattgctgttcctgcggatgaggagcaaacagcctgtgcattatgtcaagagccatttgaagatttctacagtgatgagactgatgagtggatgtatagaggtgcggtctacatgaatgcaccagacggtaatattgatggtctggaaaggtcacggttgggacctattgtccatgctaaatgtcgatctgggcccagcaatacttagggtgggcatggctgttctgctgaaccattttgcagatccatcatatggattttcagaatgtctgattctactggcatactcccacggtccaagaaagaatgcaattctagcagtggatgacttgatagcttttttttccgttgcggctgtaggcatgacctgtaaactactggagactcagaatttggtatggttagattttttcctatctatggcttcgttaacagccaatgcacagaatgttaatgtgacaatagtgcataactgtaaaatttttctgtaattcagtgattggaagttagtaatcggcacaacattcactattgtcatattgtgcttttgcccctgtcattttgtccttccatagttgcacagtgctgctttttcattacagccgtagtgtgatctatacttaagcttcatgtttagggtttctgcagcacagttgttgtcaggacagcggtttatggagccatggtctcactggacatgggaaacaatatatttcaatagtcctgctttcttcctcgttaatatcttgtgcaggatacataccagttctctatgttggttggtagctttggaagggaccgtgcaagatgaccaagagtgctggccactatttatgcctaagtattgaaagggactagatactgtcattaccttattgccaatttttttagtattttcctttgtaagttgagagcattgtttgtgactattattcttggttgcttgtatagttccatcttgctgatatgtttatactccaaaatgtgggtcagaatgtcttatcagactttattctttattctggttggtatatgctccggcaaactattcaatggaacaatttgggaatattttttcgtc

SEQ ID NO: 39128 - DNA, 3761 bp, Zea Mays
atgcacgctgcggatttcgccttcctcaagcaccctaagatgtgtgcgctgccgccccaaccccacttaccaccccaccgggcacgccatgacagggagccaccacagccggtggtggctgatgcagttccagtgcgcgctcatggctgcaccgcccatgtcgatccccatcaagaagttgtcctggaagaagagcacccgcatccgttggcctccaccgacgccaccacctcgcctgtgaaccagttctcgttgaggtcccagccaaagagcaagttgatgcactatcaaaggaattgtttgcgctttcaaccgtcacaggatctttcaaggcagtgtaaaacttgtggccttcgatttaaatgccaagaggagcatcgtgctcacatggactggcatgttacaaaaaataggaattcaaagaaccgtaagcaatcttcacgtaaatattttgtcacggtggaggaatggttaagagctgcagaaacagtaggaaacgatggagttcctgcttttgtgccctcagacccagtcccagatagaaaggaagagagagaaattgctgttcctgcggatgaggagcaaacagcctgtgcattatgtcaagagccatttgaagatttctacagtgatgagactgatgagtggatgtatagaggtgcggtctacatgaatgcaccagacggtaatattgatggtctggaaaggtcacggttgggacctattgtccatgctaaatgtcgatctgggcccagcaatacttagggtgggcatggctggtgagtatctatctatttccttgtgctataacaaacatctatggactttaaggtggacataatgttttttagagctagtttgggaacctcattttcccaagggaaattgtatcttgaggttaaccccactgtaaatagaggatagtctccttgctagtatttggctgtatgcaacatgtttttggctacgattatatatgttatctgactaaataaaaatgctggatgtgagttgttgttcattatttttccattgtttgtagttagtgttcaatattatatgaatatatacttctgtcatacatttggacccattcttttttgtttggttttcagttctgctgaaccattttgcagatccatcatatggattttcagaatgtctgattctactggcatactcccacggtccaagaaagaatgcaattctagcagtgtaatgttttagtatcttaagtttgatcaattatagataaaaaatatcaatatttatgataccaaattaatatcactagattaattatgaaatgtattttcgtaataaattgattttgagccataaatgtgaacatcattgactagaaacttgttcaaacatgaaccactttaactggcacacaacccatagctgcattctttttggaacagagtgagtatataataagaggactttcaattgctcacttgaatagttagttacctttgaaggattctgtaggttttaaaatgtaaatgtgaacgctcatgcttgttcaagtaatgcaatttttaattggtgtaactttggtaatgacaaagataatcatgctaactatgtaattttatgctaatgacaactgtaagcatgcaaacccacagttttgtatgtatcatttagtgcgatctgatgatgatttatgaaagctgtaatttcctagcatgactacacttttaatctctcaccttttggtatctaaggactaaggatagaagtaggctttggattaatttgtaaaaaagtggcgataattagttcaggactactatagttcctttttatttgtacttcactatttttgcccatcatggcattgctaatctgcgcaactattttggtatctaggatagatttccttaagcaggttttggtctaatttgtaaaaatgtggcaatagtaaggagttcaggactatcatagttacttttcatttgcaattcaccattttgctcatcatggcactgctaaactgcgcagttgttatgtctgccaatcaaagattcatgcatttagtggaatgacactaatactgtttctgtcatttcctgacagtgatacactggtgcacaggaccttttattttctttattgtttttgtgagttttttaagttttttgtgctagctcttagcatgtttggaagcattgtttgtttttaattatctggtcagtgttcatgcaattagtaagtagcataggcacataagttctggttacctcttgctgttgacaattgacatcacgattcctgttaggatagaattttttctgttcaaatatcaaacagatctgacatgaaatttcttgaagtatttgactgagcaatcttatgtttgttatgttttctttgtcatataattttttccctttggattatgaaatcctcagtgaccggttataatttggaagaccagttataagctggaaggtggtaaaattgagatatactcggcttatttgccgttgcacggtaccatgtaatttagttacacgctgttatatcagccactacctctgttccttagagaggtgcatagccagaatgacagttttttaggaacgaaggtaatagttgcaacaacgccttctttggctccaaaaggatcctttttggtacgcgccaaaatatgaagctaagtgtggttgaaaagcctgctgagttttcctgaatggtgtatgatcctatgagatgggttcattggttgactccttttgccatggtgatgattattttgaatgcataatatttgttttcatatcagttgctgtgatggcttcaattttattcattttccgtccctaattaattgttaataaagccaaaatgaagttaactaagcatattgtatattagcttcgtgtaaacaaatcacttgaactgaaacttgctatgatctaatgttagtaaattccttataagtgcttcattgaaagatgctgctataactatttttatcttcggtgcagggatgacttgatagcttttttttccgttgcggctgtaggcatgacctgtaaactactggagactcagaatttggtatggttagattttttcctatctatggcttcgttaacagccaatgcacagaatgttaatgtgacaatagtgcataactgtaaaatttttctgtaattcagtgattggaagttagtaatcggcacaacattcactattgtcatattgtgcttttgcccctgtcattttgtccttccatagttgcacagtgctgctttttcattacagccgtagtgtgatctatacttaagcttcatgtttagggtttctgcagcacagttgttgtcaggacagcggtttatggagccatggtctcactggacatgggaaacaatatatttcaatagtcctgctttcttcctcgttaatatcttgtgcaggatacataccagttctctatgttggttggtagctttggaagggaccgtgcaagatgaccaagagtgctggccactatttatgcctaagtattgaaagggactagatactgtcattaccttattgccaatttttttagtattttcctttgtaagttgagagcattgtttgtgactattattcttggttgcttgtatagttccatcttgctgatatgtttatactccaaaatgtgggtcagaatgtcttatcagactttattctttattctggttggtatatgctccggcaaactattcaatggaacaatttgggaatattttttcgtc

SEQ ID NO: 39129 - DNA, 1974 bp, Zea Mays
atgcacgctgcggatttcgccttcctcaagcaccctaagatgtgtgcgctgccgccccaaccccacttaccaccccaccgggcacgccatgacagggagccaccacagccggtggtggctgatgcagttccagtgcgcgctcatggctgcaccgcccatgtcgatccccatcaagaagttgtcctggaagaagagcacccgcatccgttggcctccaccgacgccaccacctcgcctgtgaaccagttctcgttgaggtcccagccaaagagcaagttgatgcactatcaaaggaattgtttgcgctttcaaccgtcacaggatctttcaaggcagtgtaaaacttgtggccttcgatttaaatgccaagaggagcatcgtgctcacatggactggcatgttacaaaaaataggaattcaaagaaccgtaagcaatcttcacgtaaatattttgtcacggtggaggaatggttaagagctgcagaaacagtaggaaacgatggagttcctgcttttgtgccctcagacccagtcccagatagaaaggaagagagagaaattgctgttcctgcggatgaggagcaaacagcctgtgcattatgtcaagagccatttgaagatttctacagtgatgagactgatgagtggatgtatagaggtgcggtctacatgaatgcaccagacggtaatattgatggtctggaaaggtcacggttgggacctattgtccatgctaaatgtcgatctgggcccagcaatacttagggtgggcatggctggtgagtatctatctatttccttgtgctataacaaacatctatggactttaaggtggacataatgttttttagagctagtttgggaacctcattttcccaagggaaattgtatcttgaggttaaccccactgtaaatagaggatagtctccttgctagtatttggctgtatgcaacatgtttttggctacgattatatatgttatctgactaaataaaaatgctggatgtgagttgttgttcattatttttccattgtttgtagttagtgttcaatattatatgaatatatacttctgtcatacatttggacccattcttttttgtttggttttcagttctgctgaaccattttgcagatccatcatatggattttcagaatgtctgattctactggcatactcccacggtccaagaaagaatgcaattctagcagtggatgacttgatagcttttttttccgttgcggctgtaggcatgacctgtaaactactggagactcagaatttggtatggttagattttttcctatctatggcttcgttaacagccaatgcacagaatgttaatgtgacaatagtgcataactgtaaaatttttctgtaattcagtgattggaagttagtaatcggcacaacattcactattgtcatattgtgcttttgcccctgtcattttgtccttccatagttgcacagtgctgctttttcattacagccgtagtgtgatctatacttaagcttcatgtttagggtttctgcagcacagttgttgtcaggacagcggtttatggagccatggtctcactggacatgggaaacaatatatttcaatagtcctgctttcttcctcgttaatatcttgtgcaggatacataccagttctctatgttggttggtagctttggaagggaccgtgcaagatgaccaagagtgctggccactatttatgcctaagtattgaaagggactagatactgtcattaccttattgccaatttttttagtattttcctttgtaagttgagagcattgtttgtgactattattcttggttgcttgtatagttccatcttgctgatatgtttatactccaaaatgtgggtcagaatgtcttatcagactttattctttattctggttggtatatgctccggcaaactattcaatggaacaatttgggaatattttttcgtc

SEQ ID NO: 39130 - DNA, 1296 bp, Zea Mays
atgcacgctgcggatttcgccttcctcaagcaccctaagatgtgtgcgctgccgccccaaccccacttaccaccccaccgggcacgccatgacagggagccaccacagccggtggtggctgatgcagttccagtgcgcgctcatggctgcaccgcccatgtcgatccccatcaagaagttgtcctggaagaagagcacccgcatccgttggcctccaccgacgccaccacctcgcctgtgaaccagttctcgttgaggtcccagccaaagagcaagttgatgcactatcaaaggaattgtttgcgctttcaaccgtcacaggatctttcaaggcagtgtaaaacttgtggccttcgatttaaatgccaagaggagcatcgtgctcacatggactggcatgttacaaaaaataggaattcaaagaaccgtaagcaatcttcacgtaaatattttgtcacggtggaggaatggttaagagctgcagaaacagtaggaaacgatggagttcctgcttttgtgccctcagacccagtcccagatagaaaggaagagagagaaattgctgttcctgcggatgaggagcaaacagcctgtgcattatgtcaagagccatttgaagatttctacagtgatgagactgatgagtggatgtatagaggtgcggtctacatgaatgcaccagacggtaatattgatggtctggaaaggtcacggttgggacctattgtccatgctaaatgtcgatctgggcccagcaatacttagggtgggcatggctgggatgacttgatagcttttttttccgttgcggctgtaggcatgacctgtaaactactggagactcagaatttgggtttctgcagcacagttgttgtcaggacagcggtttatggagccatggtctcactggacatgggaaacaatatatttcaatagtcctgctttcttcctcgttaatatcttgtgcaggatacataccagttctctatgttggttggtagctttggaagggaccgtgcaagatgaccaagagtgctggccactatttatgcctaagtattgaaagggactagatactgtcattaccttattgccaatttttttagtattttcctttgtaagttgagagcattgtttgtgactattattcttggttgcttgtatagttccatcttgctgatatgtttatactccaaaatgtgggtcagaatgtcttatcagactttattctttattctggttggtatatgctccggcaaactattcaatggaacaatttgggaatattttttcgtc

SEQ ID NO: 39131 - DNA, 1617 bp, Zea Mays
atgcacgctgcggatttcgccttcctcaagcaccctaagatgtgtgcgctgccgccccaaccccacttaccaccccaccgggcacgccatgacagggagccaccacagccggtggtggctgatgcagttccagtgcgcgctcatggctgcaccgcccatgtcgatccccatcaagaagttgtcctggaagaagagcacccgcatccgttggcctccaccgacgccaccacctcgcctgtgaaccagttctcgttgaggtcccagccaaagagcaagttgatgcactatcaaaggaattgtttgcgctttcaaccgtcacaggatctttcaaggcagtgtaaaacttgtggccttcgatttaaatgccaagaggagcatcgtgctcacatggactggcatgttacaaaaaataggaattcaaagaaccgtaagcaatcttcacgtaaatattttgtcacggtggaggaatggttaagagctgcagaaacagtaggaaacgatggagttcctgcttttgtgccctcagacccagtcccagatagaaaggaagagagagaaattgctgttcctgcggatgaggagcaaacagcctgtgcattatgtcaagagccatttgaagatttctacagtgatgagactgatgagtggatgtatagaggtgcggtctacatgaatgcaccagacggtaatattgatggtctggaaaggtcacggttgggacctattgtccatgctaaatgtcgatctgggcccagcaatacttagggtgggcatggctgatccatcatatggattttcagaatgtctgattctactggcatactcccacggtccaagaaagaatgcaattctagcagtggatgacttgatagcttttttttccgttgcggctgtaggcatgacctgtaaactactggagactcagaatttggtatggttagattttttcctatctatggcttcgttaacagccaatgcacagaatgttaatgtgacaatagtgcataactgtaaaatttttctgtaattcagtgattggaagttagtaatcggcacaacattcactattgtcatattgtgcttttgcccctgtcattttgtccttccatagttgcacagtgctgctttttcattacagccgtagtgtgatctatacttaagcttcatgtttagggtttctgcagcacagttgttgtcaggacagcggtttatggagccatggtctcactggacatgggaaacaatatatttcaatagtcctgctttcttcctcgttaatatcttgtgcaggatacataccagttctctatgttggttggtagctttggaagggaccgtgcaagatgaccaagagtgctggccactatttatgcctaagtattgaaagggactagatactgtcattaccttattgccaatttttttagtattttcctttgtaagttgagagcattgtttgtgactattattcttggttgcttgtatagttccatcttgctgatatgtttatactccaaaatgtgggtcagaatgtcttatcagactttattctttattctggttggtatatgctccggcaaactattcaatggaacaatttgggaatattttttcgtc

SEQ ID NO: 39132 - DNA, 551 bp, Zea Mays
gagctgttcgcccttgcaagctcactacagctttcgcccttgcaagctcactacagcgcgccctcaggccagtgccttcctatgtatgttgtgcgccgttgacccgcgttgtgtcccgacatgcttgtcaatcccgatgagcggtctttccattgcgcgcggctcgtcgtcaacctggtcgttgccaccacctcaacctcatcggcctgcctctcgtccctgtgtgtaggtcgcgtttgcgcttatcgccggtgagactctcggttcttgttctcgcctagcgtcgattgattagatactaattatttgtgtgtttgtacgtgattggaggagaaaaaaggtcctagaaattggttggagaagaaggttgtagcgcatcactcgccaagtgttcgatcaaagacttcaataaaaggttgtcgtcgttcaggcaaatatcaaatcgaattgagatgtggtactagatttgtgctgctgtggatggtgttaagcgtcgatgggcatggccttcttataggttaaagtagctcttctatgcttcctattgagga

SEQ ID NO: 39133 - DNA, 3351 bp, Zea Mays
aggagaaaaaaggtcctagaaattggttggagaagaaggttgtagcgcatcactcgccaagtgttcgatcaaagacttcaataaaaggttgtcgtcgttcaggcaaatatcaaatcgaattgagatgtgccctctccaacaacatttgctgaggttttccagtgcatgttcgattacatcgatagactcttcatcatggttcgccctaggaagcttatgtacatggccattgatggtgtggctccacgtgctaaaatgaaccaacagcgttctagacgattcagagctgcaaaagatgcagctgatgcggctgcagaggaagaacggttgcgtgaagagtttgagagggaaggaagaaggcttcctgcaaaacaacaatcacaaacttgtgattctaatgttattactccaggaaccgagtttatggctgttctttcagttgcgttacagtactacattcatcaaagactgaattatgatcctggatggaaaaaaatcaaagttattctatctgatgccaatgttcctggcgaaggggagcataaaataatgtcgtatattcgtggtcaacggaatctccctggatttaatccaaacacacgccattgcttatatggcctggatgcagacctcataatgttagctttagcaactcatgaagtacacttctctatattgagagaggtagtttttacacctgggcagcaggacaaatgcttcttatgtggtcaggtggggcatctagccgctaattgtgaaggaaaggcaaagagaaaagctggggaatacgatgagaaaggtgaagctattgttccaaagaaaccataccagttcttgaatatctggacccttcgggagtacttagaatatgagttcagaatgccaaatccgcctttccagattgattttgaacggattgttgatgatttcatcttcatgtgctttttcgttggcaacgattttcttccgcatatgccaacactagagatcagggagggagctatcaatctattaatggctgtgtacaagaaagaatttccttcaatgggtggctatttaacagattcttgcacgccggatctgaatagagtcgaacacttcattcaagcagttggctcttatgaggataaaatatttcagaaaagggcgcgtttgcatcagcgtcaagcagaaagaataaaacgggaaaaggcccaagcaaagcgcggggatgatctggatccccatgtcagagatgatcttattgtacctgtttcaaatttccgagggtcccgccttgcatctggagcagtaccttcaccatatgaacagaatggatctcagagagaaaggtacaaccaaactcggaaagctccaagagtatcatcatcaggttccagcattgctgctgctatcgttgaggctgaacaagatcttgaagcacaggagcgtgaaaataaagaagagttgaagtctatgcttaaggatgctcttcgtgagaaatcagatgtcttcaattctgaaaattcagaggaggacaaggtaaagcttggagaaccaggatggagggataggtactatgaagagaagtttggggcaaggacacctgaacggatggaagaaatacggagggatgttgctctcaaatatactgaaggattgtgttgggttatgcactactactatgaaggggtgtgctcatggcaatggttttatccttatcattatgctccttttgcttcggatttaacgagtctgagtcagctcaatataactttcgaacttgggtcaccattcaagccatttgatcagctaatgggggttttccctgctgcaagtgcccatgcacttcctttaaagtatcggcaactgatgactgatccaaattcaccaataattgatttttatccaactgattttgaagtagatatgaatgggaaaagattctcttggcaggggatagcaaaactgccctttatagaagaagatcggttgctggctgagattaaaaaagttgaggatactttgacgcctgaagaagcaaggagaaacagtaccatgtgcaatatgctttttgtgaatggcgcccattcactttctccctatatctactctctcaacagtaaattcgggcatctgccagacaaagaccgtggtgcaatcaaagaaaaacttgatccttcagctagtggaggaatgaatggttacattgcactctgtggtggggacccgtcccctcctgtcttcagatctcctgtagatgggcttgaggacatcatggataatcaagtgatatgctcaatctacaagcttccagatccacacaagcacatcgctcgtccaccagctggtgttatcatacccaagaagagtgtagaagccggtgatctgaaaccaccaccagtgctgtggcatgaagacagcggtaggaggcctcatgataacaaccaccggaggccttatgataacagcaacaggcaaaacccatcaggagctctatctggccgccaactcggggaagctgcccatcgacttgttgtaaacagcttgaatgttcggggtggtgggcaaaataattccccatctatgccatatcagacaatgatgagtggtatgaactatccaaatggaaggcatcatgtgggtaaccatggagtgcctccgagaatggaacagcctgctggtcgttctggctggcatgtttctgatgataacatgaccaatggtcaagcagcttatggtcagtatcagcctgaaaggttgggaccttcccggcatgaacgaggtaaccatggaaggcaacagtataacccatatgcaagagataaccaccatgattctagtggaagagttcagccacctggataccatcaaaaccgtggcaacccacagtctgctgctccatcagcaggtcctggactgtatgggccataccccccagcatatgctggtggttattctgggggataccagcctgtaccatatgggggtcaacaatggcagcagcgaccttatggaggcgggacaccccccacaagacctaactcacaccaatcacaaaaccgttatggtaccttagacagaagttctaacaagaggtcctcagatgtagaagaaaatgagcttttggaccttgatcttgacgaccttgaggatctcacagatgccctcggcgagtcattcctggatttcttccttctctatttcttgggcggctttggtatgtcgggtattgggttatttcttgaccgctacttttggggagatatgccaacaggtcatatatctggatgctcatcaaactctgcgagtcaacgtttggttccggaggcagttaggagtggaacgactccgtctcagagagccaattga

SEQ ID NO: 39134 - DNA, 3639 bp, Zea Mays
aaaaaacacgcatcatcccctcctgtccgagatatttgtgcagcgccgcaaaagcgcatatccccccggccctctcgctccgccgctccgtgcgagctcccgctcccgacacgcttcccgcccgccagatcggtcccgcgcgcctcttctgcctgcatccgcgcccgcgaccaccgcttctaggtttagggttccggcagagtaggcggtgagatgggtgtgccggcgttctaccggtggctggcggagaagtacccgatggtggtggtggacgtggtggaggaggagcccgtcgagatcgagggcgtccgggtccccgtcgacacctccaagcccaaccccaacggcctcgagttcgacaacctctacctcgacatgaacggcatcatacacccctgcttccaccccgaggataggccctctccaacaacatttgctgaggttttccagtgcatgttcgattacatcgatagactcttcatcatggttcgccctaggaagcttatgtacatggccattgatggtgtggctccacgtgctaaaatgaaccaacagcgttctagacgattcagagctgcaaaagatgcagctgatgcggctgcagaggaagaacggttgcgtgaagagtttgagagggaaggaagaaggcttcctgcaaaacaacaatcacaaacttgtgattctaatgttattactccaggaaccgagtttatggctgttctttcagttgcgttacagtactacattcatcaaagactgaattatgatcctggatggaaaaaaatcaaagttattctatctgatgccaatgttcctggcgaaggggagcataaaataatgtcgtatattcgtggtcaacggaatctccctggatttaatccaaacacacgccattgcttatatggcctggatgcagacctcataatgttagctttagcaactcatgaagtacacttctctatattgagagaggtagtttttacacctgggcagcaggacaaatgcttcttatgtggtcaggtggggcatctagccgctaattgtgaaggaaaggcaaagagaaaagctggggaatacgatgagaaaggtgaagctattgttccaaagaaaccataccagttcttgaatatctggacccttcgggagtacttagaatatgagttcagaatgccaaatccgcctttccagattgattttgaacggattgttgatgatttcatcttcatgtgctttttcgttggcaacgattttcttccgcatatgccaacactagagatcagggagggagctatcaatctattaatggctgtgtacaagaaagaatttccttcaatgggtggctatttaacagattcttgcacgccggatctgaatagagtcgaacacttcattcaagcagttggctcttatgaggataaaatatttcagaaaagggcgcgtttgcatcagcgtcaagcagaaagaataaaacgggaaaaggcccaagcaaagcgcggggatgatctggatccccatgtcagagatgatcttattgtacctgtttcaaatttccgagggtcccgccttgcatctggagcagtaccttcaccatatgaacagaatggatctcagagagaaaggtacaaccaaactcggaaagctccaagagtatcatcatcaggttccagcattgctgctgctatcgttgaggctgaacaagatcttgaagcacaggagcgtgaaaataaagaagagttgaagtctatgcttaaggatgctcttcgtgagaaatcagatgtcttcaattctgaaaattcagaggaggacaaggtaaagcttggagaaccaggatggagggataggtactatgaagagaagtttggggcaaggacacctgaacggatggaagaaatacggagggatgttgctctcaaatatactgaaggattgtgttgggttatgcactactactatgaaggggtgtgctcatggcaatggttttatccttatcattatgctccttttgcttcggatttaacgagtctgagtcagctcaatataactttcgaacttgggtcaccattcaagccatttgatcagctaatgggggttttccctgctgcaagtgcccatgcacttcctttaaagtatcggcaactgatgactgatccaaattcaccaataattgatttttatccaactgattttgaagtagatatgaatgggaaaagattctcttggcaggggatagcaaaactgccctttatagaagaagatcggttgctggctgagattaaaaaagttgaggatactttgacgcctgaagaagcaaggagaaacagtaccatgtgcaatatgctttttgtgaatggcgcccattcactttctccctatatctactctctcaacagtaaattcgggcatctgccagacaaagaccgtggtgcaatcaaagaaaaacttgatccttcagctagtggaggaatgaatggttacattgcactctgtggtggggacccgtcccctcctgtcttcagatctcctgtagatgggcttgaggacatcatggataatcaagtgatatgctcaatctacaagcttccagatccacacaagcacatcgctcgtccaccagctggtgttatcatacccaagaagagtgtagaagccggtgatctgaaaccaccaccagtgctgtggcatgaagacagcggtaggaggcctcatgataacaaccaccggaggccttatgataacagcaacaggcaaaacccatcaggagctctatctggccgccaactcggggaagctgcccatcgacttgttgtaaacagcttgaatgttcggggtggtgggcaaaataattccccatctatgccatatcagacaatgatgagtggtatgaactatccaaatggaaggcatcatgtgggtaaccatggagtgcctccgagaatggaacagcctgctggtcgttctggctggcatgtttctgatgataacatgaccaatggtcaagcagcttatggtcagtatcagcctgaaaggttgggaccttcccggcatgaacgaggtaaccatggaaggcaacagtataacccatatgcaagagataaccaccatgattctagtggaagagttcagccacctggataccatcaaaaccgtggcaacccacagtctgctgctccatcagcaggtcctggactgtatgggccataccccccagcatatgctggtggttattctgggggataccagcctgtaccatatgggggtcaacaatggcagcagcgaccttatggaggcgggacaccccccacaagacctaactcacaccaatcacaaaaccgttatggtaccttagacagaagttctaacaagaggtcctcagatgtagaagaaaatgagcttttggaccttgatcttgacgaccttgaggatctcacagatgccctcggcgagtcattcctggatttcttccttctctatttcttgggcggctttggtatgtcgggtattgggttatttcttgaccgctacttttggggagatatgccaacaggtcatatatctggatgctcatcaaactctgcgagtcaacgtttggttccggaggcagttaggagtggaacgactccgtctcagagagccaattga

SEQ ID NO: 39135 - DNA, 3693 bp, Zea Mays
gcatcatcccctcctgtccgagatatttgtgcagcgccgcaaaagcgcatatccccccggccctctcgctccgccgctccgtgcgagctcccgctcccgacacgcttcccgcccgccagatcggtcccgcgcgcctcttctgcctgcatccgcgcccgcgaccaccgcttctaggtttagggttccggcagagtaggcggtgagatgggtgtgccggcgttctaccggtggctggcggagaagtacccgatggtggtggtggacgtggtggaggaggagcccgtcgagatcgagggcgtccgggtccccgtcgacacctccaagcccaaccccaacggcctcgagttcgacaacctctacctcgacatgaacggcatcatacacccctgcttccaccccgaggataggccctctccaacaacatttgctgaggttttccagtgcatgttcgattacatcgatagactcttcatcatggttcgccctaggaagcttatgtacatggccattgatggtgtggctccacgtgctaaaatgaaccaacagcgttctagacgattcagagctgcaaaagatgcagctgatgcggctgcagaggaagaacggttgcgtgaagagtttgagagggaaggaagaaggcttcctgcaaaacaacaatcacaaacttgtgattctaatgttattactccaggaaccgagtttatggctgttctttcagttgcgttacagtactacattcatcaaagactgaattatgatcctggatggaaaaaaatcaaagttattctatctgatgccaatgttcctggcgaaggggagcataaaataatgtcgtatattcgtggtcaacggaatctccctggatttaatccaaacacacgccattgcttatatggcctggatgcagacctcataatgttagctttagcaactcatgaagtacacttctctatattgagagaggtagtttttacacctgggcagcaggacaaatgcttcttatgtggtcaggtggggcatctagccgctaattgtgaaggaaaggcaaagagaaaagctggggaatacgatgagaaaggtgaagctattgttccaaagaaaccataccagttcttgaatatctggacccttcgggagtacttagaatatgagttcagaatgccaaatccgcctttccagattgattttgaacggattgttgatgatttcatcttcatgtgctttttcgttggcaacgattttcttccgcatatgccaacactagagatcagggagggagctatcaatctattaatggctgtgtacaagaaagaatttccttcaatgggtggctatttaacagattcttgcacgccggatctgaatagagtcgaacacttcattcaagcagttggctcttatgaggataaaatatttcagaaaagggcgcgtttgcatcagcgtcaagcagaaagaataaaacgggaaaaggcccaagcaaagcgcggggatgatctggatccccatgtcagagatgatcttattgtacctgtttcaaatttccgagggtcccgccttgcatctggagcagtaccttcaccatatgaacagaatggatctcagagagaaaggtacaaccaaactcggaaagctccaagagtatcatcatcaggttccagcattgctgctgctatcgttgaggctgaacaagatcttgaagcacaggagcgtgaaaataaagaagagttgaagtctatgcttaaggatgctcttcgtgagaaatcagatgtcttcaattctgaaaattcagaggaggacaaggtaaagcttggagaaccaggatggagggataggtactatgaagagaagtttggggcaaggacacctgaacggatggaagaaatacggagggatgttgctctcaaatatactgaaggattgtgttgggttatgcactactactatgaaggggtgtgctcatggcaatggttttatccttatcattatgctccttttgcttcggatttaacgagtctgagtcagctcaatataactttcgaacttgggtcaccattcaagccatttgatcagctaatgggggttttccctgctgcaagtgcccatgcacttcctttaaagtatcggcaactgatgactgatccaaattcaccaataattgatttttatccaactgattttgaagtagatatgaatgggaaaagattctcttggcaggggatagcaaaactgccctttatagaagaagatcggttgctggctgagattaaaaaagttgaggatactttgacgcctgaagaagcaaggagaaacagtaccatgtgcaatatgctttttgtgaatggcgcccattcactttctccctatatctactctctcaacagtaaattcgggcatctgccagacaaagaccgtggtgcaatcaaagaaaaacttgatccttcagctaggttagctaagtttttcaggattatcgattctctaacattgctactcttgtttcttttatttagtggaggaatgaatggttacattgcactctgtggtggggacccgtcccctcctgtcttcagatctcctgtagatgggcttgaggacatcatggataatcaagtgatatgctcaatctacaagcttccagatccacacaagcacatcgctcgtccaccagctggtgttatcatacccaagaagagtgtagaagccggtgatctgaaaccaccaccagtgctgtggcatgaagacagcggtaggaggcctcatgataacaaccaccggaggccttatgataacagcaacaggcaaaacccatcaggagctctatctggccgccaactcggggaagctgcccatcgacttgttgtaaacagcttgaatgttcggggtggtgggcaaaataattccccatctatgccatatcagacaatgatgagtggtatgaactatccaaatggaaggcatcatgtgggtaaccatggagtgcctccgagaatggaacagcctgctggtcgttctggctggcatgtttctgatgataacatgaccaatggtcaagcagcttatggtcagtatcagcctgaaaggttgggaccttcccggcatgaacgaggtaaccatggaaggcaacagtataacccatatgcaagagataaccaccatgattctagtggaagagttcagccacctggataccatcaaaaccgtggcaacccacagtctgctgctccatcagcaggtcctggactgtatgggccataccccccagcatatgctggtggttattctgggggataccagcctgtaccatatgggggtcaacaatggcagcagcgaccttatggaggcgggacaccccccacaagacctaactcacaccaatcacaaaaccgttatggtaccttagacagaagttctaacaagaggtcctcagatgtagaagaaaatgagcttttggaccttgatcttgacgaccttgaggatctcacagatgccctcggcgagtcattcctggatttcttccttctctatttcttgggcggctttggtatgtcgggtattgggttatttcttgaccgctacttttggggagatatgccaacaggtcatatatctggatgctcatcaaactctgcgagtcaacgtttggttccggaggcagttaggagtggaacgactccgtctcagagagccaattga

SEQ ID NO: 39136 - DNA, 1233 bp, Zea Mays
tggcaccttgttatccatgtagtagttagcttttgcacctattgtttgtttgtgcataatgtttctgacattttatactgagaggttttctgtaagtgaggtctcctgttgagtttagctttcagtggaacctctagactttttctcatggtgattaagcatttttattatggtgtttgtcattctgtttaatttagaataaggtacatgtttgagcaagttgataatattggattatctacagacatggatcactctgatgagcatgacagtgatgacatgaaagtaggggcagcttctgatggcccctccagactcagaaaaaagaggtccaaggtttgggacgaatacgagcccatcattgtagatggagcaattcagagcgcggaatgccgctactgccatatgcacatgagttgcagaggtgctgatggtcagtccaatgggacaagccatttgtggcgacaccagaaaatttgccgagcaaaagatgagttttgtccaagccaactgcaacaggatgcagacttttcatctgactggtcttcggtaaggttctaaatcttttgatgaagcccaagcagcaggattcaccaaagagagttgaactttgggtgatatatgggagactgtaccaagcagtgatcctgttttgctactaatatctgattctgctcagccatggacgaggagagaaaggatcactcgatctgtcaagaactgcccgtcgccagacggtcgcccctacgccccatgctggccagagacgtgcaggccgtcgggctagccctcgccgtgctgggcacgggcacacggccgcaccctccgccttactggattagaaaggaaacacatatctggaagaaaaaattcacacagccaattcgaaagaaatatgcggccaaggcatgggatgcggcggcgtctgctcgtggccgtagaacgggcggacgcgctgacctcgtcgggcgtgaccttggcagggaggataggcctgctggtggacaaggaggcctccgccctggtcctggtgctgctgctacagctccagctccagcaccagcaccgactgcttttgttctccacgatgtccctccctatgctaatggtgatcttcacatgggtcatgccctcaataaaatcctcaaggattttataaatcgctacaagctgcttcagaatcataaagtgtcctttgttcctggttttgggattgccacggccttccaatag

SEQ ID NO: 39137 - DNA, 2132 bp, Zea Mays
tggcaccttgttatccatgtagtagttagcttttgcacctattgtttgtttgtgcataatgtttctgacattttatactgagaggttttctgtaagtgaggtctcctgttgagtttagctttcagtggaacctctagactttttctcatggtgattaagcatttttattatggtgtttgtcattctgtttaatttagaataaggtacatgtttgagcaagttgataatattggattatctacagacatggatcactctgatgagcatgacagtgatgacatgaaagtaggggcagcttctgatggcccctccagactcagaaaaaagaggtccaaggtttgggacgaatacgagcccatcattgtagatggagcaattcagagcgcggaatgccgctactgccatatgcacatgagttgcagaggtgctgatggtcagtccaatgggacaagccatttgtggcgacaccagaaaatttgccgagcaaaagatgagttttgtccaagccaactgcaacaggatgcagacttttcatctgactggtcttcggtaaggttctaaatcttttgatgaagcccaagcagcaggattcaccaaagagagttgaactttgggtgatatatgggagactgtaccaagcagtgatcatgttttgctactaatatctgattctgctcaggtttgctttttcattgatctatatatgtgttcataagctttgcactttgtattgatcattcctgtcaatgagacaattgcatttttgggacttcaaatatgacgtttcgcaataataccatccaaaacatttatttctttcctgtcaatgacaatttgatatttttaatcctcttttctttctttgtttattacttatataaatggtggctatgttacccctggcattatcagaattctcatggtgttttgacaatatataagagacaacatatacatgcgaggagatatataggagatataagagacaattgcatttttgtgacttcaaatatgacgtttcgcaataataccatccaaaacatttattttgtaaaaacgggacaataaacatcttccaattgattatactactatttatcgtattttttcacttttctaatttctttccacgtattttatactcacatttacccttacatctcttcgtcacctgctaatctgctatgcgctgccatggacgaggagagaaaaggatcactcgatctctcaagaactgcccgtcgccagacggtcgcccctacgccccatgctggccagagacgtgcaggccgtcgggctagccctcgccgtggtgattgggttatggggcaccggagggcgagctgtgggtgctccggcgggcgctccgccgtggtgtttggtcgccgccgtgatgccttctacttgggctaggaggacgtttcgtctgagttagagactggtcttcggtaaggttctaaatcttttgatgaagcccaagcagcaggattcaccaaagagagttgaactttgggtgatatatgggagactgtaccaagcagtgatcctgttttgctactaatatctgattctgctcagccatggacgaggagagaaaggatcactcgatctgtcaagaactgcccgtcgccagacggtcgcccctacgccccatgctggccagagacgtgcaggccgtcgggctagccctcgccgtgctgggcacgggcacacggccgcaccctccgccttactggattagaaaggaaacacatatctggaagaaaaaattcacacagccaattcgaaagaaatatgcggccaaggcatgggatgcggcggcgtctgctcgtggccgtagaacgggcggacgcgctgacctcgtcgggcgtgaccttggcagggaggataggcctgctggtggacaaggaggcctccgccctggtcctggtgctgctgctacagctccagctccagcaccagcaccgactgcttttgttctccacgatgtccctccctatgctaatggtgatcttcacatgggtcatgccctcaataaaatcctcaaggattttataaatcgctacaagctgcttcagaatcataaagtgtcctttgttcctggttttgggattgccacggccttccaatag

SEQ ID NO: 39138 - DNA, 2430 bp, Zea Mays
tggcaccttgttatccatgtagtagttagcttttgcacctattgtttgtttgtgcataatgtttctgacattttatactgagaggttttctgtaagtgaggtctcctgttgagtttagctttcagtggaacctctagactttttctcatggtgattaagcatttttattatggtgtttgtcattctgtttaatttagaataaggtacatgtttgagcaagttgataatattggattatctacagacatggatcactctgatgagcatgacagtgatgacatgaaagtaggggcagcttctgatggcccctccagactcagaaaaaagaggtccaaggtttgggacgaatacgagcccatcattgtagatggagcaattcagagcgcggaatgccgctactgccatatgcacatgagttgcagaggtgctgatggtcagtccaatgggacaagccatttgtggcgacaccagaaaatttgccgagcaaaagatgagttttgtccaagccaactgcaacaggatgcagacttttcatctgactggtcttcggtaaggttctaaatcttttgatgaagcccaagcagcaggattcaccaaagagagttgaactttgggtgatatatgggagactgtaccaagcagtgatcatgttttgctactaatatctgattctgctcaggtttgctttttcattgatctatatatgtgttcataagctttgcactttgtattgatcattcctgtcaatgagacaattgcatttttgggacttcaaatatgacgtttcgcaataataccatccaaaacatttatttctttcctgtcaatgacaatttgatatttttaatcctcttttctttctttgtttattacttatataaatggtggctatgttacccctggcattatcagaattctcatggtgttttgacaatatataagagacaacatatacatgcgaggagatatataggagatataagagacaattgcatttttgtgacttcaaatatgacgtttcgcaataataccatccaaaacatttattttgtaaaaacgggacaataaacatcttccaattgattatactactatttatcgtattttttcacttttctaatttctttccacgtattttatactcacatttacccttacatctcttcgtcacctgctaatctgctatgcgctgccatggacgaggagagaaaaggatcactcgatctctcaagaactgcccgtcgccagacggtcgcccctacgccccatgctggccagagacgtgcaggccgtcgggctagccctcgccgtggtgattgggttatggggcaccggagggcgagctgtgggtgctccggcgggcgctccgccgtggtgtttggtcgccgccgtgatgccttctacttgggctaggaggacgtttcgtctgagttagagactggtcttcggtaaggttctaaatcttttgatgaagcccaagcagcaggattcaccaaagagagttgaactttgggtgatatatgggagactgtaccaagcagtgatcctgttttgctactaatatctgattctgctcagccatggacgaggagagaaaggatcactcgatctgtcaagaactgcccgtcgccagacggtcgcccctacgccccatgctggccagagacgtgcaggccgtcgggctagccctcgccgtgctgggcacgggcacacggccgcaccctccgccttactgctgaagttcttaacaatgatgccctacaaggattagaaaggaaacacatatctggaagaaaaaattcacacagccaattcgaaagaaatatgcggccaaggcatgggatgcggcggcgtctgctcgtggccgtagaacgggcggacgcgctgacctcgtcgggcgtgaccttggcagggaggataggcctgctggtggacaaggaggcctccgccctggtcctggtgctgctgctacagctccagctccagcaccagcaccgactgcttttgttctccacgatgtccctccctatgctaatggtgatcttcacatgggtcatgccctcaataaaatcctcaaggattttataaatcgctacaagctgcttcagaatcataaagtgtcctttgttcctggttttgggattgccacggccttccaatagaactaaaaggtggcttgtgcgaacgaggcgaacgtggcgtggcaatcgatgagcagtggcaaacccaaaaatcttcaaaagcctaggcaaaagtagtaactaaagatacatcaccttgtcccgtttttctgcttttacttcgattatatgtcattgtgccacaaaaaaaacgtgtttcatcgacgacttatgatgagtctgctcaattgtttcttgaatatacttttttgtagaatcaaattgaattttacaaggtgcaatattgatt

SEQ ID NO: 39139 - DNA, 583 bp, Zea Mays
ttttgctactaatatctgattctgctcagccatggacgaggagagaaaggatcactcgatctgtcaagaactgcccgtcgccagacggtcgcccctacgccccatgctggccagagacgtgcaggccgtcgggctagccctcgccgtgctgggcacgggcacacggccgcaccctccgccttactggattagaaaggaaacacatatctggaagaaaaaattcacacagccaattcgaaagaaatatgcggccaaggcatgggatgcggcggcgtctgctcgtggccgtagaacgggcggacgcgctgacctcgtcgggcgtgaccttggcagggaggataggcctgctggtggacaaggaggcctccgccctggtcctggtgctgctgctacagctccagctccagcaccagcaccgactgcttttgttctccacgatgtccctccctatgctaatggtgatcttcacatgggtcatgccctcaataaaatcctcaaggattttataaatcgctacaagctgcttcagaatcataaagtgtcctttgttcctggttttgggattgccacggccttccaatag

SEQ ID NO: 39140 - DNA, 598 bp, Zea Mays
ctgattctgctcagccatggacgaggagagaaaggatcactcgatctgtcaagaactgcccgtcgccagacggtcgcccctacgccccatgctggccagagacgtgcaggccgtcgggctagccctcgccgtgctgggcacgggcacacggccgcaccctccgccttactgctgaagttcttaacaatgatgccctacaaggattagaaaggaaacacatatctggaagaaaaaattcacacagccaattcgaaagaaatatgcggccaaggcatgggatgcggcggcgtctgctcgtggccgtagaacgggcggacgcgctgacctcgtcgggcgtgaccttggcagggaggataggcctgctggtggacaaggaggcctccgccctggtcctggtgctgctgctacagctccagctccagcaccagcaccgactgcttttgttctccacgatgtccctccctatgctaatggtgatcttcacatgggtcatgccctcaataaaatcctcaaggattttataaatcgctacaagctgcttcagaatcataaagtgtcctttgttcctggttttgggattgccacggccttccaatag

SEQ ID NO: 39141 - DNA, 3247 bp, Zea Mays
  misc_feature (1)..(1): n is a, c, g, or t
naatcagtagtggggaactgtggttgtaccgagatgataggctcagttcccattgcctggcgcttttgttagccgccgccaactaacaaaattctaagaaacagccaaacaagaattggaatttaattctaagaaaaagtttccatgtacacccaaacaaaaagttcaattgaatcaaattctaggtaacctatttctggtgggatctaattgctagaatcattcatggaatattcaattatggggatccaaacagccccatatagaaatgatatctcagtcaatgtagcacatcattaagtcattaagacaaacattaggcatcttgttatgcaattcagtattgataatatttattttcgaaaaggcccattcaactgttatgtagcaccaatacagatatgcatatctgtagtcggtcctgggagctcgacttggggacccggctcaacttttctggcaagtcgggcgacttgtcaacgactggatagtcgactagtcgtcgacttggtctggcaagtcggccgacttgtgccccaattcagcccaaaaagcccacaggcccattacacaacatattttcttgatttgggagaaaatgcaatggatgatcttgatttaggagatatttagggtatctattatctagtatctatctagctgcagcagcagcttagctatctaatggagcttatttcctttcaagtttgaactatattttcttgcaatttgttttccaatttgaactatatggctgttatgacttatgagtttgacttatcgctgatttggttcagtttgaggcttcaaatgaggtaagacttgctgtttatttcagtttagttcaatttcatgcttcaaatgaggtaaaacatgctctttcttcatatataagtgttatattgtctatatgaagccattatataggcaaaacaaccactatattggcacgtcgacgactagtcgactgacttatcgactagtcaccaagtcggtaccttgtcgactcgacttaacgacttgaaaaccttgtctgtacctgccgtttggggggaaaaacaatatgtggatacaagtaaattttgttttaaaaacataacaaggcatgccatctaggttttgtagcaatcagtgacaccattaacggagcaggagcacacagttcacaggatgggaagaaattaaaggaggaaaagtgatagaacatgatgaactcacctgctcccaacgaattgctgccttctcggtcagtggtcccactgtcgtcagagctgcaaatcagaaggacaaatccaccactgcgcaccgaggggcctgtgaagagaggaacgcaagcgcgccaccagcccaccacaccagtcaagggaagtcgcagaacctggtgtcgaatcagggcagatatgaggatcctttgaactgaaagaaaactacaatttaatttccttgagttgtccttcagagttcagagtgaactatctgtcactaaacttggctaatttttgaacttgtaacttactgcttacacttatataaaaatggatcatatgtatatgtacgtgcaaaattgtagaagactaagtgagactagcagcactgggggccaatcttcataataatggagagagaatagggctacaattgtaaaacagatcgagcacccaaaaatcctcagttaattacagaatgtagtacaagctatgtggcgccaagaagaaggtgggggggtaccagcgcgaatccagcacgggttccggtggtagcgactcccggcggccagggtggcggcggcggcggcggtgaaatacgagctgggcgctacttcagcagggcaggggatgatgcggagaatagataggggaggagagcaagaggaggcgcacctggatcaacggacgtcgccgcctcgctggagaaggtcacgcgggaacggcggcggcgggccgcgggccggcggcgttgccgctctatttctgcgggagccgggagcggacggcagatcgacccgacgtgccctacggccctacccactccgacccgccccaacccgcatcgcagtgaacccaacccgccccggcccgctagctatcgaaacccatttccacccagcccatagaactcatttcgacccaccccattgcatcacgctgttcattgcatcgcagcagcacctgatggacgggaggaatttatcaaaataggtcgttctaaactgccgctctgcaaaatacgcctgcgctagctcaggtcgtaaaaatgggtcgctcaagcgctgtcactcgccaggagaggtcacgacagcttctggcgtacctggtaggtgggcccgtgttgctccctgccgattttgcccttacggccgttcacaacgccgtcttctccctccattaaccgaagcatatcgagctctcagtgtccgctctctgctgctctctggctctggaacgccgctctcctcgcgctctcagtgtccgccgccaccgatcttcacggcctggccggcgacggcgacgactaaccccactcctcctcctctgcaggcgaatgtgcggcagccggcagtgagtgggttcatccagagggtcgtgcaagccattggaatagaactgcgaagacgtctgccactcctcccctttgcagatataggtggtgacattccgtctccgaagtctacatatgatagccttgtacttgtgtcagttagtggcatccaatcttcaagtgtgccaagtggagaaggtggaccatccgctgttttagaaacacaaggtgcagctcctagtggagaaggtggaccatccgctgttttagaaacacaaggtgcagcgccaagtatagaaggtggaagacctcttttattactaggaccatccagtgtagcgccaaatcttccaactactccatcatgccatggcactggtcctagaatgcttaaaaagaagttcacaccaaaaaaaaaggaaggcatgagtacctgatatgtaagatttgaaatatgttgtgtgaactatgtgttatttgagaccatgtgaagtgtaagatttgaaatatgttgtgtgaactatgtgttatttgagaccatgtgaagtgtaagatttgacatagaactgttgagctgcattcccagttgagaccaacaatctgttcatttgttatctgttttttgatctgctgagctgttcatttattaataactgaactagagcagttgttaacagattgacagattgtgagcagttctggaagttct

SEQ ID NO: 39142 - DNA, 959 bp, Zea Mays
acgacagcttctggcgtacctggtaggtgggcccgtgttgctccctgccgattttgcccttacggccgttcacaacgccgtcttctccctccattaaccgaagcatatcgagctctcagtgtccgctctctgctgctctctggctctggaacgccgctctcctcgcgctctcagtgtccgccgccaccgatcttcacggcctggccggcgacggcgacgactaaccccactcctcctcctctgcaggcgaatgtgcggcagccggcagtgagtgggttcatccagagggtcgtgcaagccattggaatagaactgcgaagacgtctgccactcctcccctttgcagatataggtggtgacattccgtctccgaagtctacatatgatagtagccttgtacttgtgtcagttagtggcatccaatcttcaagtgtgccaagtggagaaggtggaccatccgctgttttagaaacacaaggtgcagctcctagtggagaaggtggaccatccgctgttttagaaacacaaggtgcagcgccaagtatagaaggtggaagacctcttttattactaggaccatccagtgtagcgccaaatcttccaactactccatcatgccatggcactggtcctagaatgcttaaaaagaagttcacaccaaaaaaaaaggaaggcatgagtacctgatatgtaagatttgaaatatgttgtgtgaactatgtgttatttgagaccatgtgaagtgtaagatttgaaatatgttgtgtgaactatgtgttatttgagaccatgtgaagtgtaagatttgacatagaactgttgagctgcattcccagttgagaccaacaatctgttcatttgttatctgttttttgatctgctgagctgttcatttattaataactgaactagagcagttgttaacagattgacagattgtgagcagttctggaagttct

SEQ ID NO: 39143 - DNA, 987 bp, Zea Mays
cgacagcttctggcgtacctggtaggtgggcccgtgttgctccctgccgattttgcccttacggccgttcacaacgccgtcttctccctccattaaccgaagcatatcgagctctcagtgtccgctctctgctgctctctggctctggaacgccgctctcctcgcgctctcagtgtccgccgccaccgatcttcacggcctggccggcgacggcgacgactaaccccactcctcctcctctgcaggtgatcttcccccttccctcttcccctgtccgctgacatatcccctaccctctgtaacgtttacgtacccaggcgaatgtgcggcagccggcagtgagtgggttcatccagagggtcgtgcaagccattggaatagaactgcgaagacgtctgccactcctcccctttgcagtagccttgtacttgtgtcagttagtggcatccaatcttcaagtgtgccaagtggagaaggtggaccatccgctgttttagaaacacaaggtgcagctcctagtggagaaggtggaccatccgctgttttagaaacacaaggtgcagcgccaagtatagaaggtggaagacctcttttattactaggaccatccagtgtagcgccaaatcttccaactactccatcatgccatggcactggtcctagaatgcttaaaaagaagttcacaccaaaaaaaaaggaaggcatgagtacctgatatgtaagatttgaaatatgttgtgtgaactatgtgttatttgagaccatgtgaagtgtaagatttgaaatatgttgtgtgaactatgtgttatttgagaccatgtgaagtgtaagatttgacatagaactgttgagctgcattcccagttgagaccaacaatctgttcatttgttatctgttttttgatctgctgagctgttcatttattaataactgaactagagcagttgttaacagattgacagattgtgagcagttctggaagttct

SEQ ID NO: 39144 - DNA, 710 bp, Zea Mays
cttccctcttcccctgtccgctgacatatcccctaccctctgtaacgtttacgtacccaggcgaatgtgcggcagccggcagtgagtgggttcatccagagggtcgtgcaagccattggaatagaactgcgaagacgtctgccactcctcccctttgcagttagtggcatccaatcttcaagtgtgccaagtggagaaggtggaccatccgctgttttagaaacacaaggtgcagctcctagtggagaaggtggaccatccgctgttttagaaacacaaggtgcagcgccaagtatagaaggtggaagacctcttttattactaggaccatccagtgtagcgccaaatcttccaactactccatcatgccatggcactggtcctagaatgcttaaaaagaagttcacaccaaaaaaaaaggaaggcatgagtacctgatatgtaagatttgaaatatgttgtgtgaactatgtgttatttgagaccatgtgaagtgtaagatttgaaatatgttgtgtgaactatgtgttatttgagaccatgtgaagtgtaagatttgacatagaactgttgagctgcattcccagttgagaccaacaatctgttcatttgttatctgttttttgatctgctgagctgttcatttattaataactgaactagagcagttgttaacagattgacagattgtgagcagttctggaagttct

SEQ ID NO: 39145 - DNA, 1241 bp, Zea Mays
cgcagctaaccgcgcactaccacacgccacactcattactcgccactactcttgctgtctcttgcatcgcatgcccggccgcctctctatctctctctggctctcccccacagctatctgctatgcctatctagcttagctgcagacctaactaaactgctgccaagaatttggccaaagcaagatctcacaatcccatataacagatcggagcccgcccatgtatgtgtagatagacagattcccatagatatatggcggatcaccaggagatgatccacccaccagcggctgctgccaccacgggcagcacgacgactcacggcgattggtggaccacggcggtgtcgtggtcgccggaccagcagctacctgctgggttcggcggctgggcgtcgtctgccgcggccacagctggaggcaacaggtcgaggtccggcaacaacgcggctgcctcctcggagtcccccgggtccaagtccaaccactcgctcaccaccgaccaaggcgtggtctccgtgccgccgcacccgccgccagcggcgtctgctcacgccgccagcggcagctggaacgagccttcttactacttggacggatctgctggtttcatgagctcatcaagaagcgaccaggctcatcacctcggcctgagctgctcctcatcggatcacaacagcgtgatggtacagggcgcccacgatcccaaccagcagttcctatccaatctagggttcgagttgctctcgtcgccgacttcgtcttccggcgggttccggtcctcctccccctcacttctcagaagcctcacggagccatcggccgccgcgaacactacgccgccaggcctcctgcagcaataccagcagcagcagcagcagacgatggaccaggcgccagccgggagcatcagggaggctctgcagctcactactaacaggacgccgttttggaacccttgtgcggaaggggcagcgagcttactagggactgccagaccaccgtcgtcagggctagcgagttttccgtccaagggcgcaatagaaggtgccgggggctctagcaacataattgccaagaggacaaacaccgttccaacgccgtcgcttaagaaaccgagaacagggacaccatcgccattgcctaccttcaaggtgaggaaagagaagcttggtgacagaatcacagcacttcagcaactagtctctccttttggaaaggtaagtgatccaaggtcttag

SEQ ID NO: 39146 - DNA, 1992 bp, Zea Mays
ctgcctttgggtcctacgaatgtatagcaaaactctgttgaggttggtgttaagtaggcttctacttctaatggctggataaagatgaactcaacagctacgctacgccctcgggaaggagagaaaagacagggaaggaatgtccagctggaggcttccgcggccagtagtgggactgggagcgaagcgcatccgcacttccgcagaggatcctcggttcggttggagttggaggcccaaaagacctcccgcacccaacaaaactccagcctcacatctctccctctccctctccctcttcctctctgcggtccaaacaatctctccctctctctctctctctctctcttcttcctctctgcgctccaaacaatctcgccctctccttctctactctccaaaacaaacgaaacgaagcaagaaaccgagaaatctccctcccctgtggctgtggcggtggcggtggcggcgaggatcatgtcggcggctgcggcagcggaagtggggaaggagaagggcgccgccacccccggccccggccccggccccggtggcgcgtgcgagctgtgcggcgccgcggccagggtgtactgcggcgccgacgaggccacgctctgctggggctgcgacgcgcaggtgcacggcgccaacttcctggtggcgcgccacgcgcgctcgctgctgtgccggggctgcgcgcgccccacgccgtggcgcgccgcgggcccgcgcctcggccccaccgtctccctctgcgtccgctgcgtccgccgcggcccggcgggggccgtgggcgtcggcggcgatgaggagatggggggagcgggcgacggagacgccgaggatgacgacgacgaggacgacgactccgaggaggaggaggaggaggaggaggaggaaggggagggggagaaccaggtcgtgccgtggacggaggacgccgaggccacgccgccgcccgtcgggagctccacgtccagcagcagccgggaggcccccgccaacggcgcagagcgcgcagcgaagctttacctgaggcaggcaacctgcgatgactggtgtagatgctgatgctaacattagaaggccagcttttagtgcatccaagctccggggaagatgcggatcacgacggcacggcgagatcagttcccaccgaggcatacatctttcttcgatcatcagttcgtcttcggtcctcaagcaaccttgcacgccgcagagtttaccagagcagcagtcctagaaccatagtagtgttcctaaacgtcgatggcttcgctgagattgtatatgtccccattacttcgttgtgttcgattccgtcctcttctgcttgttttctaaccttagagaaacggtatagggcaggctcgcagttgcaccggcattgttcgatggcctcactgtctgctttcttgaattgtgccctgagtggctgagccctagtttcttgtttcttgacagttctttcggtgagatttattgtctatggttgcagtggcagctgaagcatgcggcactgtcgtcgctgctcacctggcaaatacatacaatctgggcaagttgcaacatggcgaagatggatctggaattgttaatcgcccatttgggcgggcgtggggttattaggatattgttcgtgtatggatgcccagtgatcttgtcagatgggtgttcttagacgggggggaaatatcctgcctggtagggggaacgcggaagtaacgtcatttgaaaatgtgcaggctggtctataggtcagtgacagcaacgtactggttttgatgctgccatggtcacggatgtacgtacgcttgctgctgctcgcaggcccggtcgctgtcgacatcatctcgccacaaagaattgaacctgaaaatgaaagcaggggtttgcttttgtgatgtgaaagaaccgaagcgtttctattgtattctgctggcgtttcgcatggaagcaccgtgcaaacaactgagtggccagtctctg

SEQ ID NO: 39147 - DNA, 2588 bp, Zea Mays
ctcagatctgggttcatctctgccgaggagctcggcaccgtggtgtgctcgctcgacctgcgcactacctgaagacgcattatgctgctattgtctccctcgtcgttgcctcgtgggtcacagtgctcctccactccctcgtcagccacaatgacagccaacaagactggtgtccaggagactgaaaagcactgctgaggagactgaaattatcttcgcgaggtggattacacattgaccacagattcagagaactatggattcatataaaacggcatggaactgattcaaaagaacatgaagtccagtgtgatttgaaaatttgggtatagctcagaagagatttgtgatgattcgaagtatcaaagaaacctgcaacatcaagaatttaaaaatgaaggtgactcgttcatctttgagacgcagcgccacaatggcataagggagctttgccctgcgaatggagagcacaagctaatccgtgcccgtgctctcatccccctgcatgaacccaattctgttgcgatcaaccatcaagggttgtcctattgtattattcagttcattgaaaaggactacaaattagcagatactatgatttggggtctactcaagcattggccagtcagaaactgccaagaggtaattggttttgaccaaattatcaactagatggctctatataaaatggcacacggaattggctgtgagcctgtctgtcaatgtccgaaacgacggcaggcgtgaagcggtggtcgggaaggaattaatgagtagcagcaatgcgtcagacagctacgtatcttcttccgcaatcccattctgacttaattaataaaacaacctttataatagtattatactgactcgatcgtctccaaagtctgaagcaaataaagggtgggtgcgtctccacctatacatatagtataatagtgaggtacccgtagagaccatataaatcagagggttttatatttcaccatttgataagaaaatactcgtattaggaagcttcaaaaaggagaggatattggatcttctatatatcttactttgtcctttatcattttcaaatgccaatcagtgaacaccaaatttcaggtttgttaaatgcctgttaccagtcaggaatgatatattatcttcggataataaataaaataactgggaactaggaattgtaccactatgctgtgtacttagttcctatgtaattctaattccttggtttattcttcaataactaggactggacaagagcttttggacatggttgacagtttgcccattgttgcgataaagagcctaaaagtatctgacttccaaggaacgatagctctctgcccagccaccagttttgagttgtattgagagcaaaaattcacatgctttccgaatgcaaatattgttctcataatttctcccagcagcaactaagccatttatcgcatggagggtcccatagataaaacatattccccaagtgccataccttgcaggggattgagatgctgtcattgggatcatttaaaaccagagtcattctctcgtcgtgtttgcaggcctttcagattgaaccgattacttcaacggtgtcatacatgattggtagggatgtgatggaggggagggggcaatgcaggtgcaggtaaaatttagaattttaagagcataataccctggttgtatttggcttgggagtaagtggatgttagcaatagtggagcatgtgtgggaagcggaggctgacgacagctcttacgttatcaaggaacaaacttatcctgagaaagtgctcacacgtggaacacagactactctttatttgagagatgatgacaagtatgagtttactgaccctgcaagaattgaaagcttagttaagaactgctcacaatttgtgtcattctcatatatacatggaaggagaaatcaagaacatttggggtctaaagagtctaaagaggaggaagaataaaaaaaggtgaagaggtcactgaggtgttgtactgtttcttagaattatccagcaacttcgatgggaggaattttgtttgagcttgtgggcccaatttgagaagttttacatatagagtaaaaaaaggtcctgctctcgtgttttcgtgtaaaactggattttgttcagttcttactgtggagctatgcttcctagataaaacttctcgatttgtataacttctcgatttgtataaaaacttctccatttacatattgggaagtctatatgtaaaacttctcgatttatatatcaactatgcttcctgtggagcaaggaagcgaacgcaagctagccttttgtattagtgcattctgttcagttcttacttgatcatcccgtgttctcgcgtgtgccatggctgagtggcaagctcaacactggtattgttgtcttgtctcaaatgaagtccggttccacaagttaaccggaaatcttcatgggtgatagctgcgtcagattcttccgcgcatagggcaagtaatgcaagtgatagctgtgtcagtttacccccattttcttgggcatcacttgtctcaaatgaagtccattggaggttcgcaattta

SEQ ID NO: 39148 - DNA, 2383 bp, Zea Mays
ctcagatctgggttcatctctgccgaggagctcggcaccgtggtgtgctcgctcgacctgcgcactacctgaagacgcattatgctgctattgtctccctcgtcgttgcctcgtgggtcacagtgctcctccactccctcgtcagccacaatgacagccaacaagactggtgtccaggagactgaaaagcactgctgaggagactgaaattatcttcgcgaggtggattacacattgtaagaactaagaactaaatctgttttttcttcttcttattttaaagaggaccaggtctcctgcattcttggaaacaagagacgatctcagattatcactaacttttttatgagctataaatgtgctctgcttaacggacatcttaaggaccacagattcagagaactatggattcatataaaacggcatggaactgattcaaaagaacatgaagtccagtgtgatttgaaaatttgggtatagctcagaagagatttgtgatgattcgaagtatcaaagaaacctgcaacatcaagaatttaaaaatgaaggtgactcgttcatctttgagacgcagcgccacaatggcataagggagctttgccctgcgaatggagagcacaagctaatccgtgcccgtgctctcatccccctgcatgaacccaattctgttgcgatcaaccatcaagggttgtcctattgtattattcagttcattgaaaaggactacaaattagcagatactatgatttggggtctactcaagcattggccagtcagaaactgccaagaggtaattggttttgaccaaattatcaactagatggctctatataaaatggcacacggaattggctgtgagcctgtctgtcaatgtccgaaacgacggcaggcgtgaagcggtggtcgggaaggaattaatgagtagcagcaatgcgtcagacagctacgtatcttcttccgcaatcccattctgacttaattaataaaacaacctttataatagtattatactgactcgatcgtctccaaagtctgaagcaaataaagggtgggtgcgtctccacctatacatatagtataatagtgaggtacccgtagagaccatataaatcagagggttttatatttcaccatttgataagaaaatactcgtattaggaagcttcaaaaaggagaggatattggatcttctatatatcttactttgtcctttatcattttcaaatgccaatcagtgaacaccaaatttcaggtttgttaaatgcctgttaccagtcaggaatgatatattatcttcggataataaataaaataactgggaactaggaattgtaccactatgctgtgtacttagttcctatgtaattctaattccttggtttattcttcaataactaggactggacaagagcttttggacatggttgacagtttgcccattgttgcgataaagagcctaaaagtatctgacttccaaggaacgatagctctctgcccagccaccagttttgagttgtattgagagcaaaaattcacatgctttccgaatgcaaatattgttctcataatttctcccagcagcaactaagccatttatcgcatggagggtcccatagataaaacatattccccaagtgccataccttgcaggggattgagatgctgtcattgggatcatttaaaaccagagtcattctctcgtcgtgtttgcaggcctttcagattgaaccgattacttcaacggtgtcatacatgattggtagggatgtgatggaggggagggggcaatgcaggtgcaggtgttgtactgtttcttagaattatccagcaacttcgatgggaggaattttgtttgagcttgtgggcccaatttgagaagttttacatatagagtaaaaaaaggtcctgctctcgtgttttcgtgtaaaactggattttgttcagttcttactgtggagctatgcttcctagataaaacttctcgatttgtataacttctcgatttgtataaaaacttctccatttacatattgggaagtctatatgtaaaacttctcgatttatatatcaactatgcttcctgtggagcaaggaagcgaacgcaagctagccttttgtattagtgcattctgttcagttcttacttgatcatcccgtgttctcgcgtgtgccatggctgagtggcaagctcaacactggtattgttgtcttgtctcaaatgaagtccggttccacaagttaaccggaaatcttcatgggtgatagctgcgtcagattcttccgcgcatagggcaagtaatgcaagtgatagctgtgtcagtttacccccattttcttgggcatcacttgtctcaaatgaagtccattggaggttcgcaattta

SEQ ID NO: 39149 - DNA, 3191 bp, Zea Mays
ctcagatctgggttcatctctgccgaggagctcggcaccgtggtgtgctcgctcgacctgcgcactacctgaagacgcattatgctgctattgtctccctcgtcgttgcctcgtgggtcacagtgctcctccactccctcgtcagccacaatgacagccaacaagactggtgtccaggagactgaaaagcactgctgaggagactgaaattatcttcgcgaggtggattacacattgtaagaactaagaactaaatctgttttttcttcttcttattttaaagaggaccaggtctcctgcattcttggaaacaagagacgatctcagattatcactaacttttttatgagctataaatgtgctctgcttaacggacatcttaaggaccacagattcagagaactatggattcatataaaacggcatggaactgattcaaaagaacatgaagtccagtgtgatttgaaaatttgggtatagctcagaagagatttgtgatgattcgaagtatcaaagaaacctgcaacatcaagaatttaaaaatgaaggtgactcgttcatctttgagacgcagcgccacaatggcataagggagctttgccctgcgaatggagagcacaagctaatccgtgcccgtgctctcatccccctgcatgaacccaattctgttgcgatcaaccatcaagggttgtcctattgtattattcagttcattgaaaaggactacaaattagcagatactatgatttggggtctactcaagcattggccagtcagaaactgccaagaggtaattggttttgaccaaattatcaactagatggctctatataaaatggcacacggaattggctgtgagcctgtctgtcaatgtccgaaacgacggcaggcgtgaagcggtggtcgggaaggaattaatgagtagcagcaatgcgtcagacagctacgtatcttcttccgcaatcccattctgacttaattaataaaacaacctttataatagtattatactgactcgatcgtctccaaagtctgaagcaaataaagggtgggtgcgtctccacctatacatatagtataatagtgaggtacccgtagagaccatataaatcagagggttttatatttcaccatttgataagaaaatactcgtattaggaagcttcaaaaaggagaggatattggatcttctatatatcttactttgtcctttatcattttcaaatgccaatcagtgaacaccaaatttcaggtttgttaaatgcctgttaccagtcaggaatgatatattatcttcggataataaataaaataactgggaactaggaattgtaccactatgctgtgtacttagttcctatgtaattctaattccttggtttattcttcaataactaggactggacaagagcttttggacatggttgacagtttgcccattgttgcgataaagagcctaaaagtatctgacttccaaggggattgagatgctgtcattgggatcatttaaaaccagagtcattctctcgtcgtgtttgcaggcctttcagattgaaccgattacttcaacggtgtcatacatgattggtagggatgtgatggaggggagggggcaatgcaggtgcaggtaaaatttagaattttaagagcataataccctggttgtatttggcttgggagtaagtggatgttagcaatagtggagcatgtgtgggaagcggaggctgacgacagctcttacgttatcaaggaacaaacttatcctgagaaagtgctcacacgtggaacacagactactctttatttgagagatgatgacaagtatgagtttactgaccctgcaagaattgaaagcttagttaagaactgctcacaatttgtgtcattctcatatatacatggaaggagaaatcaagaacatttggggtctaaagagtctaaagaggaggaagaataaaaaaaggtgaagaggtcactgaggttagttttgtgtcagtgtaatatgttgtttgttttcatgtaattcttgcttctaatattatagaaagaatccggataggcagataagaacatgtcaatgattttgatattttcagaaataaggatttctatggtgcatgttatttaaaaaacaagccaactatagcttgtgtcaggtcatagatgcttgctattattggaactggtccatgcaaatcatttttgctcaaaatccaacttggccaatcattagtaggtcaagttatattcatgaaaccttttgtttgttgtttctttgcctaaaaacatgctttcattggttagttcattatcctagagttgcagagggactttatgtagcatgatccatgctcaggtattgcaattttggcaatttctgtaatgtaacatggaattggtgaaggtccttggtcgagtaatcacaatactattgatattattcatattgattaaatttttatcattggttctctttgtttgttatattatcttgtgtcatcgattaacaactctttcaccggacgtcttgaggtgactttagtttcttatcttttatatgtatcctgacataaaaccagtgcttattttctattcgtgcatgtgcaggtgttgtactgtttcttagaattatccagcaacttcgatgggaggaattttgtttgagcttgtgggcccaatttgagaagttttacatatagagtaaaaaaaggtcctgctctcgtgttttcgtgtaaaactggattttgttcagttcttactgtggagctatgcttcctagataaaacttctcgatttgtataacttctcgatttgtataaaaacttctccatttacatattgggaagtctatatgtaaaacttctcgatttatatatcaactatgcttcctgtggagcaaggaagcgaacgcaagctagccttttgtattagtgcattctgttcagttcttacttgatcatcccgtgttctcgcgtgtgccatggctgagtggcaagctcaacactggtattgttgtcttgtctcaaatgaagtccggttccacaagttaaccggaaatcttcatgggtgatagctgcgtcagattcttccgcgcatagggcaagtaatgcaagtgatagctgtgtcagtttacccccattttcttgggcatcacttgtctcaaatgaagtccattggaggttcgcaattta

SEQ ID NO: 39150 - DNA, 3731 bp, Zea Mays
ctcagatctgggttcatctctgccgaggagctcggcaccgtggtgtgctcgctcgacctgcgcactacctgaagacgcattatgctgctattgtctccctcgtcgttgcctcgtgggtcacagtgctcctccactccctcgtcagccacaatgacagccaacaagactggtgtccaggagactgaaaagcactgctgaggagactgaaattatcttcgcgaggtggattacacattgtaagaactaagaactaaatctgttttttcttcttcttattttaaagaggaccaggtctcctgcattcttggaaacaagagacgatctcagattatcactaacttttttatgagctataaatgtgctctgcttaacggacatcttaaggaccacagattcagagaactatggattcatataaaacgggtgactcgttcatctttgagacgcagcgccacaatggcataagggagctttgccctgcgaatggagagcacaagctaatccgtgcccgtgctctcatccccctgcatgaacccaattctgttgcgatcaaccatcaagggttgtcctattgtattattcagttcattgaaaaggactacaaattagcagatactatgatttggggtctactcaagcattggccagtcagaaactgccaagaggtaattggttttgaccaaattatcaactagatggctctatataaaatggcacacggaattggctgtgagcctgtctgtcaatgtccgaaacgacggcaggcgtgaagcggtggtcgggaaggaattaatgagtagcagcaatgcgtcagacagctacgtatcttcttccgcaatcccattctgacttaattaataaaacaacctttataatagtattatactgactcgatcgtctccaaagtctgaagcaaataaagggtgggtgcgtctccacctatacatatagtataatagtgaggtacccgtagagaccatataaatcagagggttttatatttcaccatttgataagaaaatactcgtattaggaagcttcaaaaaggagaggatattggatcttctatatatcttactttgtcctttatcattttcaaatgccaatcagtgaacaccaaatttcaggtttgttaaatgcctgttaccagtcaggaatgatatattatcttcggataataaataaaataactgggaactaggaattgtaccactatgctgtgtacttagttcctatgtaattctaattccttggtttattcttcaataactaggactggacaagagcttttggacatggttgacagtttgcccattgttgcgataaagagcctaaaagtatctgacttccaaggaacgatagctctctgcccagccaccagttttgagttgtattgagagcaaaaattcacatgctttccgaatgcaaatattgttctcataatttctcccagcagcaactaagccatttatcgcatggagggtcccatagataaaacatattccccaagtgccataccttgcaggggattgagatgctgtcattgggatcatttaaaaccagagtcattctctcgtcgtgtttgcaggcctttcagattgaaccgattacttcaacggtgtcatacatgattggtagggatgtgatggaggggagggggcaatgcaggtgcaggtgcattccgaatctccttccctttctccggattctattgttctttgtttcctcctattcgtttctgtagtgagaaatgtcttcggtaagatttggttggtggaaattcactgcatttacttattattgtctcccaatttcctcttcatagtcaggaactttctggttcagtggaaatgtggaattgtaccaatgtagagtctagaataagtgtgcccttatcctcccagttagcataatgtgggtacttcgtttgtcatgtatggggcatagtgcaatacaaatccttttgttaattaataatgattcagggatgcctcgttgtccatgtaacatccaaactgcccacacacacacatcaaattttggcatgataaccctgttcattaaatctgttttgtttgtaaatcacaaacaaatatgttaaccttttattgaagtgtgagatactcaatcatgttgtgttttttggttttctattttgagtgtataggtaaaatttagaattttaagagcataataccctggttgtatttggcttgggagtaagtggatgttagcaatagtggagcatgtgtgggaagcggaggctgacgacagctcttacgttatcaaggaacaaacttatcctgagaaagtgctcacacgtggaacacagactactctttatttgagagatgatgacaagtatgagtttactgaccctgcaagaattgaaagcttagttaagaactgctcacaatttgtgtcattctcatatatacatggaaggagaaatcaagaacatttggggtctaaagagtctaaagaggaggaagaataaaaaaaggtgaagaggtcactgaggttagttttgtgtcagtgtaatatgttgtttgttttcatgtaattcttgcttctaatattatagaaagaatccggataggcagataagaacatgtcaatgattttgatattttcagaaataaggatttctatggtgcatgttatttaaaaaacaagccaactatagcttgtgtcaggtcatagatgcttgctattattggaactggtccatgcaaatcatttttgctcaaaatccaacttggccaatcattagtaggtcaagttatattcatgaaaccttttgtttgttgtttctttgcctaaaaacatgctttcattggttagttcattatcctagagttgcagagggactttatgtagcatgatccatgctcaggtattgcaattttggcaatttctgtaatgtaacatggaattggtgaaggtccttggtcgagtaatcacaatactattgatattattcatattgattaaatttttatcattggttctctttgtttgttatattatcttgtgtcatcgattaacaactctttcaccggacgtcttgaggtgactttagtttcttatcttttatatgtatcctgacataaaaccagtgcttattttctattcgtgcatgtgcaggtgttgtactgtttcttagaattatccagcaacttcgatgggaggaattttgtttgagcttgtgggcccaatttgagaagttttacatatagagtaaaaaaaggtcctgctctcgtgttttcgtgtaaaactggattttgttcagttcttactgtggagctatgcttcctagataaaacttctcgatttgtataacttctcgatttgtataaaaacttctccatttacatattgggaagtctatatgtaaaacttctcgatttatatatcaactatgcttcctgtggagcaaggaagcgaacgcaagctagccttttgtattagtgcattctgttcagttcttacttgatcatcccgtgttctcgcgtgtgccatggctgagtggcaagctcaacactggtattgttgtcttgtctcaaatgaagtccggttccacaagttaaccggaaatcttcatgggtgatagctgcgtcagattcttccgcgcatagggcaagtaatgcaagtgatagctgtgtcagtttacccccattttcttgggcatcacttgtctcaaatgaagtccattggaggttcgcaattta

SEQ ID NO: 39151 - DNA, 3351 bp, Zea Mays
ctcagatctgggttcatctctgccgaggagctcggcaccgtggtgtgctcgctcgacctgcgcactacctgaagacgcattatgctgctattgtctccctcgtcgttgcctcgtgggtcacagtgctcctccactccctcgtcagccacaatgacagccaacaagactggtgtccaggagactgaaaagcactgctgaggagactgaaattatcttcgcgaggtggattacacattgtaagaactaagaactaaatctgttttttcttcttcttattttaaagaggaccaggtctcctgcattcttggaaacaagagacgatctcagattatcactaacttttttatgagctataaatgtgctctgcttaacggacatcttaaggaccacagattcagagaactatggattcatataaaacggcatggaactgattcaaaagaacatgaagtccagtgtgatttgaaaatttgggtatagctcagaagagatttgtgatgattcgaagtatcaaagaaacctgcaacatcaagaatttaaaaatgaaggtgactcgttcatctttgagacgcagcgccacaatggcataagggagctttgccctgcgaatggagagcacaagctaatccgtgcccgtgctctcatccccctgcatgaacccaattctgttgcgatcaaccatcaagggttgtcctattgtattattcagttcattgaaaaggactacaaattagcagatactatgatttggggtctactcaagcattggccagtcagaaactgccaagaggtaattggttttgaccaaattatcaactagatggctctatataaaatggcacacggaattggctgtgagcctgtctgtcaatgtccgaaacgacggcaggcgtgaagcggtggtcgggaaggaattaatgagtagcagcaatgcgtcagacagctacgtatcttcttccgcaatcccattctgacttaattaataaaacaacctttataatagtattatactgactcgatcgtctccaaagtctgaagcaaataaagggtgggtgcgtctccacctatacatatagtataatagtgaggtacccgtagagaccatataaatcagagggttttatatttcaccatttgataagaaaatactcgtattaggaagcttcaaaaaggagaggatattggatcttctatatatcttactttgtcctttatcattttcaaatgccaatcagtgaacaccaaatttcaggtttgttaaatgcctgttaccagtcaggaatgatatattatcttcggataataaataaaataactgggaactaggaattgtaccactatgctgtgtacttagttcctatgtaattctaattccttggtttattcttcaataactaggactggacaagagcttttggacatggttgacagtttgcccattgttgcgataaagagcctaaaagtatctgacttccaaggaacgatagctctctgcccagccaccagttttgagttgtattgagagcaaaaattcacatgctttccgaatgcaaatattgttctcataatttctcccagcagcaactaagccatttatcgcatggagggtcccatagataaaacatattccccaagtgccataccttgcaggggattgagatgctgtcattgggatcatttaaaaccagagtcattctctcggcctttcagattgaaccgattacttcaacggtgtcatacatgattggtagggatgtgatggaggggagggggcaatgcaggtgcaggtaaaatttagaattttaagagcataataccctggttgtatttggcttgggagtaagtggatgttagcaatagtggagcatgtgtgggaagcggaggctgacgacagctcttacgttatcaaggaacaaacttatcctgagaaagtgctcacacgtggaacacagactactctttatttgagagatgatgacaagtatgagtttactgaccctgcaagaattgaaagcttagttaagaactgctcacaatttgtgtcattctcatatatacatggaaggagaaatcaagaacatttggggtctaaagagtctaaagaggaggaagaataaaaaaaggtgaagaggtcactgaggttagttttgtgtcagtgtaatatgttgtttgttttcatgtaattcttgcttctaatattatagaaagaatccggataggcagataagaacatgtcaatgattttgatattttcagaaataaggatttctatggtgcatgttatttaaaaaacaagccaactatagcttgtgtcaggtcatagatgcttgctattattggaactggtccatgcaaatcatttttgctcaaaatccaacttggccaatcattagtaggtcaagttatattcatgaaaccttttgtttgttgtttctttgcctaaaaacatgctttcattggttagttcattatcctagagttgcagagggactttatgtagcatgatccatgctcaggtattgcaattttggcaatttctgtaatgtaacatggaattggtgaaggtccttggtcgagtaatcacaatactattgatattattcatattgattaaatttttatcattggttctctttgtttgttatattatcttgtgtcatcgattaacaactctttcaccggacgtcttgaggtgactttagtttcttatcttttatatgtatcctgacataaaaccagtgcttattttctattcgtgcatgtgcaggtgttgtactgtttcttagaattatccagcaacttcgatgggaggaattttgtttgagcttgtgggcccaatttgagaagttttacatatagagtaaaaaaaggtcctgctctcgtgttttcgtgtaaaactggattttgttcagttcttactgtggagctatgcttcctagataaaacttctcgatttgtataacttctcgatttgtataaaaacttctccatttacatattgggaagtctatatgtaaaacttctcgatttatatatcaactatgcttcctgtggagcaaggaagcgaacgcaagctagccttttgtattagtgcattctgttcagttcttacttgatcatcccgtgttctcgcgtgtgccatggctgagtggcaagctcaacactggtattgttgtcttgtctcaaatgaagtccggttccacaagttaaccggaaatcttcatgggtgatagctgcgtcagattcttccgcgcatagggcaagtaatgcaagtgatagctgtgtcagtttacccccattttcttgggcatcacttgtctcaaatgaagtccattggaggttcgcaattta

SEQ ID NO: 39152 - DNA, 2531 bp, Zea Mays
ctcagatctgggttcatctctgccgaggagctcggcaccgtggtgtgctcgctcgacctgcgcactacctgaagacgcattatgctgctattgtctccctcgtcgttgcctcgtgggtcacagtgctcctccactccctcgtcagccacaatgacagccaacaagactggtgtccaggagactgaaaagcactgctgaggagactgaaattatcttcgcgaggtggattacacattgtgactcgttcatctttgagacgcagcgccacaatggcataagggagctttgccctgcgaatggagagcacaagctaatccgtgcccgtgctctcatccccctgcatgaacccaattctgttgcgatcaaccatcaagggttgtcctattgtattattcagttcattgaaaaggactacaaattagcagatactatgatttggggtctactcaagcattggccagtcagaaactgccaagaggtgttgaaataacttgaattcaatatatgaatttcctttgcatatgtaattggttttgaccaaattatcaactagatggctctatataaaatggcacacggaattggctgtgagcctgtctgtcaatgtccgaaacgacggcaggcgtgaagcggtggtcgggaaggaattaatgagtagcagcaatgcgtcagacagctacgtatcttcttccgcaatcccattctgacttaattaataaaacaacctttataatagtattatactgactcgatcgtctccaaagtctgaagcaaataaagggtgggtgcgtctccacctatacatatagtataatagtgaggtacccgtagagaccatataaatcagagggttttatatttcaccatttgataagaaaatactcgtattaggaagcttcaaaaaggagaggatattggatcttctatatatcttactttgtcctttatcattttcaaatgccaatcagtgaacaccaaatttcaggtttgttaaatgcctgttaccagtcaggaatgatatattatcttcggataataaataaaataactgggaactaggaattgtaccactatgctgtgtacttagttcctatgtaattctaattccttggtttattcttcaataactaggactggacaagagcttttggacatggttgacagtttgcccattgttgcgataaagagcctaaaagtatctgacttccaaggtacgtcatctaatctctgaatgtgaaatgaaatacaacagttactcacctgtctttcgcaggaacgatagctctctgcccagccaccagttttgagttgtattgagagcaaaaattcacatgctttccgaatgcaaatattgttctcataatttctcccagcagcaactaagccatttatcgcatggagggtcccatagataaaacatattccccaagtgccataccttgcaggggattgagatgctgtcattgggatcatttaaaaccagagtcattctctcgtcgtgtttgcaggcctttcagattgaaccgattacttcaacggtgtcatacatgattggtagggatgtgatggaggggagggggcaatgcaggtgcaggtaaaatttagaattttaagagcataataccctggttgtatttggcttgggagtaagtggatgttagcaatagtggagcatgtgtgggaagcggaggctgacgacagctcttacgttatcaaggaacaaacttatcctgagaaagtgctcacacgtggaacacagactactctttatttgagagatgatgacaagtatgagtttactgaccctgcaagaattgaaagcttagttaagaactgctcacaatttgtgtcattctcatatatacatggaaggagaaatcaagaacatttggggtctaaagagtctaaagaggaggaagaataaaaaaaggtgaagaggtcactgaggtgttgtactgtttcttagaattatccagcaacttcgatgggaggaattttgtttgagcttgtgggcccaatttgagaagttttacatatagagtaaaaaaaggtcctgctctcgtgttttcgtgtaaaactggattttgttcagttcttactgtggagctatgcttcctagataaaacttctcgatttgtataacttctcgatttgtataaaaacttctccatttacatattgggaagtctatatgtaaaacttctcgatttatatatcaactatgcttcctgtggagcaaggaagcgaacgcaagctagccttttgtattagtgcattctgttcagttcttacttgatcatcccgtgttctcgcgtgtgccatggctgagtggcaagctcaacactggtattgttgtcttgtctcaaatgaagtccggttccacaagttaaccggaaatcttcatgggtgatagctgcgtcagattcttccgcgcatagggcaagtaatgcaagtgatagctgtgtcagtttacccccattttcttgggcatcacttgtctcaaatgaagtccattggaggttcgcaattta

SEQ ID NO: 39153 - DNA, 2463 bp, Zea Mays
ctcagatctgggttcatctctgccgaggagctcggcaccgtggtgtgctcgctcgacctgcgcactacctgaagacgcattatgctgctattgtctccctcgtcgttgcctcgtgggtcacagtgctcctccactccctcgtcagccacaatgacagccaacaagactggtgtccaggagactgaaaagcactgctgaggagactgaaattatcttcgcgaggtggattacacattgaccacagattcagagaactatggattcatataaaacgggtgactcgttcatctttgagacgcagcgccacaatggcataagggagctttgccctgcgaatggagagcacaagctaatccgtgcccgtgctctcatccccctgcatgaacccaattctgttgcgatcaaccatcaagggttgtcctattgtattattcagttcattgaaaaggactacaaattagcagatactatgatttggggtctactcaagcattggccagtcagaaactgccaagaggtaattggttttgaccaaattatcaactagatggctctatataaaatggcacacggaattggctgtgagcctgtctgtcaatgtccgaaacgacggcaggcgtgaagcggtggtcgggaaggaattaatgagtagcagcaatgcgtcagacagctacgtatcttcttccgcaatcccattctgacttaattaataaaacaacctttataatagtattatactgactcgatcgtctccaaagtctgaagcaaataaagggtgggtgcgtctccacctatacatatagtataatagtgaggtacccgtagagaccatataaatcagagggttttatatttcaccatttgataagaaaatactcgtattaggaagcttcaaaaaggagaggatattggatcttctatatatcttactttgtcctttatcattttcaaatgccaatcagtgaacaccaaatttcaggtttgttaaatgcctgttaccagtcaggaatgatatattatcttcggataataaataaaataactgggaactaggaattgtaccactatgctgtgtacttagttcctatgtaattctaattccttggtttattcttcaataactaggactggacaagagcttttggacatggttgacagtttgcccattgttgcgataaagagcctaaaagtatctgacttccaaggaacgatagctctctgcccagccaccagttttgagttgtattgagagcaaaaattcacatgctttccgaatgcaaatattgttctcataatttctcccagcagcaactaagccatttatcgcatggagggtcccatagataaaacatattccccaagtgccataccttgcaggggattgagatgctgtcattgggatcatttaaaaccagagtcattctctcgtcgtgtttgcaggcctttcagattgaaccgattacttcaacggtgtcatacatgattggtagggatgtgatggaggggagggggcaatgcaggtgcaggtaaaatttagaattttaagagcataataccctggttgtatttggcttgggagtaagtggatgttagcaatagtggagcatgtgtgggaagcggaggctgacgacagctcttacgttatcaaggaacaaacttatcctgagaaagtgctcacacgtggaacacagactactctttatttgagagatgatgacaagtatgagtttactgaccctgcaagaattgaaagcttagttaagaactgctcacaatttgtgtcattctcatatatacatggaaggagaaatcaagaacatttggggtctaaagagtctaaagaggaggaagaataaaaaaaggtgaagaggtcactgaggtgttgtactgtttcttagaattatccagcaacttcgatgggaggaattttgtttgagcttgtgggcccaatttgagaagttttacatatagagtaaaaaaaggtcctgctctcgtgttttcgtgtaaaactggattttgttcagttcttactgtggagctatgcttcctagataaaacttctcgatttgtataacttctcgatttgtataaaaacttctccatttacatattgggaagtctatatgtaaaacttctcgatttatatatcaactatgcttcctgtggagcaaggaagcgaacgcaagctagccttttgtattagtgcattctgttcagttcttacttgatcatcccgtgttctcgcgtgtgccatggctgagtggcaagctcaacactggtattgttgtcttgtctcaaatgaagtccggttccacaagttaaccggaaatcttcatgggtgatagctgcgtcagattcttccgcgcatagggcaagtaatgcaagtgatagctgtgtcagtttacccccattttcttgggcatcacttgtctcaaatgaagtccattggaggttcgcaattta

SEQ ID NO: 39154 - DNA, 2742 bp, Zea Mays
ctcagatctgggttcatctctgccgaggagctcggcaccgtggtgtgctcgctcgacctgcgcactacctgaagacgcattatgctgctattgtctccctcgtcgttgcctcgtgggtcacagtgctcctccactccctcgtcagccacaatgacagccaacaagactggtgtccaggagactgaaaagcactgctgaggagactgaaattatcttcgcgaggtggattacacattgtaagaactaagaactaaatctgttttttcttcttcttattttaaagaggaccaggtctcctgcattcttggaaacaagagacgatctcagattatcactaacttttttatgagctataaatgtgctctgcttaacggacatcttaaggaccacagattcagagaactatggattcatataaaacggcatggaactgattcaaaagaacatgaagtccagtgtgatttgaaaatttgggtatagctcagaagagatttgtgatgattcgaagtatcaaagaaacctgcaacatcaagaatttaaaaatgaaggtgactcgttcatctttgagacgcagcgccacaatggcataagggagctttgccctgcgaatggagagcacaagctaatccgtgcccgtgctctcatccccctgcatgaacccaattctgttgcgatcaaccatcaagggttgtcctattgtattattcagttcattgaaaaggactacaaattagcagatactatgatttggggtctactcaagcattggccagtcagaaactgccaagaggtaattggttttgaccaaattatcaactagatggctctatataaaatggcacacggaattggctgtgagcctgtctgtcaatgtccgaaacgacggcaggcgtgaagcggtggtcgggaaggaattaatgagtagcagcaatgcgtcagacagctacgtatcttcttccgcaatcccattctgacttaattaataaaacaacctttataatagtattatactgactcgatcgtctccaaagtctgaagcaaataaagggtgggtgcgtctccacctatacatatagtataatagtgaggtacccgtagagaccatataaatcagagggttttatatttcaccatttgataagaaaatactcgtattaggaagcttcaaaaaggagaggatattggatcttctatatatcttactttgtcctttatcattttcaaatgccaatcagtgaacaccaaatttcaggtttgttaaatgcctgttaccagtcaggaatgatatattatcttcggataataaataaaataactgggaactaggaattgtaccactatgctgtgtacttagttcctatgtaattctaattccttggtttattcttcaataactaggactggacaagagcttttggacatggttgacagtttgcccattgttgcgataaagagcctaaaagtatctgacttccaaggaacgatagctctctgcccagccaccagttttgagttgtattgagagcaaaaattcacatgctttccgaatgcaaatattgttctcataatttctcccagcagcaactaagccatttatcgcatggagggtcccatagataaaacatattccccaagtgccataccttgcaggggattgagatgctgtcattgggatcatttaaaaccagagtcattctctcgtcgtgtttgcaggcctttcagattgaaccgattacttcaacggtgtcatacatgattggtagggatgtgatggaggggagggggcaatgcaggtgcaggtaaaatttagaattttaagagcataataccctggttgtatttggcttgggagtaagtggatgttagcaatagtggagcatgtgtgggaagcggaggctgacgacagctcttacgttatcaaggaacaaacttatcctgagaaagtgctcacacgtggaacacagactactctttatttgagagatgatgacaagtatgagtttactgaccctgcaagaattgaaagcttagttaagaactgctcacaatttgtgtcattctcatatatacatggaaggagaaatcaagaacatttggggtctaaagagtctaaagaggaggaagaataaaaaaaggtgaagaggtcactgaggttagtgtgttgtactgtttcttagaattatccagcaacttcgatgggaggaattttgtttgagcttgtgggcccaatttgagaagttttacatatagagtaaaaaaaggtcctgctctcgtgttttcgtgtaaaactggattttgttcagttcttactgtggagctatgcttcctagataaaacttctcgatttgtataacttctcgatttgtataaaaacttctccatttacatattgggaagtctatatgtaaaacttctcgatttatatatcaactatgcttcctgtggagcaaggaagcgaacgcaagctagccttttgtattagtgcattctgttcagttcttacttgatcatcccgtgttctcgcgtgtgccatggctgagtggcaagctcaacactggtattgttgtcttgtctcaaatgaagtccggttccacaagttaaccggaaatcttcatgggtgatagctgcgtcagattcttccgcgcatagggcaagtaatgcaagtgatagctgtgtcagtttacccccattttcttgggcatcacttgtctcaaatgaagtccattggaggttcgcaattta

SEQ ID NO: 39155 - DNA, 2158 bp, Zea Mays
ctcagatctgggttcatctctgccgaggagctcggcaccgtggtgtgctcgctcgacctgcgcactacctgaagacgcattatgctgctattgtctccctcgtcgttgcctcgtgggtcacagtgctcctccactccctcgtcagccacaatgacagccaacaagactggtgtccaggagactgaaaagcactgctgaggagactgaaattatcttcgcgaggtggattacacattgtaagaactaagaactaaatctgttttttcttcttcttattttaaagaggaccaggtctcctgcattcttggaaacaagagacgatctcagattatcactaacttttttatgagctataaatgtgctctgcttaacggacatcttaaggaccacagattcagagaactatggattcatataaaacgggtgactcgttcatctttgagacgcagcgccacaatggcataagggagctttgccctgcgaatggagagcacaagctaatccgtgcccgtgctctcatccccctgcatgaacccaattctgttgcgatcaaccatcaagggttgtcctattgtattattcagttcattgaaaaggactacaaattagcagatactatgatttggggtctactcaagcattggccagtcagaaactgccaagaggtaattggttttgaccaaattatcaactagatggctctatataaaatggcacacggaattggctgtgagcctgtctgtcaatgtccgaaacgacggcaggcgtgaagcggtggtcgggaaggaattaatgagtagcagcaatgcgtcagacagctacgtatcttcttccgcaatcccattctgacttaattaataaaacaacctttataatagtattatactgactcgatcgtctccaaagtctgaagcaaataaagggtgggtgcgtctccacctatacatatagtataatagtgaggtacccgtagagaccatataaatcagagggttttatatttcaccatttgataagaaaatactcgtattaggaagcttcaaaaaggagaggatattggatcttctatatatcttactttgtcctttatcattttcaaatgccaatcagtgaacaccaaatttcaggtttgttaaatgcctgttaccagtcaggaatgatatattatcttcggataataaataaaataactgggaactaggaattgtaccactatgctgtgtacttagttcctatgtaattctaattccttggtttattcttcaataactaggactggacaagagcttttggacatggttgacagtttgcccattgttgcgataaagagcctaaaagtatctgacttccaagcagcaactaagccatttatcgcatggagggtcccatagataaaacatattccccaagtgccataccttgcaggggattgagatgctgtcattgggatcatttaaaaccagagtcattctctcgtcgtgtttgcaggcctttcagattgaaccgattacttcaacggtgtcatacatgattggtagggatgtgatggaggggagggggcaatgcaggtgcaggtgttgtactgtttcttagaattatccagcaacttcgatgggaggaattttgtttgagcttgtgggcccaatttgagaagttttacatatagagtaaaaaaaggtcctgctctcgtgttttcgtgtaaaactggattttgttcagttcttactgtggagctatgcttcctagataaaacttctcgatttgtataacttctcgatttgtataaaaacttctccatttacatattgggaagtctatatgtaaaacttctcgatttatatatcaactatgcttcctgtggagcaaggaagcgaacgcaagctagccttttgtattagtgcattctgttcagttcttacttgatcatcccgtgttctcgcgtgtgccatggctgagtggcaagctcaacactggtattgttgtcttgtctcaaatgaagtccggttccacaagttaaccggaaatcttcatgggtgatagctgcgtcagattcttccgcgcatagggcaagtaatgcaagtgatagctgtgtcagtttacccccattttcttgggcatcacttgtctcaaatgaagtccattggaggttcgcaattta

SEQ ID NO: 39156 - DNA, 3363 bp, Zea Mays
ctcagatctgggttcatctctgccgaggagctcggcaccgtggtgtgctcgctcgacctgcgcactacctgaagacgcattatgctgctattgtctccctcgtcgttgcctcgtgggtcacagtgctcctccactccctcgtcagccacaatgacagccaacaagactggtgtccaggagactgaaaagcactgctgaggagactgaaattatcttcgcgaggtggattacacattgtaagaactaagaactaaatctgttttttcttcttcttattttaaagaggaccaggtctcctgcattcttggaaacaagagacgatctcagattatcactaacttttttatgagctataaatgtgctctgcttaacggacatcttaaggaccacagattcagagaactatggattcatataaaacggcatggaactgattcaaaagaacatgaagtccagtgtgatttgaaaatttgggtatagctcagaagagatttgtgatgattcgaagtatcaaagaaacctgcaacatcaagaatttaaaaatgaaggtgactcgttcatctttgagacgcagcgccacaatggcataagggagctttgccctgcgaatggagagcacaagctaatccgtgcccgtgctctcatccccctgcatgaacccaattctgttgcgatcaaccatcaagggttgtcctattgtattattcagttcattgaaaaggactacaaattagcagatactatgatttggggtctactcaagcattggccagtcagaaactgccaagaggtaattggttttgaccaaattatcaactagatggctctatataaaatggcacacggaattggctgtgagcctgtctgtcaatgtccgaaacgacggcaggcgtgaagcggtggtcgggaaggaattaatgagtagcagcaatgcgtcagacagctacgtatcttcttccgcaatcccattctgacttaattaataaaacaacctttataatagtattatactgactcgatcgtctccaaagtctgaagcaaataaagggtgggtgcgtctccacctatacatatagtataatagtgaggtacccgtagagaccatataaatcagagggttttatatttcaccatttgataagaaaatactcgtattaggaagcttcaaaaaggagaggatattggatcttctatatatcttactttgtcctttatcattttcaaatgccaatcagtgaacaccaaatttcaggtttgttaaatgcctgttaccagtcaggaatgatatattatcttcggataataaataaaataactgggaactaggaattgtaccactatgctgtgtacttagttcctatgtaattctaattccttggtttattcttcaataactaggactggacaagagcttttggacatggttgacagtttgcccattgttgcgataaagagcctaaaagtatctgacttccaaggaacgatagctctctgcccagccaccagttttgagttgtattgagagcaaaaattcacatgctttccgaatgcaaatattgttctcataatttctcccagcagcaactaagccatttatcgcatggagggtcccatagataaaacatattccccaagtgccataccttgcaggggattgagatgctgtcattgggatcatttaaaaccagagtcattctctcgtcgtgtttgcaggcctttcagattgaaccgattacttcaacggtgtcatacatgattggtagggatgtgatggaggggagggggcaatgcaggtgcaggtaaaatttagaattttaagagcataataccctggttgtatttggcttgggagtaagtggatgttagcaatagtggagcatgtgtgggaagcggaggctgacgacagctcttacgttatcaaggaacaaacttatcctgagaaagtgctcacacgtggaacacagactactctttatttgagagatgatgacaagtatgagtttactgaccctgcaagaattgaaagcttagttaagaactgctcacaatttgtgtcattctcatatatacatggaaggagaaatcaagaacatttggggtctaaagagtctaaagaggaggaagaataaaaaaaggtgaagaggtcactgaggttagttttgtgtcagtgtaatatgttgtttgttttcatgtaattcttgcttctaatattatagaaagaatccggataggcagataagaacatgtcaatgattttgatattttcagaaataaggatttctatggtgcatgttatttaaaaaacaagccaactatagcttgtgtcaggtcatagatgcttgctattattggaactggtccatgcaaatcatttttgctcaaaatccaacttggccaatcattagtaggtcaagttatattcatgaaaccttttgtttgttgtttctttgcctaaaaacatgctttcattggttagttcattatcctagagttgcagagggactttatgtagcatgatccatgctcaggtattgcaattttggcaatttctgtaatgtaacatggaattggtgaaggtccttggtcgagtaatcacaatactattgatattattcatattgattaaatttttatcattggttctctttgtttgttatattatcttgtgtcatcgattaacaactctttcaccggacgtcttgaggtgactttagtttcttatcttttatatgtatcctgacataaaaccagtgcttattttctattcgtgcatgtgcaggtgttgtactgtttcttagaattatccagcaacttcgatgggaggaattttgtttgagcttgtgggcccaatttgagaagttttacatatagagtaaaaaaaggtcctgctctcgtgttttcgtgtaaaactggattttgttcagttcttactgtggagctatgcttcctagataaaacttctcgatttgtataacttctcgatttgtataaaaacttctccatttacatattgggaagtctatatgtaaaacttctcgatttatatatcaactatgcttcctgtggagcaaggaagcgaacgcaagctagccttttgtattagtgcattctgttcagttcttacttgatcatcccgtgttctcgcgtgtgccatggctgagtggcaagctcaacactggtattgttgtcttgtctcaaatgaagtccggttccacaagttaaccggaaatcttcatgggtgatagctgcgtcagattcttccgcgcatagggcaagtaatgcaagtgatagctgtgtcagtttacccccattttcttgggcatcacttgtctcaaatgaagtccattggaggttcgcaattta

SEQ ID NO: 39157 - DNA, 2683 bp, Zea Mays
ctcagatctgggttcatctctgccgaggagctcggcaccgtggtgtgctcgctcgacctgcgcactacctgaagacgcattatgctgctattgtctccctcgtcgttgcctcgtgggtcacagtgctcctccactccctcgtcagccacaatgacagccaacaagactggtgtccaggagactgaaaagcactgctgaggagactgaaattatcttcgcgaggtggattacacattgtaagaactaagaactaaatctgttttttcttcttcttattttaaagaggaccaggtctcctgcattcttggaaacaagagacgatctcagattatcactaacttttttatgagctataaatgtgctctgcttaacggacatcttaaggaccacagattcagagaactatggattcatataaaacggcatggaactgattcaaaagaacatgaagtccagtgtgatttgaaaatttgggtatagctcagaagagatttgtgatgattcgaagtatcaaagaaacctgcaacatcaagaatttaaaaatgaaggtgactcgttcatctttgagacgcagcgccacaatggcataagggagctttgccctgcgaatggagagcacaagctaatccgtgcccgtgctctcatccccctgcatgaacccaattctgttgcgatcaaccatcaagggttgtcctattgtattattcagttcattgaaaaggactacaaattagcagatactatgatttggggtctactcaagcattggccagtcagaaactgccaagaggtaattggttttgaccaaattatcaactagatggctctatataaaatggcacacggaattggctgtgagcctgtctgtcaatgtccgaaacgacggcaggcgtgaagcggtggtcgggaaggaattaatgagtagcagcaatgcgtcagacagctacgtatcttcttccgcaatcccattctgacttaattaataaaacaacctttataatagtattatactgactcgatcgtctccaaagtctgaagcaaataaagggtgggtgcgtctccacctatacatatagtataatagtgaggtacccgtagagaccatataaatcagagggttttatatttcaccatttgataagaaaatactcgtattaggaagcttcaaaaaggagaggatattggatcttctatatatcttactttgtcctttatcattttcaaatgccaatcagtgaacaccaaatttcaggtttgttaaatgcctgttaccagtcaggaatgatatattatcttcggataataaataaaataactgggaactaggaattgtaccactatgctgtgtacttagttcctatgtaattctaattccttggtttattcttcaataactaggactggacaagagcttttggacatggttgacagtttgcccattgttgcgataaagagcctaaaagtatctgacttccaaggaacgatagctctctgcccagccaccagttttgagttgtattgagagcaaaaattcacatgctttccgaatgcaaatattgttctcataatttctcccagcagcaactaagccatttatcgcatggagggtcccatagataaaacatattccccaagtgccataccttgcaggggattgagatgctgtcattgggatcatttaaaaccagagtcattctctcgtcgtgtttgcaggcctttcagattgaaccgattacttcaacggtgtcatacatgattggtagggatgtgatggaggggagggggcaatgcaggtgcaggtaaaatttagaattttaagagcataataccctggttgtatttggcttgggagtaagtggatgttagcaatagtggagcatgtgtgggaagcggaggctgacgacagctcttacgttatcaaggaacaaacttatcctgagaaagtgctcacacgtggaacacagactactctttatttgagagatgatgacaagtatgagtttactgaccctgcaagaattgaaagcttagttaagaactgctcacaatttgtgtcattctcatatatacatggaaggagaaatcaagaacatttgggggtgttgtactgtttcttagaattatccagcaacttcgatgggaggaattttgtttgagcttgtgggcccaatttgagaagttttacatatagagtaaaaaaaggtcctgctctcgtgttttcgtgtaaaactggattttgttcagttcttactgtggagctatgcttcctagataaaacttctcgatttgtataacttctcgatttgtataaaaacttctccatttacatattgggaagtctatatgtaaaacttctcgatttatatatcaactatgcttcctgtggagcaaggaagcgaacgcaagctagccttttgtattagtgcattctgttcagttcttacttgatcatcccgtgttctcgcgtgtgccatggctgagtggcaagctcaacactggtattgttgtcttgtctcaaatgaagtccggttccacaagttaaccggaaatcttcatgggtgatagctgcgtcagattcttccgcgcatagggcaagtaatgcaagtgatagctgtgtcagtttacccccattttcttgggcatcacttgtctcaaatgaagtccattggaggttcgcaattta

SEQ ID NO: 39158 - DNA, 3238 bp, Zea Mays
ctcagatctgggttcatctctgccgaggagctcggcaccgtggtgtgctcgctcgacctgcgcactacctgaagacgcattatgctgctattgtctccctcgtcgttgcctcgtgggtcacagtgctcctccactccctcgtcagccacaatgacagccaacaagactggtgtccaggagactgaaaagcactgctgaggagactgaaattatcttcgcgaggtggattacacattgtaagaactaagaactaaatctgttttttcttcttcttattttaaagaggaccaggtctcctgcattcttggaaacaagagacgatctcagattatcactaacttttttatgagctataaatgtgctctgcttaacggacatcttaaggaccacagattcagagaactatggattcatataaaacgggtgactcgttcatctttgagacgcagcgccacaatggcataagggagctttgccctgcgaatggagagcacaagctaatccgtgcccgtgctctcatccccctgcatgaacccaattctgttgcgatcaaccatcaagggttgtcctattgtattattcagttcattgaaaaggactacaaattagcagatactatgatttggggtctactcaagcattggccagtcagaaactgccaagaggtaattggttttgaccaaattatcaactagatggctctatataaaatggcacacggaattggctgtgagcctgtctgtcaatgtccgaaacgacggcaggcgtgaagcggtggtcgggaaggaattaatgagtagcagcaatgcgtcagacagctacgtatcttcttccgcaatcccattctgacttaattaataaaacaacctttataatagtattatactgactcgatcgtctccaaagtctgaagcaaataaagggtgggtgcgtctccacctatacatatagtataatagtgaggtacccgtagagaccatataaatcagagggttttatatttcaccatttgataagaaaatactcgtattaggaagcttcaaaaaggagaggatattggatcttctatatatcttactttgtcctttatcattttcaaatgccaatcagtgaacaccaaatttcaggtttgttaaatgcctgttaccagtcaggaatgatatattatcttcggataataaataaaataactgggaactaggaattgtaccactatgctgtgtacttagttcctatgtaattctaattccttggtttattcttcaataactaggactggacaagagcttttggacatggttgacagtttgcccattgttgcgataaagagcctaaaagtatctgacttccaaggaacgatagctctctgcccagccaccagttttgagttgtattgagagcaaaaattcacatgctttccgaatgcaaatattgttctcataatttctcccagcagcaactaagccatttatcgcatggagggtcccatagataaaacatattccccaagtgccataccttgcaggggattgagatgctgtcattgggatcatttaaaaccagagtcattctctcgtcgtgtttgcaggcctttcagattgaaccgattacttcaacggtgtcatacatgattggtagggatgtgatggaggggagggggcaatgcaggtgcaggtaaaatttagaattttaagagcataataccctggttgtatttggcttgggagtaagtggatgttagcaatagtggagcatgtgtgggaagcggaggctgacgacagctcttacgttatcaaggaacaaacttatcctgagaaagtgctcacacgtggaacacagactactctttatttgagagatgatgacaagtatgagtttactgaccctgcaagaattgaaagcttagttaagaactgctcacaatttgtgtcattctcatatatacatggaaggagaaatcaagaacatttggggtctaaagagtctaaagaggaggaagaataaaaaaaggtgaagaggtcactgaggttagttttgtgtcagtgtaatatgttgtttgttttcatgtaattcttgcttctaatattatagaaagaatccggataggcagataagaacatgtcaatgattttgatattttcagaaataaggatttctatggtgcatgttatttaaaaaacaagccaactatagcttgtgtcaggtcatagatgcttgctattattggaactggtccatgcaaatcatttttgctcaaaatccaacttggccaatcattagtaggtcaagttatattcatgaaaccttttgtttgttgtttctttgcctaaaaacatgctttcattggttagttcattatcctagagttgcagagggactttatgtagcatgatccatgctcaggtattgcaattttggcaatttctgtaatgtaacatggaattggtgaaggtccttggtcgagtaatcacaatactattgatattattcatattgattaaatttttatcattggttctctttgtttgttatattatcttgtgtcatcgattaacaactctttcaccggacgtcttgaggtgactttagtttcttatcttttatatgtatcctgacataaaaccagtgcttattttctattcgtgcatgtgcaggtgttgtactgtttcttagaattatccagcaacttcgatgggaggaattttgtttgagcttgtgggcccaatttgagaagttttacatatagagtaaaaaaaggtcctgctctcgtgttttcgtgtaaaactggattttgttcagttcttactgtggagctatgcttcctagataaaacttctcgatttgtataacttctcgatttgtataaaaacttctccatttacatattgggaagtctatatgtaaaacttctcgatttatatatcaactatgcttcctgtggagcaaggaagcgaacgcaagctagccttttgtattagtgcattctgttcagttcttacttgatcatcccgtgttctcgcgtgtgccatggctgagtggcaagctcaacactggtattgttgtcttgtctcaaatgaagtccggttccacaagttaaccggaaatcttcatgggtgatagctgcgtcagattcttccgcgcatagggcaagtaatgcaagtgatagctgtgtcagtttacccccattttcttgggcatcacttgtctcaaatgaagtccattggaggttcgcaattta

SEQ ID NO: 39159 - DNA, 3104 bp, Zea Mays
ctcagatctgggttcatctctgccgaggagctcggcaccgtggtgtgctcgctcgacctgcgcactacctgaagacgcattatgctgctattgtctccctcgtcgttgcctcgtgggtcacagtgctcctccactccctcgtcagccacaatgacagccaacaagactggtgtccaggagactgaaaagcactgctgaggagactgaaattatcttcgcgaggtggattacacattgtaagaactaagaactaaatctgttttttcttcttcttattttaaagaggaccaggtctcctgcattcttggaaacaagagacgatctcagattatcactaacttttttatgagctataaatgtgctctgcttaacggacatcttaaggaccacagattcagagaactatggattcatataaaacgggtgactcgttcatctttgagacgcagcgccacaatggcataagggagctttgccctgcgaatggagagcacaagctaatccgtgcccgtgctctcatccccctgcatgaacccaattctgttgcgatcaaccatcaagggttgtcctattgtattattcagttcattgaaaaggactacaaattagcagatactatgatttggggtctactcaagcattggccagtcagaaactgccaagaggtaattggttttgaccaaattatcaactagatggctctatataaaatggcacacggaattggctgtgagcctgtctgtcaatgtccgaaacgacggcaggcgtgaagcggtggtcgggaaggaattaatgagtagcagcaatgcgtcagacagctacgtatcttcttccgcaatcccattctgacttaattaataaaacaacctttataatagtattatactgactcgatcgtctccaaagtctgaagcaaataaagggtgggtgcgtctccacctatacatatagtataatagtgaggtacccgtagagaccatataaatcagagggttttatatttcaccatttgataagaaaatactcgtattaggaagcttcaaaaaggagaggatattggatcttctatatatcttactttgtcctttatcattttcaaatgccaatcagtgaacaccaaatttcaggtttgttaaatgcctgttaccagtcaggaatgatatattatcttcggataataaataaaataactgggaactaggaattgtaccactatgctgtgtacttagttcctatgtaattctaattccttggtttattcttcaataactaggactggacaagagcttttggacatggttgacagtttgcccattgttgcgataaagagcctaaaagtatctgacttccaaggaacgatagctctctgcccagccaccagttttgagttgtattgagagcaaaaattcacatgctttccgaatgcaaatattgttctcataatttctcccagcagcaactaagccatttatcgcatggagggtcccatagataaaacatattccccaagtgccataccttgcaggggattgagatgctgtcattgggatcatttaaaaccagagtcattctctcgtcgtgtttgcaggcctttcagattgaaccgattacttcaacggtgtcatacatgattggtagggatgtgatggaggggagggggcaatgcaggtgcaggtgcattccgaatctccttccctttctccggattctattgttctttgtttcctcctattcgtttctgtagtgagaaatgtcttcggtaagatttggttggtggaaattcactgcatttacttattattgtctcccaatttcctcttcatagtcaggaactttctggttcagtggaaatgtggaattgtaccaatgtagagtctagaataagtgtgcccttatcctcccagttagcataatgtgggtacttcgtttgtcatgtatggggcatagtgcaatacaaatccttttgttaattaataatgattcagggatgcctcgttgtccatgtaacatccaaactgcccacacacacacatcaaattttggcatgataaccctgttcattaaatctgttttgtttgtaaatcacaaacaaatatgttaaccttttattgaagtgtgagatactcaatcatgttgtgttttttggttttctattttgagtgtataggtaaaatttagaattttaagagcataataccctggttgtatttggcttgggagtaagtggatgttagcaatagtggagcatgtgtgggaagcggaggctgacgacagctcttacgttatcaaggaacaaacttatcctgagaaagtgctcacacgtggaacacagactactctttatttgagagatgatgacaagtatgagtttactgaccctgcaagaattgaaagcttagttaagaactgctcacaatttgtgtcattctcatatatacatggaaggagaaatcaagaacatttggggtctaaagagtctaaagaggaggaagaataaaaaaaggtgaagaggtcactgaggtgttgtactgtttcttagaattatccagcaacttcgatgggaggaattttgtttgagcttgtgggcccaatttgagaagttttacatatagagtaaaaaaaggtcctgctctcgtgttttcgtgtaaaactggattttgttcagttcttactgtggagctatgcttcctagataaaacttctcgatttgtataacttctcgatttgtataaaaacttctccatttacatattgggaagtctatatgtaaaacttctcgatttatatatcaactatgcttcctgtggagcaaggaagcgaacgcaagctagccttttgtattagtgcattctgttcagttcttacttgatcatcccgtgttctcgcgtgtgccatggctgagtggcaagctcaacactggtattgttgtcttgtctcaaatgaagtccggttccacaagttaaccggaaatcttcatgggtgatagctgcgtcagattcttccgcgcatagggcaagtaatgcaagtgatagctgtgtcagtttacccccattttcttgggcatcacttgtctcaaatgaagtccattggaggttcgcaattta

SEQ ID NO: 39160 - DNA, 2727 bp, Zea Mays
ctcagatctgggttcatctctgccgaggagctcggcaccgtggtgtgctcgctcgacctgcgcactacctgaagacgcattatgctgctattgtctccctcgtcgttgcctcgtgggtcacagtgctcctccactccctcgtcagccacaatgacagccaacaagactggtgtccaggagactgaaaagcactgctgaggagactgaaattatcttcgcgaggtggattacacattgtaagaactaagaactaaatctgttttttcttcttcttattttaaagaggaccaggtctcctgcattcttggaaacaagagacgatctcagattatcactaacttttttatgagctataaatgtgctctgcttaacggacatcttaaggaccacagattcagagaactatggattcatataaaacggcatggaactgattcaaaagaacatgaagtccagtgtgatttgaaaatttgggtatagctcagaagagatttgtgatgattcgaagtatcaaagaaacctgcaacatcaagaatttaaaaatgaaggtgactcgttcatctttgagacgcagcgccacaatggcataagggagctttgccctgcgaatggagagcacaagctaatccgtgcccgtgctctcatccccctgcatgaacccaattctgttgcgatcaaccatcaagggttgtcctattgtattattcagttcattgaaaaggactacaaattagcagatactatgatttggggtctactcaagcattggccagtcagaaactgccaagaggtaattggttttgaccaaattatcaactagatggctctatataaaatggcacacggaattggctgtgagcctgtctgtcaatgtccgaaacgacggcaggcgtgaagcggtggtcgggaaggaattaatgagtagcagcaatgcgtcagacagctacgtatcttcttccgcaatcccattctgacttaattaataaaacaacctttataatagtattatactgactcgatcgtctccaaagtctgaagcaaataaagggtgggtgcgtctccacctatacatatagtataatagtgaggtacccgtagagaccatataaatcagagggttttatatttcaccatttgataagaaaatactcgtattaggaagcttcaaaaaggagaggatattggatcttctatatatcttactttgtcctttatcattttcaaatgccaatcagtgaacaccaaatttcaggtttgttaaatgcctgttaccagtcaggaatgatatattatcttcggataataaataaaataactgggaactaggaattgtaccactatgctgtgtacttagttcctatgtaattctaattccttggtttattcttcaataactaggactggacaagagcttttggacatggttgacagtttgcccattgttgcgataaagagcctaaaagtatctgacttccaagctctctgcccagccaccagttttgagttgtattgagagcaaaaattcacatgctttccgaatgcaaatattgttctcataatttctcccagcagcaactaagccatttatcgcatggagggtcccatagataaaacatattccccaagtgccataccttgcaggggattgagatgctgtcattgggatcatttaaaaccagagtcattctctcgtcgtgtttgcaggcctttcagattgaaccgattacttcaacggtgtcatacatgattggtagggatgtgatggaggggagggggcaatgcaggtgcaggtaaaatttagaattttaagagcataataccctggttgtatttggcttgggagtaagtggatgttagcaatagtggagcatgtgtgggaagcggaggctgacgacagctcttacgttatcaaggaacaaacttatcctgagaaagtgctcacacgtggaacacagactactctttatttgagagatgatgacaagtatgagtttactgaccctgcaagaattgaaagcttagttaagaactgctcacaatttgtgtcattctcatatatacatggaaggagaaatcaagaacatttggggtctaaagagtctaaagaggaggaagaataaaaaaaggtgaagaggtcactgaggtgttgtactgtttcttagaattatccagcaacttcgatgggaggaattttgtttgagcttgtgggcccaatttgagaagttttacatatagagtaaaaaaaggtcctgctctcgtgttttcgtgtaaaactggattttgttcagttcttactgtggagctatgcttcctagataaaacttctcgatttgtataacttctcgatttgtataaaaacttctccatttacatattgggaagtctatatgtaaaacttctcgatttatatatcaactatgcttcctgtggagcaaggaagcgaacgcaagctagccttttgtattagtgcattctgttcagttcttacttgatcatcccgtgttctcgcgtgtgccatggctgagtggcaagctcaacactggtattgttgtcttgtctcaaatgaagtccggttccacaagttaaccggaaatcttcatgggtgatagctgcgtcagattcttccgcgcatagggcaagtaatgcaagtgatagctgtgtcagtttacccccattttcttgggcatcacttgtctcaaatgaagtccattggaggttcgcaattta

SEQ ID NO: 39161 - DNA, 3934 bp, Zea Mays
ctcagatctgggttcatctctgccgaggagctcggcaccgtggtgtgctcgctcgacctgcgcactacctgaagacgcattatgctgctattgtctccctcgtcgttgcctcgtgggtcacagtgctcctccactccctcgtcagccacaatgacagccaacaagactggtgtccaggagactgaaaagcactgctgaggagactgaaattatcttcgcgaggtggattacacattgtaagaactaagaactaaatctgttttttcttcttcttattttaaagaggaccaggtctcctgcattcttggaaacaagagacgatctcagattatcactaacttttttatgagctataaatgtgctctgcttaacggacatcttaaggaccacagattcagagaactatggattcatataaaacggcatggaactgattcaaaagaacatgaagtccagtgtgatttgaaaatttgggtatagctcagaagagatttgtgatgattcgaagtatcaaagaaacctgcaacatcaagaatttaaaaatgaaggtgactcgttcatctttgagacgcagcgccacaatggcataagggagctttgccctgcgaatggagagcacaagctaatccgtgcccgtgctctcatccccctgcatgaacccaattctgttgcgatcaaccatcaagggttgtcctattgtattattcagttcattgaaaaggactacaaattagcagatactatgatttggggtctactcaagcattggccagtcagaaactgccaagaggtaattggttttgaccaaattatcaactagatggctctatataaaatggcacacggaattggctgtgagcctgtctgtcaatgtccgaaacgacggcaggcgtgaagcggtggtcgggaaggaattaatgagtagcagcaatgcgtcagacagctacgtatcttcttccgcaatcccattctgacttaattaataaaacaacctttataatagtattatactgactcgatcgtctccaaagtctgaagcaaataaagggtgggtgcgtctccacctatacatatagtataatagtgaggtacccgtagagaccatataaatcagagggttttatatttcaccatttgataagaaaatactcgtattaggaagcttcaaaaaggagaggatattggatcttctatatatcttactttgtcctttatcattttcaaatgccaatcagtgaacaccaaatttcaggtttgttaaatgcctgttaccagtcaggaatgatatattatcttcggataataaataaaataactgggaactaggaattgtaccactatgctgtgtacttagttcctatgtaattctaattccttggtttattcttcaataactaggactggacaagagcttttggacatggttgacagtttgcccattgttgcgataaagagcctaaaagtatctgacttccaaggaacgatagctctctgcccagccaccagttttgagttgtattgagagcaaaaattcacatgctttccgaatgcaaatattgttctcataatttctcccagcagcaactaagccatttatcgcatggagggtcccatagataaaacatattccccaagtgccataccttgcaggggattgagatgctgtcattgggatcatttaaaaccagagtcattctctcgtcgtgtttgcaggcctttcagattgaaccgattacttcaacggtgtcatacatgattggtagggatgtgatggaggggagggggcaatgcaggtgcaggtgcattccgaatctccttccctttctccggattctattgttctttgtttcctcctattcgtttctgtagtgagaaatgtcttcggtaagatttggttggtggaaattcactgcatttacttattattgtctcccaatttcctcttcatagtcaggaactttctggttcagtggaaatgtggaattgtaccaatgtagagtctagaataagtgtgcccttatcctcccagttagcataatgtgggtacttcgtttgtcatgtatggggcatagtgcaatacaaatccttttgttaattaataatgattcagggatgcctcgttgtccatgtaacatccaaactgcccacacacacacatcaaattttggcatgataaccctgttcattaaatctgttttgtttgtaaatcacaaacaaatatgttaaccttttattgaagtgtgagatactcaatcatgttgtgttttttggttttctattttgagtgtataggtaaaatttagaattttaagagcataataccctggttgtatttggcttgggagtaagtggatgttagcaatagtggagcatgtgtgggaagcggaggctgacgacagctcttacgttatcaaggaacaaacttatcctgagaaagtgctcacacgtggaacacagactactctttatttgagagatgatgacaagtatgagtttactgaccctgcaagaattgaaagcttagttaagaactgctcacaatttgtgtcattctcatatatacatggaaggagaaatcaagaacatttgggggtaatgattgctatagtttattgtaatttagcttccttcaattatacttaatgtaattcttcatccttgtctaaatagtctaaagagtctaaagaggaggaagaataaaaaaaggtgaagaggtcactgaggttagttttgtgtcagtgtaatatgttgtttgttttcatgtaattcttgcttctaatattatagaaagaatccggataggcagataagaacatgtcaatgattttgatattttcagaaataaggatttctatggtgcatgttatttaaaaaacaagccaactatagcttgtgtcaggtcatagatgcttgctattattggaactggtccatgcaaatcatttttgctcaaaatccaacttggccaatcattagtaggtcaagttatattcatgaaaccttttgtttgttgtttctttgcctaaaaacatgctttcattggttagttcattatcctagagttgcagagggactttatgtagcatgatccatgctcaggtattgcaattttggcaatttctgtaatgtaacatggaattggtgaaggtccttggtcgagtaatcacaatactattgatattattcatattgattaaatttttatcattggttctctttgtttgttatattatcttgtgtcatcgattaacaactctttcaccggacgtcttgaggtgactttagtttcttatcttttatatgtatcctgacataaaaccagtgcttattttctattcgtgcatgtgcaggtgttgtactgtttcttagaattatccagcaacttcgatgggaggaattttgtttgagcttgtgggcccaatttgagaagttttacatatagagtaaaaaaaggtcctgctctcgtgttttcgtgtaaaactggattttgttcagttcttactgtggagctatgcttcctagataaaacttctcgatttgtataacttctcgatttgtataaaaacttctccatttacatattgggaagtctatatgtaaaacttctcgatttatatatcaactatgcttcctgtggagcaaggaagcgaacgcaagctagccttttgtattagtgcattctgttcagttcttacttgatcatcccgtgttctcgcgtgtgccatggctgagtggcaagctcaacactggtattgttgtcttgtctcaaatgaagtccggttccacaagttaaccggaaatcttcatgggtgatagctgcgtcagattcttccgcgcatagggcaagtaatgcaagtgatagctgtgtcagtttacccccattttcttgggcatcacttgtctcaaatgaagtccattggaggttcgcaattta

SEQ ID NO: 39162 - DNA, 3229 bp, Zea Mays
ctcagatctgggttcatctctgccgaggagctcggcaccgtggtgtgctcgctcgacctgcgcactacctgaagacgcattatgctgctattgtctccctcgtcgttgcctcgtgggtcacagtgctcctccactccctcgtcagccacaatgacagccaacaagactggtgtccaggagactgaaaagcactgctgaggagactgaaattatcttcgcgaggtggattacacattgtaagaactaagaactaaatctgttttttcttcttcttattttaaagaggaccaggtctcctgcattcttggaaacaagagacgatctcagattatcactaacttttttatgagctataaatgtgctctgcttaacggacatcttaaggaccacagattcagagaactatggattcatataaaacggcatggaactgattcaaaagaacatgaagtccagtgtgatttgaaaatttgggtatagctcagaagagatttgtgatgattcgaagtatcaaagaaacctgcaacatcaagaatttaaaaatgaaggtgactcgttcatctttgagacgcagcgccacaatggcataagggagctttgccctgcgaatggagagcacaagctaatccgtgcccgtgctctcatccccctgcatgaacccaattctgttgcgatcaaccatcaagggttgtcctattgtattattcagttcattgaaaaggactacaaattagcagatactatgatttggggtctactcaagcattggccagtcagaaactgccaagaggtaattggttttgaccaaattatcaactagatggctctatataaaatggcacacggaattggctgtgagcctgtctgtcaatgtccgaaacgacggcaggcgtgaagcggtggtcgggaaggaattaatgagtagcagcaatgcgtcagacagctacgtatcttcttccgcaatcccattctgacttaattaataaaacaacctttataatagtattatactgactcgatcgtctccaaagtctgaagcaaataaagggtgggtgcgtctccacctatacatatagtataatagtgaggtacccgtagagaccatataaatcagagggttttatatttcaccatttgataagaaaatactcgtattaggaagcttcaaaaaggagaggatattggatcttctatatatcttactttgtcctttatcattttcaaatgccaatcagtgaacaccaaatttcaggtttgttaaatgcctgttaccagtcaggaatgatatattatcttcggataataaataaaataactgggaactaggaattgtaccactatgctgtgtacttagttcctatgtaattctaattccttggtttattcttcaataactaggactggacaagagcttttggacatggttgacagtttgcccattgttgcgataaagagcctaaaagtatctgacttccaaggaacgatagctctctgcccagccaccagttttgagttgtattgagagcaaaaattcacatgctttccgaatgcaaatattgttctcataatttctcccagcagcaactaagccatttatcgcatggagggtcccatagataaaacatattccccaagtgccataccttgcaggggattgagatgctgtcattgggatcatttaaaaccagagtcattctctcgtcgtgtttgcaggcctttcagattgaaccgattacttcaacggtgtcatacatgattggtagggatgtgatggaggggagggggcaatgcaggtgcaggtgcattccgaatctccttccctttctccggattctattgttctttgtttcctcctattcgtttctgtagtgagaaatgtcttcggtaagatttggttggtggaaattcactgcatttacttattattgtctcccaatttcctcttcatagtcaggaactttctggttcagtggaaatgtggaattgtaccaatgtagagtctagaataagtgtgcccttatcctcccagttagcataatgtgggtacttcgtttgtcatgtatggggcatagtgcaatacaaatccttttgttaattaataatgattcagggatgcctcgttgtccatgtaacatccaaactgcccacacacacacatcaaattttggcatgataaccctgttcattaaatctgttttgtttgtaaatcacaaacaaatatgttaaccttttattgaagtgtgagatactcaatcatgttgtgttttttggttttctattttgagtgtataggtaaaatttagaattttaagagcataataccctggttgtatttggcttgggagtaagtggatgttagcaatagtggagcatgtgtgggaagcggaggctgacgacagctcttacgttatcaaggaacaaacttatcctgagaaagtgctcacacgtggaacacagactactctttatttgagagatgatgacaagtatgagtttactgaccctgcaagaattgaaagcttagttaagaactgctcacaatttgtgtcattctcatatatacatggaaggagaaatcaagaacatttggggtctaaagagtctaaagaggaggaagaataaaaaaaggtgaagaggtcactgaggtgttgtactgtttcttagaattatccagcaacttcgatgggaggaattttgtttgagcttgtgggcccaatttgagaagttttacatatagagtaaaaaaaggtcctgctctcgtgttttcgtgtaaaactggattttgttcagttcttactgtggagctatgcttcctagataaaacttctcgatttgtataacttctcgatttgtataaaaacttctccatttacatattgggaagtctatatgtaaaacttctcgatttatatatcaactatgcttcctgtggagcaaggaagcgaacgcaagctagccttttgtattagtgcattctgttcagttcttacttgatcatcccgtgttctcgcgtgtgccatggctgagtggcaagctcaacactggtattgttgtcttgtctcaaatgaagtccggttccacaagttaaccggaaatcttcatgggtgatagctgcgtcagattcttccgcgcatagggcaagtaatgcaagtgatagctgtgtcagtttacccccattttcttgggcatcacttgtctcaaatgaagtccattggaggttcgcaattta

SEQ ID NO: 39163 - DNA, 2509 bp, Zea Mays
ctcgtcgttgcctcgtgggtcacagtgctcctccactccctcgtcagccacaatgacagccaacaagactggtgtccaggagactgaaaagcactgctgaggagactgaaattatcttcgcgaggtggattacacattgtaagaactaagaactaaatctgttttttcttcttcttattttaaagaggaccaggtctcctgcattcttggaaacaagagacgatctcagattatcactaacttttttatgagctataaatgtgctctgcttaacggacatcttaaggaccacagattcagagaactatggattcatataaaacgggtgactcgttcatctttgagacgcagcgccacaatggcataagggagctttgccctgcgaatggagagcacaagctaatccgtgcccgtgctctcatccccctgcatgaacccaattctgttgcgatcaaccatcaagggttgtcctattgtattattcagttcattgaaaaggactacaaattagcagatactatgatttggggtctactcaagcattggccagtcagaaactgccaagaggtgttgaaataacttgaattcaatatatgaatttcctttgcatatgtaattggttttgaccaaattatcaactagatggctctatataaaatggcacacggaattggctgtgagcctgtctgtcaatgtccgaaacgacggcaggcgtgaagcggtggtcgggaaggaattaatgagtagcagcaatgcgtcagacagctacgtatcttcttccgcaatcccattctgacttaattaataaaacaacctttataatagtattatactgactcgatcgtctccaaagtctgaagcaaataaagggtgggtgcgtctccacctatacatatagtataatagtgaggtacccgtagagaccatataaatcagagggttttatatttcaccatttgataagaaaatactcgtattaggaagcttcaaaaaggagaggatattggatcttctatatatcttactttgtcctttatcattttcaaatgccaatcagtgaacaccaaatttcaggtttgttaaatgcctgttaccagtcaggaatgatatattatcttcggataataaataaaataactgggaactaggaattgtaccactatgctgtgtacttagttcctatgtaattctaattccttggtttattcttcaataactaggactggacaagagcttttggacatggttgacagtttgcccattgttgcgataaagagcctaaaagtatctgacttccaaggaacgatagctctctgcccagccaccagttttgagttgtattgagagcaaaaattcacatgctttccgaatgcaaatattgttctcataatttctcccagcagcaactaagccatttatcgcatggagggtcccatagataaaacatattccccaagtgccataccttgcaggggattgagatgctgtcattgggatcatttaaaaccagagtcattctctcgtcgtgtttgcaggcctttcagattgaaccgattacttcaacggtgtcatacatgattggtagggatgtgatggaggggagggggcaatgcaggtgcaggaacaaacttatcctgagaaagtgctcacacgtggaacacagactactctttatttgagagtaagaaacttaaaagactttctataagatctccaccttctaccacaattcttattgccttcttgttcctttaggatgatgacaagtatgagtttactgaccctgcaagaattgaaagcttagttaagaactgctcacaatttgtgtcattctcatatatacatggaaggagaaatcaagaacatttggggtctaaagagtctaaagaggaggaagaataaaaaaaggtgaagaggtcactgaggtgttgtactgtttcttagaattatccagcaacttcgatgggaggaattttgtttgagcttgtgggcccaatttgagaagttttacatatagagtaaaaaaaggtcctgctctcgtgttttcgtgtaaaactggattttgttcagttcttactgtggagctatgcttcctagataaaacttctcgatttgtataacttctcgatttgtataaaaacttctccatttacatattgggaagtctatatgtaaaacttctcgatttatatatcaactatgcttcctgtggagcaaggaagcgaacgcaagctagccttttgtattagtgcattctgttcagttcttacttgatcatcccgtgttctcgcgtgtgccatggctgagtggcaagctcaacactggtattgttgtcttgtctcaaatgaagtccggttccacaagttaaccggaaatcttcatgggtgatagctgcgtcagattcttccgcgcatagggcaagtaatgcaagtgatagctgtgtcagtttacccccattttcttgggcatcacttgtctcaaatgaagtccattggaggttcgcaattta

SEQ ID NO: 39164 - DNA, 1985 bp, Zea Mays
tattttaaagaggaccaggtctcctgcattcttggaaacaagagacgatctcagattatcactaacttttttatgagctataaatgtgctctgcttaacggacatcttaaggaccacagattcagagaactatggattcatataaaacgggtgactcgttcatctttgagacgcagcgccacaatggcataagggagctttgccctgcgaatggagagcacaagctaatccgtgcccgtgctctcatccccctgcatgaacccaattctgttgcgatcaaccatcaagggttgtcctattgtattattcagttcattgaaaaggactacaaattagcagatactatgatttggggtctactcaagcattggccagtcagaaactgccaagaggtaattggttttgaccaaattatcaactagatggctctatataaaatggcacacggaattggctgtgagcctgtctgtcaatgtccgaaacgacggcaggcgtgaagcggtggtcgggaaggaattaatgagtagcagcaatgcgtcagacagctacgtatcttcttccgcaatcccattctgacttaattaataaaacaacctttataatagtattatactgactcgatcgtctccaaagtctgaagcaaataaagggtgggtgcgtctccacctatacatatagtataatagtgaggtacccgtagagaccatataaatcagagggttttatatttcaccatttgataagaaaatactcgtattaggaagcttcaaaaaggagaggatattggatcttctatatatcttactttgtcctttatcattttcaaatgccaatcagtgaacaccaaatttcaggtttgttaaatgcctgttaccagtcaggaatgatatattatcttcggataataaataaaataactgggaactaggaattgtaccactatgctgtgtacttagttcctatgtaattctaattccttggtttattcttcaataactaggactggacaagagcttttggacatggttgacagtttgcccattgttgcgataaagagcctaaaagtatctgacttccaaggaacgatagctctctgcccagccaccagttttgagttgtattgagagcaaaaattcacatgctttccgaatgcaaatattgttctcataatttctcccagcagcaactaagccatttatcgcatggagggtcccatagataaaacatattccccaagtgccataccttgcaggggattgagatgctgtcattgggatcatttaaaaccagagtcattctctcgtcgtgtttgcaggcctttcagattgaaccgattacttcaacggtgtcatacatgattggtagggatgtgatggaggggagggggcaatgcaggtgcaggtgttgtactgtttcttagaattatccagcaacttcgatgggaggaattttgtttgagcttgtgggcccaatttgagaagttttacatatagagtaaaaaaaggtcctgctctcgtgttttcgtgtaaaactggattttgttcagttcttactgtggagctatgcttcctagataaaacttctcgatttgtataacttctcgatttgtataaaaacttctccatttacatattgggaagtctatatgtaaaacttctcgatttatatatcaactatgcttcctgtggagcaaggaagcgaacgcaagctagccttttgtattagtgcattctgttcagttcttacttgatcatcccgtgttctcgcgtgtgccatggctgagtggcaagctcaacactggtattgttgtcttgtctcaaatgaagtccggttccacaagttaaccggaaatcttcatgggtgatagctgcgtcagattcttccgcgcatagggcaagtaatgcaagtgatagctgtgtcagtttacccccattttcttgggcatcacttgtctcaaatgaagtccattggaggttcgcaattta

SEQ ID NO: 39165 - DNA, 1869 bp, Zea Mays
atgaattgggcaaaagaatccaaaagttcaccttcttgcactaattgtgactcgttcatctttgagacgcagcgccacaatggcataagggagctttgccctgcgaatggagagcacaagctaatccgtgcccgtgctctcatccccctgcatgaacccaattctgttgcgatcaaccatcaagggttgtcctattgtattattcagttcattgaaaaggactacaaattagcagatactatgatttggggtctactcaagcattggccagtcagaaactgccaagaggtaattggttttgaccaaattatcaactagatggctctatataaaatggcacacggaattggctgtgagcctgtctgtcaatgtccgaaacgacggcaggcgtgaagcggtggtcgggaaggaattaatgagtagcagcaatgcgtcagacagctacgtatcttcttccgcaatcccattctgacttaattaataaaacaacctttataatagtattatactgactcgatcgtctccaaagtctgaagcaaataaagggtgggtgcgtctccacctatacatatagtataatagtgaggtacccgtagagaccatataaatcagagggttttatatttcaccatttgataagaaaatactcgtattaggaagcttcaaaaaggagaggatattggatcttctatatatcttactttgtcctttatcattttcaaatgccaatcagtgaacaccaaatttcaggtttgttaaatgcctgttaccagtcaggaatgatatattatcttcggataataaataaaataactgggaactaggaattgtaccactatgctgtgtacttagttcctatgtaattctaattccttggtttattcttcaataactaggactggacaagagcttttggacatggttgacagtttgcccattgttgcgataaagagcctaaaagtatctgacttccaaggaacgatagctctctgcccagccaccagttttgagttgtattgagagcaaaaattcacatgctttccgaatgcaaatattgttctcataatttctcccagcagcaactaagccatttatcgcatggagggtcccatagataaaacatattccccaagtgccataccttgcaggggattgagatgctgtcattgggatcatttaaaaccagagtcattctctcggcctttcagattgaaccgattacttcaacggtgtcatacatgattggtagggatgtgatggaggggagggggcaatgcaggtgcaggtgttgtactgtttcttagaattatccagcaacttcgatgggaggaattttgtttgagcttgtgggcccaatttgagaagttttacatatagagtaaaaaaaggtcctgctctcgtgttttcgtgtaaaactggattttgttcagttcttactgtggagctatgcttcctagataaaacttctcgatttgtataacttctcgatttgtataaaaacttctccatttacatattgggaagtctatatgtaaaacttctcgatttatatatcaactatgcttcctgtggagcaaggaagcgaacgcaagctagccttttgtattagtgcattctgttcagttcttacttgatcatcccgtgttctcgcgtgtgccatggctgagtggcaagctcaacactggtattgttgtcttgtctcaaatgaagtccggttccacaagttaaccggaaatcttcatgggtgatagctgcgtcagattcttccgcgcatagggcaagtaatgcaagtgatagctgtgtcagtttacccccattttcttgggcatcacttgtctcaaatgaagtccattggaggttcgcaattta

SEQ ID NO: 39166 - DNA, 1751 bp, Zea Mays
gaagggagtaactttttaggttttgtggttactttttcaaaaattaactctttcgttcactataactacaaaatagtaagccagtgtactgcaagaacaatgttcttcttgaatactcaaaagaacaatgtccatcatggattctgctacgtgaccatgtggtccagcttgtttggtacacgaggccatatctttgtgttcgctttatgtatatgttccctttttattcctcagtttattcacttttatcttgtagttgcaggtttcttactcctgggtaggttccatttgtcttaaatagctttagagcaccaccttatgatatctccttttgactatgattattttcctatgaataatttttctgggaatactattaagataccaactaatctttgatatcctctaaaccaaacgcttcatgatagatgattcttgaggttgttgaatgaattggtcttgcgcatgtttgcaggcctttattggcccactaatctttgatacccactaatctttgtgctctcaattagctctaaactaatctttgatacccactaatatttgtgctctgaattggcctaattaatgatcaagtggtcatggtgtatgtcaactaatcactttctcttcatgtactactaggttataattatttgatgtggagtataaacatgcttcttgtaacatacatactgatggttaggtacctatcctagtcgtgtttgcaggcctttcagattgaaccgattacttcaacggtgtcatacatgattggtagggatgtgatggaggggagggggcaatgcaggtgcaggtaaaatttagaattttaagagcataataccctggttgtatttggcttgggagtaagtggatgttagcaatagtggagcatgtgtgggaagcggaggctgacgacagctcttacgttatcaaggaacaaacttatcctgagaaagtgctcacacgtggaacacagactactctttatttgagagatgatgacaagtatgagtttactgaccctgcaagaattgaaagcttagttaagaactgctcacaatttgtgtcattctcatatatacatggaaggagaaatcaagaacatttggggtctaaagagtctaaagaggaggaagaataaaaaaaggtgaagaggtcactgaggtgttgtactgtttcttagaattatccagcaacttcgatgggaggaattttgtttgagcttgtgggcccaatttgagaagttttacatatagagtaaaaaaaggtcctgctctcgtgttttcgtgtaaaactggattttgttcagttcttactgtggagctatgcttcctagataaaacttctcgatttgtataacttctcgatttgtataaaaacttctccatttacatattgggaagtctatatgtaaaacttctcgatttatatatcaactatgcttcctgtggagcaaggaagcgaacgcaagctagccttttgtattagtgcattctgttcagttcttacttgatcatcccgtgttctcgcgtgtgccatggctgagtggcaagctcaacactggtattgttgtcttgtctcaaatgaagtccggttccacaagttaaccggaaatcttcatgggtgatagctgcgtcagattcttccgcgcatagggcaagtaatgcaagtgatagctgtgtcagtttacccccattttcttgggcatcacttgtctcaaatgaagtccattggaggttcgcaattta

SEQ ID NO: 39167 - DNA, 2375 bp, Zea Mays
gggagtaactttttaggttttgtggttactttttcaaaaattaactctttcgttcactataactacaaaatagtaagccagtgtactgcaagaacaatgttcttcttgaatactcaaaagaacaatgtccatcatggattctgctacgtgaccatgtggtccagcttgtttggtacacgaggccatatctttgtgttcgctttatgtatatgttccctttttattcctcagtttattcacttttatcttgtagttgcaggtttcttactcctgggtaggttccatttgtcttaaatagctttagagcaccaccttatgatatctccttttgactatgattattttcctatgaataatttttctgggaatactattaagataccaactaatctttgatatcctctaaaccaaacgcttcatgatagatgattcttgaggttgttgaatgaattggtcttgcgcatgtttgcaggcctttattggcccactaatctttgatacccactaatctttgtgctctcaattagctctaaactaatctttgatacccactaatatttgtgctctgaattggcctaattaatgatcaagtggtcatggtgtatgtcaactaatcactttctcttcatgtactactaggttataattatttgatgtggagtataaacatgcttcttgtaacatacatactgatggttaggtacctatcctagtcgtgtttgcaggcctttcagattgaaccgattacttcaacggtgtcatacatgattggtagggatgtgatggaggggagggggcaatgcaggtgcaggtaaaatttagaattttaagagcataataccctggttgtatttggcttgggagtaagtggatgttagcaatagtggagcatgtgtgggaagcggaggctgacgacagctcttacgttatcaaggaacaaacttatcctgagaaagtgctcacacgtggaacacagactactctttatttgagagatgatgacaagtatgagtttactgaccctgcaagaattgaaagcttagttaagaactgctcacaatttgtgtcattctcatatatacatggaaggagaaatcaagaacatttggggtctaaagagtctaaagaggaggaagaataaaaaaaggtgaagaggtcactgaggttagttttgtgtcagtgtaatatgttgtttgttttcatgtaattcttgcttctaatattatagaaagaatccggataggcagataagaacatgtcaatgattttgatattttcagaaataaggatttctatggtgcatgttatttaaaaaacaagccaactatagcttgtgtcaggtcatagatgcttgctattattggaactggtccatgcaaatcatttttgctcaaaatccaacttggccaatcattagtaggtcaagttatattcatgaaaccttttgtttgttgtttctttgcctaaaaacatgctttcattggttagttcattatcctagagttgcagagggactttatgtagcatgatccatgctcaggtattgcaattttggcaatttctgtaatgtaacatggaattggtgaaggtccttggtcgagtaatcacaatactattgatattattcatattgattaaatttttatcattggttctctttgtttgttatattatcttgtgtcatcgattaacaactctttcaccggacgtcttgaggtgactttagtttcttatcttttatatgtatcctgacataaaaccagtgcttattttctattcgtgcatgtgcaggtgttgtactgtttcttagaattatccagcaacttcgatgggaggaattttgtttgagcttgtgggcccaatttgagaagttttacatatagagtaaaaaaaggtcctgctctcgtgttttcgtgtaaaactggattttgttcagttcttactgtggagctatgcttcctagataaaacttctcgatttgtataacttctcgatttgtataaaaacttctccatttacatattgggaagtctatatgtaaaacttctcgatttatatatcaactatgcttcctgtggagcaaggaagcgaacgcaagctagccttttgtattagtgcattctgttcagttcttacttgatcatcccgtgttctcgcgtgtgccatggctgagtggcaagctcaacactggtattgttgtcttgtctcaaatgaagtccggttccacaagttaaccggaaatcttcatgggtgatagctgcgtcagattcttccgcgcatagggcaagtaatgcaagtgatagctgtgtcagtttacccccattttcttgggcatcacttgtctcaaatgaagtccattggaggttcgcaattta

SEQ ID NO: 39168 - DNA, 1695 bp, Zea Mays
gggagtaactttttaggttttgtggttactttttcaaaaattaactctttcgttcactataactacaaaatagtaagccagtgtactgcaagaacaatgttcttcttgaatactcaaaagaacaatgtccatcatggattctgctacgtgaccatgtggtccagcttgtttggtacacgaggccatatctttgtgttcgctttatgtatatgttccctttttattcctcagtttattcacttttatcttgtagttgcaggtttcttactcctgggtaggttccatttgtcttaaatagctttagagcaccaccttatgatatctccttttgactatgattattttcctatgaataatttttctgggaatactattaagataccaactaatctttgatatcctctaaaccaaacgcttcatgatagatgattcttgaggttgttgaatgaattggtcttgcgcatgtttgcaggcctttattggcccactaatctttgatacccactaatctttgtgctctcaattagctctaaactaatctttgatacccactaatatttgtgctctgaattggcctaattaatgatcaagtggtcatggtgtatgtcaactaatcactttctcttcatgtactactaggttataattatttgatgtggagtataaacatgcttcttgtaacatacatactgatggttaggtacctatcctagtcgtgtttgcaggcctttcagattgaaccgattacttcaacggtgtcatacatgattggtagggatgtgatggaggggagggggcaatgcaggtgcaggtaaaatttagaattttaagagcataataccctggttgtatttggcttgggagtaagtggatgttagcaatagtggagcatgtgtgggaagcggaggctgacgacagctcttacgttatcaaggaacaaacttatcctgagaaagtgctcacacgtggaacacagactactctttatttgagagatgatgacaagtatgagtttactgaccctgcaagaattgaaagcttagttaagaactgctcacaatttgtgtcattctcatatatacatggaaggagaaatcaagaacatttgggggtgttgtactgtttcttagaattatccagcaacttcgatgggaggaattttgtttgagcttgtgggcccaatttgagaagttttacatatagagtaaaaaaaggtcctgctctcgtgttttcgtgtaaaactggattttgttcagttcttactgtggagctatgcttcctagataaaacttctcgatttgtataacttctcgatttgtataaaaacttctccatttacatattgggaagtctatatgtaaaacttctcgatttatatatcaactatgcttcctgtggagcaaggaagcgaacgcaagctagccttttgtattagtgcattctgttcagttcttacttgatcatcccgtgttctcgcgtgtgccatggctgagtggcaagctcaacactggtattgttgtcttgtctcaaatgaagtccggttccacaagttaaccggaaatcttcatgggtgatagctgcgtcagattcttccgcgcatagggcaagtaatgcaagtgatagctgtgtcagtttacccccattttcttgggcatcacttgtctcaaatgaagtccattggaggttcgcaattta

SEQ ID NO: 39169 - DNA, 2241 bp, Zea Mays
gggagtaactttttaggttttgtggttactttttcaaaaattaactctttcgttcactataactacaaaatagtaagccagtgtactgcaagaacaatgttcttcttgaatactcaaaagaacaatgtccatcatggattctgctacgtgaccatgtggtccagcttgtttggtacacgaggccatatctttgtgttcgctttatgtatatgttccctttttattcctcagtttattcacttttatcttgtagttgcaggtttcttactcctgggtaggttccatttgtcttaaatagctttagagcaccaccttatgatatctccttttgactatgattattttcctatgaataatttttctgggaatactattaagataccaactaatctttgatatcctctaaaccaaacgcttcatgatagatgattcttgaggttgttgaatgaattggtcttgcgcatgtttgcaggcctttattggcccactaatctttgatacccactaatctttgtgctctcaattagctctaaactaatctttgatacccactaatatttgtgctctgaattggcctaattaatgatcaagtggtcatggtgtatgtcaactaatcactttctcttcatgtactactaggttataattatttgatgtggagtataaacatgcttcttgtaacatacatactgatggttaggtacctatcctagtcgtgtttgcaggcctttcagattgaaccgattacttcaacggtgtcatacatgattggtagggatgtgatggaggggagggggcaatgcaggtgcaggtgcattccgaatctccttccctttctccggattctattgttctttgtttcctcctattcgtttctgtagtgagaaatgtcttcggtaagatttggttggtggaaattcactgcatttacttattattgtctcccaatttcctcttcatagtcaggaactttctggttcagtggaaatgtggaattgtaccaatgtagagtctagaataagtgtgcccttatcctcccagttagcataatgtgggtacttcgtttgtcatgtatggggcatagtgcaatacaaatccttttgttaattaataatgattcagggatgcctcgttgtccatgtaacatccaaactgcccacacacacacatcaaattttggcatgataaccctgttcattaaatctgttttgtttgtaaatcacaaacaaatatgttaaccttttattgaagtgtgagatactcaatcatgttgtgttttttggttttctattttgagtgtataggtaaaatttagaattttaagagcataataccctggttgtatttggcttgggagtaagtggatgttagcaatagtggagcatgtgtgggaagcggaggctgacgacagctcttacgttatcaaggaacaaacttatcctgagaaagtgctcacacgtggaacacagactactctttatttgagagatgatgacaagtatgagtttactgaccctgcaagaattgaaagcttagttaagaactgctcacaatttgtgtcattctcatatatacatggaaggagaaatcaagaacatttggggtctaaagagtctaaagaggaggaagaataaaaaaaggtgaagaggtcactgaggtgttgtactgtttcttagaattatccagcaacttcgatgggaggaattttgtttgagcttgtgggcccaatttgagaagttttacatatagagtaaaaaaaggtcctgctctcgtgttttcgtgtaaaactggattttgttcagttcttactgtggagctatgcttcctagataaaacttctcgatttgtataacttctcgatttgtataaaaacttctccatttacatattgggaagtctatatgtaaaacttctcgatttatatatcaactatgcttcctgtggagcaaggaagcgaacgcaagctagccttttgtattagtgcattctgttcagttcttacttgatcatcccgtgttctcgcgtgtgccatggctgagtggcaagctcaacactggtattgttgtcttgtctcaaatgaagtccggttccacaagttaaccggaaatcttcatgggtgatagctgcgtcagattcttccgcgcatagggcaagtaatgcaagtgatagctgtgtcagtttacccccattttcttgggcatcacttgtctcaaatgaagtccattggaggttcgcaattta

SEQ ID NO: 39170 - DNA, 2946 bp, Zea Mays
gggagtaactttttaggttttgtggttactttttcaaaaattaactctttcgttcactataactacaaaatagtaagccagtgtactgcaagaacaatgttcttcttgaatactcaaaagaacaatgtccatcatggattctgctacgtgaccatgtggtccagcttgtttggtacacgaggccatatctttgtgttcgctttatgtatatgttccctttttattcctcagtttattcacttttatcttgtagttgcaggtttcttactcctgggtaggttccatttgtcttaaatagctttagagcaccaccttatgatatctccttttgactatgattattttcctatgaataatttttctgggaatactattaagataccaactaatctttgatatcctctaaaccaaacgcttcatgatagatgattcttgaggttgttgaatgaattggtcttgcgcatgtttgcaggcctttattggcccactaatctttgatacccactaatctttgtgctctcaattagctctaaactaatctttgatacccactaatatttgtgctctgaattggcctaattaatgatcaagtggtcatggtgtatgtcaactaatcactttctcttcatgtactactaggttataattatttgatgtggagtataaacatgcttcttgtaacatacatactgatggttaggtacctatcctagtcgtgtttgcaggcctttcagattgaaccgattacttcaacggtgtcatacatgattggtagggatgtgatggaggggagggggcaatgcaggtgcaggtgcattccgaatctccttccctttctccggattctattgttctttgtttcctcctattcgtttctgtagtgagaaatgtcttcggtaagatttggttggtggaaattcactgcatttacttattattgtctcccaatttcctcttcatagtcaggaactttctggttcagtggaaatgtggaattgtaccaatgtagagtctagaataagtgtgcccttatcctcccagttagcataatgtgggtacttcgtttgtcatgtatggggcatagtgcaatacaaatccttttgttaattaataatgattcagggatgcctcgttgtccatgtaacatccaaactgcccacacacacacatcaaattttggcatgataaccctgttcattaaatctgttttgtttgtaaatcacaaacaaatatgttaaccttttattgaagtgtgagatactcaatcatgttgtgttttttggttttctattttgagtgtataggtaaaatttagaattttaagagcataataccctggttgtatttggcttgggagtaagtggatgttagcaatagtggagcatgtgtgggaagcggaggctgacgacagctcttacgttatcaaggaacaaacttatcctgagaaagtgctcacacgtggaacacagactactctttatttgagagatgatgacaagtatgagtttactgaccctgcaagaattgaaagcttagttaagaactgctcacaatttgtgtcattctcatatatacatggaaggagaaatcaagaacatttgggggtaatgattgctatagtttattgtaatttagcttccttcaattatacttaatgtaattcttcatccttgtctaaatagtctaaagagtctaaagaggaggaagaataaaaaaaggtgaagaggtcactgaggttagttttgtgtcagtgtaatatgttgtttgttttcatgtaattcttgcttctaatattatagaaagaatccggataggcagataagaacatgtcaatgattttgatattttcagaaataaggatttctatggtgcatgttatttaaaaaacaagccaactatagcttgtgtcaggtcatagatgcttgctattattggaactggtccatgcaaatcatttttgctcaaaatccaacttggccaatcattagtaggtcaagttatattcatgaaaccttttgtttgttgtttctttgcctaaaaacatgctttcattggttagttcattatcctagagttgcagagggactttatgtagcatgatccatgctcaggtattgcaattttggcaatttctgtaatgtaacatggaattggtgaaggtccttggtcgagtaatcacaatactattgatattattcatattgattaaatttttatcattggttctctttgtttgttatattatcttgtgtcatcgattaacaactctttcaccggacgtcttgaggtgactttagtttcttatcttttatatgtatcctgacataaaaccagtgcttattttctattcgtgcatgtgcaggtgttgtactgtttcttagaattatccagcaacttcgatgggaggaattttgtttgagcttgtgggcccaatttgagaagttttacatatagagtaaaaaaaggtcctgctctcgtgttttcgtgtaaaactggattttgttcagttcttactgtggagctatgcttcctagataaaacttctcgatttgtataacttctcgatttgtataaaaacttctccatttacatattgggaagtctatatgtaaaacttctcgatttatatatcaactatgcttcctgtggagcaaggaagcgaacgcaagctagccttttgtattagtgcattctgttcagttcttacttgatcatcccgtgttctcgcgtgtgccatggctgagtggcaagctcaacactggtattgttgtcttgtctcaaatgaagtccggttccacaagttaaccggaaatcttcatgggtgatagctgcgtcagattcttccgcgcatagggcaagtaatgcaagtgatagctgtgtcagtttacccccattttcttgggcatcacttgtctcaaatgaagtccattggaggttcgcaattta

SEQ ID NO: 39171 - DNA, 2607 bp, Zea Mays
atgccaaagttcagaaccactattaaactgtttttgcgtcaagctcccaagtatactgaagagctggcacgggtgcatgcatgccttacgaaagaagccttacaagctcatcagtgctcaagcttacggaggaagctactcatgcccctctccctccctcgctctcttccacgccaatttcaccttccgctccctgtctcctgctatccgcgcgcaatattaatggagcaagatcagagcgcggattctggttttgattttgcgactggcattgtgaccagcggaagcgccgtggcccctcacagtggagaacaggcagaggcctctgcctaccaggccgacgaccgcatggcattcaatgagacgtattgggaagaaaaggggggcaacagtctgcgcgtgcttgtggcgacagattgtcaccttggctacctcgagaaggacgaggtgcgcggatttgactccttcgacacgtttgaagagatctgctcattggctgtaaaaaacaaggtggatttcctactcctttgtggcaatttgtttcatgagaacaagccttccaattcgacgttggtgaaggccattgagatcctgcggcgctattgcatgaacgactgcccagtccagtttcaggtgattagtgatcaagcagccagcctccagaacaggttttgtcaagtgaattatgaagacccaaactacaaaattggcttgcccgtgttcaccatccatggggaccaagattatcctactggaactgataacctgtcagtgaacgatatattgacagcaggaaattttttgaattatttcggcaagacagatcttggatgcaccggcgttggcaaagtaacagtttatccagtagtaatcagaaagggtgaaacttatattgccatgtatggacttggcaacattaaggatgggagactgaaaagaatgctacatgagcctggtgcagttaactggatgcaacctgaattccaagatgagacaccatcctctgactggttcaacatcttggtccttcaccaaaagaggacacggggaagtcctggagacgctatcagtgagctccttctgccacgttttgtggacatggtaatttggggccatgagcatgaatgtctgattgatccacaggaggttcctggaatgggtttccatatcacccaaccaggttcctcaattgctacctcactgatcaatactgaagcaaatccaaaacatgcgctctttctggaaatcaaggggagagagtacaggacaaccaaaatacctctgcagtctgttagaccttttgagtatgcagaggttgtactggaggaccaggttgatgttgatcctggtgatgaagcatccattcatgagcatttgcacaaagttgtgagcaaccttattgataagagtagggaagaagcatccagtagtggatcaaagcccaagcttccactggttagaataaaggtgcatcacactgggctttcaacgataaattcaaagcaatttggtcagcactacgtgggcaaggttgtaaacccacaagacatacttcttcttacaagatcaaggcaaaggcatcaaactatgcaagaaagctgcaacatttctgaagatctttgtccaaatgagctcaaccagcagacggttgaagcacttatcgcagacagtaacattgtacccaacttcctcctgatcctttcctttctagtactactcaaacaagatgtcttcttctcttctcttcttttcttttcttttctttctttctttctttcctcttttttgtgcataggtcgtccaccattcgattactacatgattgcgcgatgaaggttgatgcaaaattctgtacttttttttcgtcccatccttgcttttccagaaaccgcaggtccttcctatagacgatttcaacagcgcactccatgagtttgtcgagggggacgacaagagggcatttcacgcttgcgtgcagcaaaatatcgaggaagcgatactccaggaaaagaaaagcctgaccagggaaagaacaagctcggagaatctgcagactgatgcactcggcgtgtttgagaagcagaagcgttcgacgacgacggaggagcagcgggcccttgactcggatgatgaacccatcgagtcttccgaccccgaggagagtggtggcagccagcaggcaggaaagaagaggcgagctgcaccaggcggcgggtctgcggctgccggtgcgaggaggaagacggacctggctgcgttccagagggttccggtgaaggaagacgacgccgccacggccaggaaacgccggcctcccgttgccgccgggaggtacggcgctgtgatcaggaggaggatgccgaagtagaggattgagcgaattttcttttgagagtagcctcaggttgccgccggggctgtgatcaggaggattccgatgtagcccattcacggttccagtgtggattccgcatccaatttaatgtatttctaatcgaggaccctgatcgattagttgctgtagctatgtttggatttaggggttatttggtttgttgtctaacttatcatagtttgtcatgtctaaggttagataagtttgaggca

SEQ ID NO: 39172 - DNA, 505 bp, Zea Mays
tgatcctgtaaaacttgaaatttaactcacaaaacttgattaggagttagcacaaataatgccaagtggctagagaggagtctcaacaaaacacaataaccacaagagatcaatcacagagatggcacagtggtttatcccgtggttcggccaagaccaacgcttgcctactccacgttgtggcgtcccaacggacgagggttgcaatcaacccctctcaagcggtccaaagacccacttgaataccacggtgttttgcttgctttactatatcccgtttgcgaggaatctccacactttggagcctctcgcccttacacttagatgatcacaaagaagcacagagtaagggagggataagcaactcactcaagacaagaaatcacagcaacaccacgcacacaagtcgcaacaagagctcacaacacaactcaatgagttcacaactcaactagagctctaactgctatcgcaaggaatcaaaagcgcggaatcgatgtcttag

SEQ ID NO: 39173 - DNA, 1003 bp, Zea Mays
ggcccaatatctggcggcgcttttaatgttattcagatgaaaagcctggaacatcttatctctgcaccatctgctcagccaaacacaccagatttgccagatgaaaagaagcaatttattccttttgcatctccaccgccagttgttgctactccattggaaaaaactgagacagttccctcaccttcaatgtctcctccagtgaagccaacagagccaaaaatctccacaaagcgggttgatgaattggccacacctccagtacctcccactgattatacgttcacaaaacaaccagaacaagtacggccaatctcttccgagagtgaggcaagtatcgacttggacgatgtactatctgctgctcagacagctgctgaatcagcggagcgagctgcgtccgcagcccgcgccgctgcgaaccttgtgcagctacgcattgcagacctaaagaagaattcaagggtctataacaagtacaccgacagtgctcaaaaggaaagccctcatcaggccgagggtacacagaaaccagtatttgatcaccaggactccttcaccaacgagacacaggactatgtgccgtctcatgtgccgcagaggtcgccgtctctggaggacgatccgtatttctcctaccccaacttgttctcggcgccaaaaccttgaaggcggaaactagtggcctgtaactgctagtagtagtcctattatgtcttggtcttcgctgttgcctcggaatttctgtgtgttgctgagtttggtacataacggtacaaaaggagactactgggttattacttggctacgaaacctgtctagtttgagtctctgtaaactgtacatgtacggtgtctgtatcagttttctgaaacatttctgcagttctacacgtaagtaatgccagatcatctagtttggttgggctgggcccaaaacaacatcttgtaatttggaatggacttggaataaaggaagtacctggagatcaacacaacaaaga

SEQ ID NO: 39174 - DNA, 1858 bp, Zea Mays
tcgttgagaagaaacggaagaaggggaagaagcataaggacaagggtcagggcagcaattctgatagctcatgtgccaggaaccatagcattgagatggagcaagctgatgtgtcagccaagatggctgaagactcctgcttggagcatgcagaggctgttacgagcaaaagctctgcgaagaaacacaggaagaaaaagaggaaagataaagaggttgaaactattggccagaagcagatactcgatgctgatgaaaatgttgggtcagaagatacgaagaggaacagcagagaaagggaacatgataggaagtcaaagaagcacaaacgaaagcatcaggatgacgagactgcctcaaatggttcttctggtaatcaaattgttttaggggaagataagaggacggaaaaagagtatttagttaccttggatttggaagaggacaataaatctgatatgtcaaagattgggaagaagacagatagcaagaagaagaggagaaaagagagaaatgatggtgttgacctaagacaaaatacactagttggagagggcaagaatggtaagaataacaaagagaaaaaaatgtgtgaggatgagaatggtggcggtgaaagagagaaagaaaacatgggaaagcagaaggataagtgtagacgagtgagcttcactgatcatgtggaggtgtttaatataggtggtagtgatgatgtagagggtgatgggagtggtgaaactgaacttgtgcatggacgacggtttagccctgaggaagatgcaaagctaatggaagcgatattgaaatatgcagagttgaagcaattaggagagaaagggttacagatgattggggaaagtaataagcatccagagaccaggggttgttgggctgaaataggaaaagcattacctcatagacccaagaaagccaaatacgcgcgtggaaaggttttacttcaaaggagtgctgaacgtaaatggaccgctgaggagtatgagataattcgacggtttgttgaaaagaacggccgaaattggaaggtattagcaaaagaacttggaaagagtgaaatccatgtaaaagatacttggagacgaataaagttcaaaaatttgaaaagagggacttggagtcaggatgagtaccaaaacttgtttgatttggtaaatctggacatgcgtgtgaaagcccatcaaaacatcaatactggtcaccgtcatataagagataacatttcttgggaggctatcagtgaaaaattaaccactcgtagagccgaagaatgctgcacgaaatggcttcaaaatgtcgatgctgtttgtgctgaagatgtggactgggagaaccttctcgagcacaggtctggggagctttgccgtcatagatggaaccagatgattcgcctgatgggtgaccacagatataggcctttcattgagcaagtggaagtgcttgcaaggcggtactgcccagagatgcttgcgtacaggaaaccagtcgcaggtggatcctcggccgacgaacctgctggagcctctgacttgtaatatgggatctttagaaacgttagcagcatatggttctagagctgccaagggtgtcgtcagcactctgatctcaacaaactttggtattgttgagggcttatgtatcttctggatttgaaatcacggatgttttatcgcccaactaatcatgatttggggctcgattagagaacgactaggaatcaggccgtccagttagaactaatagtctgattaagtgttggatgactgttgaaaatgcaatgtgaacttagcagctgtgcacttgcacttttaccttggacttggaaattgccgttgccttcttg

SEQ ID NO: 39175 - DNA, 2387 bp, Zea Mays
attcagcccaaacccaagttccaccacacgtttctttaccctaaccttttcgctgctccagcgaggcatacagccgccgccgtttcttcattcttccttgcagcgccgacgctccatcttccgctccctcccttgctcgcgctcggcacgtaggcgacggtggcagcgctcagcctcgggctctcagcgacggcgtcagcggcttcccctctcgccagtcgcctcgtcctccgcacaccggccggtggccctgccaaagaggcaacggagagggtttccagaacagagtatacagagggcaaggctgttatgagcaacaaggaggagaaagaatgccaaatgaccaaagaagagaagaggcggaagaagagggagaaacataaggacatgggtcagagcggcgattatgagggtaaggctgttatgagcaacaaggaggagaaagactgccaagtaaccgaagaagagaagaaacggaagaaggggaagaagcataaggacaagggtcagggcagcaattctgatagctcatgtgccaggaaccatagcattgagatggagcaagctgatgtgtcagccaagatggctgaagactcctgcttggagcatgcagaggctgttacgagcaaaagctctgcgaagaaacacaggaagaaaaagaggaaagataaagaggttgaaactattggccagaagcagatactcgatgctgatgaaaatgttgggtcagaagatacgaagaggaacagcagagaaagggaacatgataggaagtcaaagaagcacaaacgaaagcatcaggatgacgagactgcctcaaatggttcttctggtaatcaaattgttttaggggaagataagaggacggaaaaagagtatttagttaccttggatttggaagaggacaataaatctgatatgtcaaagattgggaagaagacagatagcaagaagaagaggagaaaagagagaaatgatggtgttgacctaagacaaaatacactagttggagagggcaagaatggtaagaataacaaagagaaaaaaatgtgtgaggatgagaatggtggcggtgaaagagagaaagaaaacatgggaaagcagaaggataagtgtagacgagtgagcttcactgatcatgtggaggtgtttaatataggtggtagtgatgatgtagagggtgatgggagtggtgaaactgaacttgtgcatggacgacggtttagccctgaggaagatgcaaagctaatggaagcgatattgaaatatgcagagttgaagcaattaggagagaaagggttacagatgattggggaaagtaataagcatccagagaccaggggttgttgggctgaaatagcattacctcatagacccaagaaagccaaatacgcgcgtggaaaggttttacttcaaaggagtgctgaacgtaaatggaccgctgaggagtatgagataattcgacggtttgttgaaaagaacggccgaaattggaaggtattagcaaaagaacttggaaagagtgaaatccatgtaaaagatacttggagacgaataaagttcaaaaatttgaaaagagggacttggagtcaggatgagtaccaaaacttgtttgatttggtaaatctggacatgcgtgtgaaagcccatcaaaacatcaatactggtcaccgtcatataagagataacatttcttgggaggctatcagtgaaaaattaaccactcgtagagccgaagaatgctgcacgaaatggtacgggcaattggcatcgccgctggttaaacaaggaatctgggcagatacagatgactacatgttagtggaagcgcttcaaaatgtcgatgctgtttgtgctgaagatgtggactgggagaaccttctcgagcacaggtctggggagctttgccgtcatagatggaaccagatgattcgcctgatgggtgaccacagatataggcctttcattgagcaagtggaagtgcttgcaaggcggtactgcccagagatgcttgcgtacaggaaaccagtcgcaggtggatcctcggccgacgaacctgctggagcctctgacttgtaatatgggatctttagaaacgttagcagcatatggttctagagctgccaagggtgtcgtcagcactctgatctcaacaaactttggtattgttgagggcttatgtatcttctggatttgaaatcacggatgttttatcgcccaactaatcatgatttggggctcgattagagaacgactaggaatcaggccgtccagttagaactaatagtctgattaagtgttggatgactgttgaaaatgcaatgtgaacttagcagctgtgcacttgcacttttaccttggacttggaaattgccgttgccttcttg

SEQ ID NO: 39176 - DNA, 2305 bp, Zea Mays
attcagcccaaacccaagttccaccacacgtttctttaccctaaccttttcgctgctccagcgaggcatacagccgccgccgtttcttcattcttccttgcagcgccgacgctccatcttccgctccctcccttgctcgcgctcggcacgtaggcgacggtggcagcgctcagcctcgggctctcagcgacggcgtcagcggcttcccctctcgccagtcgcctcgtcctccgcacaccggccggtggccctgccaaagaggcaacggagagggtttccagaacagagtatacagagggcaaggctgttatgagcaacaaggaggagaaagaatgccaaatgaccaaagaagagaagaggcggaagaagagggagaaacataaggacatgggtcagagcggcgattatgagggtaaggctgttatgagcaacaaggaggagaaagactgccaagtaaccgaagaagagaagaaacggaagaaggggaagaagcataaggacaagggtcagggcagcaattctgatagctcatgtgccaggaaccatagcattgagatggagcaagctgatgtgtcagccaagatggctgaagactcctgcttggagcatgcagaggctgttacgagcaaaagctctgcgaagaaacacaggaagaaaaagaggaaagataaagaggttgaaactattggccagaagcagatactcgatgctgatgaaaatgttgggtcagaagatacgaagaggaacagcagagaaagggaacatgataggaagtcaaagaagcacaaacgaaagcatcaggatgacgagactgcctcaaatggttcttctggtaatcaaattgttttaggggaagataagaggacggaaaaagagtatttagttaccttggatttggaagaggacaataaatctgatatgtcaaagattgggaagaagacagatagcaagaagaagaggagaaaagagagaaatgatggtgttgacctaagacaaaatacactagttggagagggcaagaatggtaagaataacaaagagaaaaaaatgtgtgaggatgagaatggtggcggtgaaagagagaaagaaaacatgggaaagcagaaggataagtgtagacgagtgagcttcactgatcatgtggaggtgtttaatataggtggtagtgatgatgtagagggtgatgggagtggtgaaactgaacttgtgcatggacgacggtttagccctgaggaagatgcaaagctaatggaagcgatattgaaatatgcagagttgaagcaattaggagagaaagggttacagatgattggggaaagtaataagcatccagagaccaggggttgttgggctgaaatagcattacctcatagacccaagaaagccaaatacgcgcgtggaaaggttttacttcaaaggagtgctgaacgtaaatggaccgctgaggagtatgagataattcgacggtttgttgaaaagaacggccgaaattggaagggacttggagtcaggatgagtaccaaaacttgtttgatttggtaaatctggacatgcgtgtgaaagcccatcaaaacatcaatactggtcaccgtcatataagagataacatttcttgggaggctatcagtgaaaaattaaccactcgtagagccgaagaatgctgcacgaaatggtacgggcaattggcatcgccgctggttaaacaaggaatctgggcagatacagatgactacatgttagtggaagcgcttcaaaatgtcgatgctgtttgtgctgaagatgtggactgggagaaccttctcgagcacaggtctggggagctttgccgtcatagatggaaccagatgattcgcctgatgggtgaccacagatataggcctttcattgagcaagtggaagtgcttgcaaggcggtactgcccagagatgcttgcgtacaggaaaccagtcgcaggtggatcctcggccgacgaacctgctggagcctctgacttgtaatatgggatctttagaaacgttagcagcatatggttctagagctgccaagggtgtcgtcagcactctgatctcaacaaactttggtattgttgagggcttatgtatcttctggatttgaaatcacggatgttttatcgcccaactaatcatgatttggggctcgattagagaacgactaggaatcaggccgtccagttagaactaatagtctgattaagtgttggatgactgttgaaaatgcaatgtgaacttagcagctgtgcacttgcacttttaccttggacttggaaattgccgttgccttcttg

SEQ ID NO: 39177 - DNA, 2300 bp, Zea Mays
acccaagttccaccacacgtttctttaccctaaccttttcgctgctccagcgaggcatacagccgccgccgtttcttcattcttccttgcagcgccgacgctccatcttccgctccctcccttgctcgcgctcggcacgtaggcgacggtggcagcgctcagcctcgggctctcagcgacggcgtcagcggcttcccctctcgccagtcgcctcgtcctccgcacaccggccggtggccctgccaaagaggcaacggagagggtttccagaacagagtatacagagggcaaggctgttatgagcaacaaggaggagaaagaatgccaaatgaccaaagaagagaagaggcggaagaagagggagaaacataaggacatgggtcagagcggcgattatgagggtaaggctgttatgagcaacaaggaggagaaagactgccaagtaaccgaagaagagaagaaacggaagaaggggaagaagcataaggacaagggtcagggcagcaattctgatagctcatgtgccaggaaccatagcattgagatggagcaagctgatgtgtcagccaagatggctgaagactcctgcttggagcatgcagaggctgttacgagcaaaagctctgcgaagaaacacaggaagaaaaagaggaaagataaagaggttgaaactattggccagaagcagatactcgatgctgatgaaaatgttgggtcagaagatacgaagaggaacagcagagaaagggaacatgataggaagtcaaagaagcacaaacgaaagcatcaggatgacgagactgcctcaaatggttcttctggtaatcaaattgttttaggggaagataagaggacggaaaaagagtatttagttaccttggatttggaagaggacaataaatctgatatgtcaaagattgggaagaagacagatagcaagaagaagaggagaaaagagagaaatgatggtgttgacctaagacaaaatacactagttggagagggcaagaatggtaagaataacaaagagaaaaaaatgtgtgaggatgagaatggtggcggtgaaagagagaaagaaaacatgggaaagcagaaggataagtgtagacgagtgagcttcactgatcatgtggaggtgtttaatataggtggtagtgatgatgtagagggtgatgggagtggtgaaactgaacttgtgcatggacgacggtttagccctgaggaagatgcaaagctaatggaagcgatattgaaatatgcagagttgaagcaattaggagagaaagggttacagatgattggggaaagtaataagcatccagagaccaggggttgttgggctgaaataggaaaagcattacctcatagacccaagaaagccaaatacgcgcgtggaaaggttttacttcaaaggagtgctgaacgtaaatggaccgctgaggagtatgagataattcgacggtttgttgaaaagaacggccgaaattggaagggacttggagtcaggatgagtaccaaaacttgtttgatttggtaaatctggacatgcgtgtgaaagcccatcaaaacatcaatactggtcaccgtcatataagagataacatttcttgggaggctatcagtgaaaaattaaccactcgtagagccgaagaatgctgcacgaaatggtacgggcaattggcatcgccgctggttaaacaaggaatctgggcagatacagatgactacatgttagtggaagcgcttcaaaatgtcgatgctgtttgtgctgaagatgtggactgggagaaccttctcgagcacaggtctggggagctttgccgtcatagatggaaccagatgattcgcctgatgggtgaccacagatataggcctttcattgagcaagtggaagtgcttgcaaggcggtactgcccagagatgcttgcgtacaggaaaccagtcgcaggtggatcctcggccgacgaacctgctggagcctctgacttgtaatatgggatctttagaaacgttagcagcatatggttctagagctgccaagggtgtcgtcagcactctgatctcaacaaactttggtattgttgagggcttatgtatcttctggatttgaaatcacggatgttttatcgcccaactaatcatgatttggggctcgattagagaacgactaggaatcaggccgtccagttagaactaatagtctgattaagtgttggatgactgttgaaaatgcaatgtgaacttagcagctgtgcacttgcacttttaccttggacttggaaattgccgttgccttcttg

SEQ ID NO: 39178 - DNA, 2377 bp, Zea Mays
ccaagttccaccacacgtttctttaccctaaccttttcgctgctccagcgaggcatacagccgccgccgtttcttcattcttccttgcagcgccgacgctccatcttccgctccctcccttgctcgcgctcggcacgtaggcgacggtggcagcgctcagcctcgggctctcagcgacggcgtcagcggcttcccctctcgccagtcgcctcgtcctccgcacaccggccggtggccctgccagcaaagaggcaacggagagggtttccagaacagagtatacagagggcaaggctgttatgagcaacaaggaggagaaagaatgccaaatgaccaaagaagagaagaggcggaagaagagggagaaacataaggacatgggtcagagcggcgattatgagggtaaggctgttatgagcaacaaggaggagaaagactgccaagtaaccgaagaagagaagaaacggaagaaggggaagaagcataaggacaagggtcagggcagcaattctgatagctcatgtgccaggaaccatagcattgagatggagcaagctgatgtgtcagccaagatggctgaagactcctgcttggagcatgcagaggctgttacgagcaaaagctctgcgaagaaacacaggaagaaaaagaggaaagataaagaggttgaaactattggccagaagcagatactcgatgctgatgaaaatgttgggtcagaagatacgaagaggaacagcagagaaagggaacatgataggaagtcaaagaagcacaaacgaaagcatcaggatgacgagactgcctcaaatggttcttctggtaatcaaattgttttaggggaagataagaggacggaaaaagagtatttagttaccttggatttggaagaggacaataaatctgatatgtcaaagattgggaagaagacagatagcaagaagaagaggagaaaagagagaaatgatggtgttgacctaagacaaaatacactagttggagagggcaagaatggtaagaataacaaagagaaaaaaatgtgtgaggatgagaatggtggcggtgaaagagagaaagaaaacatgggaaagcagaaggataagtgtagacgagtgagcttcactgatcatgtggaggtgtttaatataggtggtagtgatgatgtagagggtgatgggagtggtgaaactgaacttgtgcatggacgacggtttagccctgaggaagatgcaaagctaatggaagcgatattgaaatatgcagagttgaagcaattaggagagaaagggttacagatgattggggaaagtaataagcatccagagaccaggggttgttgggctgaaatagcattacctcatagacccaagaaagccaaatacgcgcgtggaaaggttttacttcaaaggagtgctgaacgtaaatggaccgctgaggagtatgagataattcgacggtttgttgaaaagaacggccgaaattggaaggtattagcaaaagaacttggaaagagtgaaatccatgtaaaagatacttggagacgaataaagttcaaaaatttgaaaagagggacttggagtcaggatgagtaccaaaacttgtttgatttggtaaatctggacatgcgtgtgaaagcccatcaaaacatcaatactggtcaccgtcatataagagataacatttcttgggaggctatcagtgaaaaattaaccactcgtagagccgaagaatgctgcacgaaatggtacgggcaattggcatcgccgctggttaaacaaggaatctgggcagatacagatgactacatgttagtggaagcgcttcaaaatgtcgatgctgtttgtgctgaagatgtggactgggagaaccttctcgagcacaggtctggggagctttgccgtcatagatggaaccagatgattcgcctgatgggtgaccacagatataggcctttcattgagcaagtggaagtgcttgcaaggcggtactgcccagagatgcttgcgtacaggaaaccagtcgcaggtggatcctcggccgacgaacctgctggagcctctgacttgtaatatgggatctttagaaacgttagcagcatatggttctagagctgccaagggtgtcgtcagcactctgatctcaacaaactttggtattgttgagggcttatgtatcttctggatttgaaatcacggatgttttatcgcccaactaatcatgatttggggctcgattagagaacgactaggaatcaggccgtccagttagaactaatagtctgattaagtgttggatgactgttgaaaatgcaatgtgaacttagcagctgtgcacttgcacttttaccttggacttggaaattgccgttgccttcttg

SEQ ID NO: 39179 - DNA, 2383 bp, Zea Mays
ccaagttccaccacacgtttctttaccctaaccttttcgctgctccagcgaggcatacagccgccgccgtttcttcattcttccttgcagcgccgacgctccatcttccgctccctcccttgctcgcgctcggcacgtaggcgacggtggcagcgctcagcctcgggctctcagcgacggcgtcagcggcttcccctctcgccagtcgcctcgtcctccgcacaccggccggtggccctgccagcaaagaggcaacggagagggtttccagaacagagtatacagagggcaaggctgttatgagcaacaaggaggagaaagaatgccaaatgaccaaagaagagaagaggcggaagaagagggagaaacataaggacatgggtcagagcggcgattatgagggtaaggctgttatgagcaacaaggaggagaaagactgccaagtaaccgaagaagagaagaaacggaagaaggggaagaagcataaggacaagggtcagggcagcaattctgatagctcatgtgccaggaaccatagcattgagatggagcaagctgatgtgtcagccaagatggctgaagactcctgcttggagcatgcagaggctgttacgagcaaaagctctgcgaagaaacacaggaagaaaaagaggaaagataaagaggttgaaactattggccagaagcagatactcgatgctgatgaaaatgttgggtcagaagatacgaagaggaacagcagagaaagggaacatgataggaagtcaaagaagcacaaacgaaagcatcaggatgacgagactgcctcaaatggttcttctggtaatcaaattgttttaggggaagataagaggacggaaaaagagtatttagttaccttggatttggaagaggacaataaatctgatatgtcaaagattgggaagaagacagatagcaagaagaagaggagaaaagagagaaatgatggtgttgacctaagacaaaatacactagttggagagggcaagaatggtaagaataacaaagagaaaaaaatgtgtgaggatgagaatggtggcggtgaaagagagaaagaaaacatgggaaagcagaaggataagtgtagacgagtgagcttcactgatcatgtggaggtgtttaatataggtggtagtgatgatgtagagggtgatgggagtggtgaaactgaacttgtgcatggacgacggtttagccctgaggaagatgcaaagctaatggaagcgatattgaaatatgcagagttgaagcaattaggagagaaagggttacagatgattggggaaagtaataagcatccagagaccaggggttgttgggctgaaataggaaaagcattacctcatagacccaagaaagccaaatacgcgcgtggaaaggttttacttcaaaggagtgctgaacgtaaatggaccgctgaggagtatgagataattcgacggtttgttgaaaagaacggccgaaattggaaggtattagcaaaagaacttggaaagagtgaaatccatgtaaaagatacttggagacgaataaagttcaaaaatttgaaaagagggacttggagtcaggatgagtaccaaaacttgtttgatttggtaaatctggacatgcgtgtgaaagcccatcaaaacatcaatactggtcaccgtcatataagagataacatttcttgggaggctatcagtgaaaaattaaccactcgtagagccgaagaatgctgcacgaaatggtacgggcaattggcatcgccgctggttaaacaaggaatctgggcagatacagatgactacatgttagtggaagcgcttcaaaatgtcgatgctgtttgtgctgaagatgtggactgggagaaccttctcgagcacaggtctggggagctttgccgtcatagatggaaccagatgattcgcctgatgggtgaccacagatataggcctttcattgagcaagtggaagtgcttgcaaggcggtactgcccagagatgcttgcgtacaggaaaccagtcgcaggtggatcctcggccgacgaacctgctggagcctctgacttgtaatatgggatctttagaaacgttagcagcatatggttctagagctgccaagggtgtcgtcagcactctgatctcaacaaactttggtattgttgagggcttatgtatcttctggatttgaaatcacggatgttttatcgcccaactaatcatgatttggggctcgattagagaacgactaggaatcaggccgtccagttagaactaatagtctgattaagtgttggatgactgttgaaaatgcaatgtgaacttagcagctgtgcacttgcacttttaccttggacttggaaattgccgttgccttcttg

SEQ ID NO: 39180 - DNA, 2291 bp, Zea Mays
ccacacgtttctttaccctaaccttttcgctgctccagcgaggcatacagccgccgccgtttcttcattcttccttgcagcgccgacgctccatcttccgctccctcccttgctcgcgctcggcacgtaggcgacggtggcagcgctcagcctcgggctctcagcgacggcgtcagcggcttcccctctcgccagtcgcctcgtcctccgcacaccggccggtggccctgccagcaaagaggcaacggagagggtttccagaacagagtatacagagggcaaggctgttatgagcaacaaggaggagaaagaatgccaaatgaccaaagaagagaagaggcggaagaagagggagaaacataaggacatgggtcagagcggcgattatgagggtaaggctgttatgagcaacaaggaggagaaagactgccaagtaaccgaagaagagaagaaacggaagaaggggaagaagcataaggacaagggtcagggcagcaattctgatagctcatgtgccaggaaccatagcattgagatggagcaagctgatgtgtcagccaagatggctgaagactcctgcttggagcatgcagaggctgttacgagcaaaagctctgcgaagaaacacaggaagaaaaagaggaaagataaagaggttgaaactattggccagaagcagatactcgatgctgatgaaaatgttgggtcagaagatacgaagaggaacagcagagaaagggaacatgataggaagtcaaagaagcacaaacgaaagcatcaggatgacgagactgcctcaaatggttcttctggtaatcaaattgttttaggggaagataagaggacggaaaaagagtatttagttaccttggatttggaagaggacaataaatctgatatgtcaaagattgggaagaagacagatagcaagaagaagaggagaaaagagagaaatgatggtgttgacctaagacaaaatacactagttggagagggcaagaatggtaagaataacaaagagaaaaaaatgtgtgaggatgagaatggtggcggtgaaagagagaaagaaaacatgggaaagcagaaggataagtgtagacgagtgagcttcactgatcatgtggaggtgtttaatataggtggtagtgatgatgtagagggtgatgggagtggtgaaactgaacttgtgcatggacgacggtttagccctgaggaagatgcaaagctaatggaagcgatattgaaatatgcagagttgaagcaattaggagagaaagggttacagatgattggggaaagtaataagcatccagagaccaggggttgttgggctgaaataggaaaagcattacctcatagacccaagaaagccaaatacgcgcgtggaaaggttttacttcaaaggagtgctgaacgtaaatggaccgctgaggagtatgagataattcgacggtttgttgaaaagaacggccgaaattggaagggacttggagtcaggatgagtaccaaaacttgtttgatttggtaaatctggacatgcgtgtgaaagcccatcaaaacatcaatactggtcaccgtcatataagagataacatttcttgggaggctatcagtgaaaaattaaccactcgtagagccgaagaatgctgcacgaaatggtacgggcaattggcatcgccgctggttaaacaaggaatctgggcagatacagatgactacatgttagtggaagcgcttcaaaatgtcgatgctgtttgtgctgaagatgtggactgggagaaccttctcgagcacaggtctggggagctttgccgtcatagatggaaccagatgattcgcctgatgggtgaccacagatataggcctttcattgagcaagtggaagtgcttgcaaggcggtactgcccagagatgcttgcgtacaggaaaccagtcgcaggtggatcctcggccgacgaacctgctggagcctctgacttgtaatatgggatctttagaaacgttagcagcatatggttctagagctgccaagggtgtcgtcagcactctgatctcaacaaactttggtattgttgagggcttatgtatcttctggatttgaaatcacggatgttttatcgcccaactaatcatgatttggggctcgattagagaacgactaggaatcaggccgtccagttagaactaatagtctgattaagtgttggatgactgttgaaaatgcaatgtgaacttagcagctgtgcacttgcacttttaccttggacttggaaattgccgttgccttcttg

SEQ ID NO: 39181 - DNA, 2357 bp, Zea Mays
cacacgtttctttaccctaaccttttcgctgctccagcgaggcatacagccgccgccgtttcttcattcttccttgcagcgccgacgctccatcttccgctccctcccttgctcgcgctcggcacgtaggcgacggtggcagcgctcagcctcgggctctcagcgacggcgtcagcggcttcccctctcgccagtcgcctcgtcctccgcacaccggccggtggccctgccaaagaggcaacggagagggtttccagaacagagtatacagagggcaaggctgttatgagcaacaaggaggagaaagaatgccaaatgaccaaagaagagaagaggcggaagaagagggagaaacataaggacatgggtcagagcggcgattatgagggtaaggctgttatgagcaacaaggaggagaaagactgccaagtaaccgaagaagagaagaaacggaagaaggggaagaagcataaggacaagggtcagggcagcaattctgatagctcatgtgccaggaaccatagcattgagatggagcaagctgatgtgtcagccaagatggctgaagactcctgcttggagcatgcagaggctgttacgagcaaaagctctgcgaagaaacacaggaagaaaaagaggaaagataaagaggttgaaactattggccagaagcagatactcgatgctgatgaaaatgttgggtcagaagatacgaagaggaacagcagagaaagggaacatgataggaagtcaaagaagcacaaacgaaagcatcaggatgacgagactgcctcaaatggttcttctggtaatcaaattgttttaggggaagataagaggacggaaaaagagtatttagttaccttggatttggaagaggacaataaatctgatatgtcaaagattgggaagaagacagatagcaagaagaagaggagaaaagagagaaatgatggtgttgacctaagacaaaatacactagttggagagggcaagaatggtaagaataacaaagagaaaaaaatgtgtgaggatgagaatggtggcggtgaaagagagaaagaaaacatgggaaagcagaaggataagtgtagacgagtgagcttcactgatcatgtggaggtgtttaatataggtggtagtgatgatgtagagggtgatgggagtggtgaaactgaacttgtgcatggacgacggtttagccctgaggaagatgcaaagctaatggaagcgatattgaaatatgcagagttgaagcaattaggagagaaagggttacagatgattggggaaagtaataagcatccagagaccaggggttgttgggctgaaataggaaaagcattacctcatagacccaagaaagccaaatacgcgcgtggaaaggttttacttcaaaggagtgctgaacgtaaatggaccgctgaggagtatgagataattcgacggtttgttgaaaagaacggccgaaattggaaggtattagcaaaagaacttggaaagagtgaaatccatgtaaaagatacttggagacgaataaagttcaaaaatttgaaaagagggacttggagtcaggatgagtaccaaaacttgtttgatttggtaaatctggacatgcgtgtgaaagcccatcaaaacatcaatactggtcaccgtcatataagagataacatttcttgggaggctatcagtgaaaaattaaccactcgtagagccgaagaatgctgcacgaaatggtacgggcaattggcatcgccgctggttaaacaaggaatctgggcagatacagatgactacatgcttcaaaatgtcgatgctgtttgtgctgaagatgtggactgggagaaccttctcgagcacaggtctggggagctttgccgtcatagatggaaccagatgattcgcctgatgggtgaccacagatataggcctttcattgagcaagtggaagtgcttgcaaggcggtactgcccagagatgcttgcgtacaggaaaccagtcgcaggtggatcctcggccgacgaacctgctggagcctctgacttgtaatatgggatctttagaaacgttagcagcatatggttctagagctgccaagggtgtcgtcagcactctgatctcaacaaactttggtattgttgagggcttatgtatcttctggatttgaaatcacggatgttttatcgcccaactaatcatgatttggggctcgattagagaacgactaggaatcaggccgtccagttagaactaatagtctgattaagtgttggatgactgttgaaaatgcaatgtgaacttagcagctgtgcacttgcacttttaccttggacttggaaattgccgttgccttcttg

SEQ ID NO: 39182 - DNA, 2289 bp, Zea Mays
acacgtttctttaccctaaccttttcgctgctccagcgaggcatacagccgccgccgtttcttcattcttccttgcagcgccgacgctccatcttccgctccctcccttgctcgcgctcggcacgtaggcgacggtggcagcgctcagcctcgggctctcagcgacggcgtcagcggcttcccctctcgccagtcgcctcgtcctccgcacaccggccggtggccctgccaaagaggcaacggagagggtttccagaacagagtatacagagggcaaggctgttatgagcaacaaggaggagaaagaatgccaaatgaccaaagaagagaagaggcggaagaagagggagaaacataaggacatgggtcagagcggcgattatgagggtaaggctgttatgagcaacaaggaggagaaagactgccaagtaaccgaagaagagaagaaacggaagaaggggaagaagcataaggacaagggtcagggcagcaattctgatagctcatgtgccaggaaccatagcattgagatggagcaagctgatgtgtcagccaagatggctgaagactcctgcttggagcatgcagaggctgttacgagcaaaagctctgcgaagaaacacaggaagaaaaagaggaaagataaagaggttgaaactattggccagaagcagatactcgatgctgatgaaaatgttgggtcagaagatacgaagaggaacagcagagaaagggaacatgataggaagtcaaagaagcacaaacgaaagcatcaggatgacgagactgcctcaaatggttcttctggtaatcaaattgttttaggggaagataagaggacggaaaaagagtatttagttaccttggatttggaagaggacaataaatctgatatgtcaaagattgggaagaagacagatagcaagaagaagaggagaaaagagagaaatgatggtgttgacctaagacaaaatacactagttggagagggcaagaatggtaagaataacaaagagaaaaaaatgtgtgaggatgagaatggtggcggtgaaagagagaaagaaaacatgggaaagcagaaggataagtgtagacgagtgagcttcactgatcatgtggaggtgtttaatataggtggtagtgatgatgtagagggtgatgggagtggtgaaactgaacttgtgcatggacgacggtttagccctgaggaagatgcaaagctaatggaagcgatattgaaatatgcagagttgaagcaattaggagagaaagggttacagatgattggggaaagtaataagcatccagagaccaggggttgttgggctgaaataggaaaagcattacctcatagacccaagaaagccaaatacgcgcgtggaaaggttttacttcaaaggagtgctgaacgtaaatggaccgctgaggagtatgagataattcgacggtttgttgaaaagaacggccgaaattggaaggtaggacttggagtcaggatgagtaccaaaacttgtttgatttggtaaatctggacatgcgtgtgaaagcccatcaaaacatcaatactggtcaccgtcatataagagataacatttcttgggaggctatcagtgaaaaattaaccactcgtagagccgaagaatgctgcacgaaatggtacgggcaattggcatcgccgctggttaaacaaggaatctgggcagatacagatgactacatgttagtggaagcgcttcaaaatgtcgatgctgtttgtgctgaagatgtggactgggagaaccttctcgagcacaggtctggggagctttgccgtcatagatggaaccagatgattcgcctgatgggtgaccacagatataggcctttcattgagcaagtggaagtgcttgcaaggcggtactgcccagagatgcttgcgtacaggaaaccagtcgcaggtggatcctcggccgacgaacctgctggagcctctgacttgtaatatgggatctttagaaacgttagcagcatatggttctagagctgccaagggtgtcgtcagcactctgatctcaacaaactttggtattgttgagggcttatgtatcttctggatttgaaatcacggatgttttatcgcccaactaatcatgatttggggctcgattagagaacgactaggaatcaggccgtccagttagaactaatagtctgattaagtgttggatgactgttgaaaatgcaatgtgaacttagcagctgtgcacttgcacttttaccttggacttggaaattgccgttgccttcttg

SEQ ID NO: 39183 - DNA, 2254 bp, Zea Mays
acacgtttctttaccctaaccttttcgctgctccagcgaggcatacagccgccgccgtttcttcattcttccttgcagcgccgacgctccatcttccgctccctcccttgctcgcgctcggcacgtaggcgacggtggcagcgctcagcctcgggctctcagcgacggcgtcagcggcttcccctctcgccagtcgcctcgtcctccgcacaccggccggtggccctgccaaagaggcaacggagagggtttccagaacagagtatacagagggcaaggctgttatgagcaacaaggaggagaaagactgccaagtaaccgaagaagagaagaaacggaagaaggggaagaagcataaggacaagggtcagggcagcaattctgatagctcatgtgccaggaaccatagcattgagatggagcaagctgatgtgtcagccaagatggctgaagactcctgcttggagcatgcagaggctgttacgagcaaaagctctgcgaagaaacacaggaagaaaaagaggaaagataaagaggttgaaactattggccagaagcagatactcgatgctgatgaaaatgttgggtcagaagatacgaagaggaacagcagagaaagggaacatgataggaagtcaaagaagcacaaacgaaagcatcaggatgacgagactgcctcaaatggttcttctggtaatcaaattgttttaggggaagataagaggacggaaaaagagtatttagttaccttggatttggaagaggacaataaatctgatatgtcaaagattgggaagaagacagatagcaagaagaagaggagaaaagagagaaatgatggtgttgacctaagacaaaatacactagttggagagggcaagaatggtaagaataacaaagagaaaaaaatgtgtgaggatgagaatggtggcggtgaaagagagaaagaaaacatgggaaagcagaaggataagtgtagacgagtgagcttcactgatcatgtggaggtgtttaatataggtggtagtgatgatgtagagggtgatgggagtggtgaaactgaacttgtgcatggacgacggtttagccctgaggaagatgcaaagctaatggaagcgatattgaaatatgcagagttgaagcaattaggagagaaagggttacagatgattggggaaagtaataagcatccagagaccaggggttgttgggctgaaataggaaaagcattacctcatagacccaagaaagccaaatacgcgcgtggaaaggttttacttcaaaggagtgctgaacgtaaatggaccgctgaggagtatgagataattcgacggtttgttgaaaagaacggccgaaattggaaggtattagcaaaagaacttggaaagagtgaaatccatgtaaaagatacttggagacgaataaagttcaaaaatttgaaaagagggacttggagtcaggatgagtaccaaaacttgtttgatttggtaaatctggacatgcgtgtgaaagcccatcaaaacatcaatactggtcaccgtcatataagagataacatttcttgggaggctatcagtgaaaaattaaccactcgtagagccgaagaatgctgcacgaaatggtacgggcaattggcatcgccgctggttaaacaaggaatctgggcagatacagatgactacatgttagtggaagcgcttcaaaatgtcgatgctgtttgtgctgaagatgtggactgggagaaccttctcgagcacaggtctggggagctttgccgtcatagatggaaccagatgattcgcctgatgggtgaccacagatataggcctttcattgagcaagtggaagtgcttgcaaggcggtactgcccagagatgcttgcgtacaggaaaccagtcgcaggtggatcctcggccgacgaacctgctggagcctctgacttgtaatatgggatctttagaaacgttagcagcatatggttctagagctgccaagggtgtcgtcagcactctgatctcaacaaactttggtattgttgagggcttatgtatcttctggatttgaaatcacggatgttttatcgcccaactaatcatgatttggggctcgattagagaacgactaggaatcaggccgtccagttagaactaatagtctgattaagtgttggatgactgttgaaaatgcaatgtgaacttagcagctgtgcacttgcacttttaccttggacttggaaattgccgttgccttcttg

SEQ ID NO: 39184 - DNA, 2393 bp, Zea Mays
acacgtttctttaccctaaccttttcgctgctccagcgaggcatacagccgccgccgtttcttcattcttccttgcagcgccgacgctccatcttccgctccctcccttgctcgcgctcggcacgtaggcgacggtggcagcgctcagcctcgggctctcagcgacggcgtcagcggcttcccctctcgccagtcgcctcgtcctccgcacaccggccggtggccctgccaaagaggcaacggagagggtttccagaacagagtatacagagggcaaggctgttatgagcaacaaggaggagaaagaatgccaaatgaccaaagaagagaagaggcggaagaagagggagaaacataaggacatgggtcagagcggcgattatgagggtaaggctgttatgagcaacaaggaggagaaagactgccaagtaaccgaagaagagaagaaacggaagaaggggaagaagcataaggacaagggtcagggcagcaattctgatagctcatgtgccaggaaccatagcattgagatggagcaagctgatgtgtcagccaagatggctgaagactcctgcttggagcatgcagaggctgttacgagcaaaagctctgcgaagaaacacaggaagaaaaagaggaaagataaagaggttgaaactattggccagaagcagatactcgatgctgatgaaaatgttgggtcagaagatacgaagaggaacagcagagaaagggaacatgataggaagtcaaagaagcacaaacgaaagcatcaggatgacgagactgcctcaaatggttcttctggtaatcaaattgttttaggggaagataagaggacggaaaaagagtatttagttaccttggatttggaagaggacaataaatctgatatgtcaaagattgggaagaagacagatagcaagaagaagaggagaaaagagagaaatgatggtgttgacctaagacaaaatacactagttggagagggcaagaatggtaagaataacaaagagaaaaaaatgtgtgaggatgagaatggtggcggtgaaagagagaaagaaaacatgggaaagcagaaggataagtgtagacgagtgagcttcactgatcatgtggaggtgtttaatataggtggtagtgatgatgtagagggtgatgggagtggtgaaactgaacttgtgcatggacgacggtttagccctgaggaagatgcaaagctaatggaagcgatattgaaatatgcagagttgaagcaattaggagagaaagggttacagatgattggggaaagtaataagcatccagagaccaggggttgttgggctgaaatagatggcttattgagtatttgttgaaggaaaagcattacctcatagacccaagaaagccaaatacgcgcgtggaaaggttttacttcaaaggagtgctgaacgtaaatggaccgctgaggagtatgagataattcgacggtttgttgaaaagaacggccgaaattggaaggtattagcaaaagaacttggaaagagtgaaatccatgtaaaagatacttggagacgaataaagttcaaaaatttgaaaagagggacttggagtcaggatgagtaccaaaacttgtttgatttggtaaatctggacatgcgtgtgaaagcccatcaaaacatcaatactggtcaccgtcatataagagataacatttcttgggaggctatcagtgaaaaattaaccactcgtagagccgaagaatgctgcacgaaatggtacgggcaattggcatcgccgctggttaaacaaggaatctgggcagatacagatgactacatgttagtggaagcgcttcaaaatgtcgatgctgtttgtgctgaagatgtggactgggagaaccttctcgagcacaggtctggggagctttgccgtcatagatggaaccagatgattcgcctgatgggtgaccacagatataggcctttcattgagcaagtggaagtgcttgcaaggcggtactgcccagagatgcttgcgtacaggaaaccagtcgcaggtggatcctcggccgacgaacctgctggagcctctgacttgtaatatgggatctttagaaacgttagcagcatatggttctagagctgccaagggtgtcgtcagcactctgatctcaacaaactttggtattgttgagggcttatgtatcttctggatttgaaatcacggatgttttatcgcccaactaatcatgatttggggctcgattagagaacgactaggaatcaggccgtccagttagaactaatagtctgattaagtgttggatgactgttgaaaatgcaatgtgaacttagcagctgtgcacttgcacttttaccttggacttggaaattgccgttgccttcttg

SEQ ID NO: 39185 - DNA, 1344 bp, Zea Mays
gaaaaaggacaatggctctctgtatctcatccttatcctttccccacgattccttctctcctctcttgcgccgccgctggcccagcgcggccgccgtgctccttctccactcgtgcttcccaagctgcttcgccggaagcaatgcgagggccctgccccggtggaggcgtctcggcgtcttttgccccgagcttcaacggctcccgcgccatgatctgtaaattgcacgagacggatccgcatttcattcatccaaacagccaaaacggggccgttccgcgcaggcgacagggctacgggaggaatttgctatgctagccaggcggttgaattgctgcccactttgtaccctgaaatcgtggtccgagacgcacggctcgaggactgctgggaagtggctgacactcactgcagctcgttctttcctggttacaagttcccgttggaccttgttctccggattgatcgttacattgctctcctctctggattttcagttccacccggctgcatgaggacttgccttgtggccgtcaattctaattctgtaaatagtagtttcaacatcgagtgtggagatgctacagatgccaactttgagaaatacaatctcagtagaggctccgtagctggcattcttacacttgatacagtggcagactatcttccgagaaggggacccctgaagcagagaaggtattgcgtatatagcaaacgtcgcggtgcggaaggaggagcgacggaaagggatcgcgaagatgttggtccaagaagcagaggctcgggcaaggagctggggatgccggtcgatggcactgcactgcgacgtaaacaacgtggccgcgctacgcctgtacagaaaccaaggcttcaagtgcatacgagtgccggaaggagctaaatggcccgaacccaagatagctaaaggagcggagtacaacttcatgatgaagctagtgcccaaggcttgagtcttgaaccttataagatctgactagggaaaaaaagggaaaggtttggccgtgtaggttctgcacggatgcacgatttgctctccattcatgtgtacagcatttggtgtatagtggaggctactttgtaaatggtatatataacagctacgtgttggtccatagtgagtgactgagggtgtcggtgtttaaaccatccccagtccttgtgttgttgtgtgttatgttcttcagattctacaaggttccagccagccagaaggctgctggggcgaactgccagttctaaattgtttttttttctggagatacagaccggcttgtcatatagggctggtttgataataaaaaaattaaatggatatatgagagg

SEQ ID NO: 39186 - DNA, 7363 bp, Zea Mays
atacaagcctgggaattcgtagaagagattgaggcagagcacgcacgcgaccagcagcacggctgggatccaccagctgccgccgctgtcggagaacatggcgcacagtagcaggcacagtagcagcagcatgtacaaccccagcccggtgcccgcgccgctgccccactcgccgccgccaaaaccaccgccgtacccgtacccgtaccctctgtccggcctgtagtagtatattccggcgaagtagaccacgaccagcagcaggagagcggcgagcacgatgttctggatgaggaacatgaccagcaccagcgccgccggcactagcaccacctcgctccggttgccggccacggccagggccagcagcagcaccccggcgccgaggaccaggagcacggcgttgtccgccaccgtctcctgcacctccgtcacctgctcgtaccaccccatcagggtctcttggcagatgacccatcccagcgccgccaccacgagcagcggcaccaccggcgacggcccccggctcgccgcccacgacggcgccccgcctgggcttccccagtagctcatggtcacctctgctacacttctaccgagatatatatatatctgaatatacttcttttgttctgctgttgttctaagtaccgtcagactgctcgttgcaaatggcgatgcaggcctaacaagttccctggcatctatatatatggatccgtgctcatattgttccaactaatttttaaccacctgtctctgcttttgtgcgtgtaatgctgatgcatatctgatatctctctgtctggcgtgtgggcagggcaggagccaactttggtctgtggtagatgagctgatcctagagaaagatgacactgaaggcaaggactttgcaggtcaggtcactctcgtgcttaagtcacaaactaattaaagcagggtttaatgaaggaaaaatgtccttttttatcggctcaattaagagttacaagccgcttgagtaagctgagaacgatggctgatatcatgagctggaccatggatcactccaaccacaaaaactgtcagcccatagtgggagcagttatggctttcggtacagtcggcttaacgaaggaaacattctttttatcaactccattaagacgtgtagtttgctctgcttgaacacaaaagttcagtgacttataccaaatcggtttcaacaagccatagggaaatttgtttctgtacgattctagaatctgtgcatgacagcagcaaggtgaataaaattgagtaataactgtatgagtatgaccaacagtgcatgaaaatcagacaagcatttttgtgtgtgtgagagagacgcagtgcagcagcagtcagctgaacctttcttcttctgtgaatcagtcaacttccgtccgaaccagggcggtgccggcctcttcacatcaacttcggcacccctgagattaggttgccccacgtcaatcatccaaattaccagctcaatctgcattgaaaaggcgctaaatagcaatgatccagtattccggtcttaataaaatgcaagctataatcaatttgtcccggagataacgaagaatacgtttaactacagtccaatgcactgaagtagggacaaccatatattgacaaacacgatttaccgagaacgaaatatctagttgagtgagcgatagatactagagtgcttccacaacactcctataccgagtggagtttgttggggacttgttctcaaatgctatgagttaagaacaaggcaacacagaaaatgttaaacggtaaagtccttcgtccttcgaagcattatttcccttaggatataatgattttcggacgaaggttatgaagggcgcaccttcataaacacaacatacgatgatggagaatgaactatatgaaatatgaaggataacatagacaattatatattattatcaacttatttttgcattattattatgaagaaatagaaatgacatcaaattacaaatgtaccttcggcttggaaggagatgaaagtacaagtgtgacgcaaaagcaaatgccaagtcagcgtgaacagtacgggggtactgtttacctatttataggcacgggacacagcccatataaaattacattcatgccctttacatttggtagtaattctatagtaatccaccgaggtctgaatagccttttcatctttaagtcggtttccttttctgctaccacgccgaagctttcccgctcacatcttcggcgttgtatcaaccttcgtattattttgggcttctcctactgtgatatcgactcgagtctgaagatacctgttcacacattatactccagaaacactgttaaatcctgtttttgaggaccttcggaagccgaaggcccccaacagtagcccctcgcaatattaatttgttaaaataataaatttagattgcgacatggacgaaggttttaagccgaaggtccgaaaaaacaccttccctttgctagaatagcaacattcactgacaggcggggtctttcaattttcaacgcactgggcgtataaataagggcataccgtgagctcatttggtacgcttttttgccatctgctctcgctcactcaatttttagctcttgcgcaccaagatttgcttagctttttaagttttgaagcttcggcgttgaaaacagttttttagtgttttcgaagatgtctgaagataagaaggctgctgctgagatgaagctgagtctctctgaagagaagaatctggggtttcttatagcaatgtcgaagaccaatacagaaaaaaatcaccaaagagattttagaaggtttgtctgaagatactgatgacagcgacagttatgatgtggatagtggtggtgaagactccgaagatcgcccttggcgaccaagccatgcggttttcggcaaatcaagtatcaaagaaaatcatcttgtcaacatgagaggaagatatttctgggacttgtccgttatgagggccgacgaaggagaaaagacttgtccgaaccctgaagaaaatgaagttgtagtgtaccgaagctttttgaaagctggacttcgatttcccctgagcaactttgtcgtagaggtgctgaaaatatttgaagtctatcttcaccaacttacccccgaagcaatcataaggctgaatatcttcgtgtgggccgtgagaagctaaggtctggaacctgatgcaaaaagtttctgcaacatacacgaattatcatacgagacaaaaccttggggtaaggaacagtatcacaataattttggctgctacagtttcgtttctcggtctgggtcaagctgtcccgtgccaacctttcggaagagatggcccggcgactggatgacagaatggttttatgtgaagaatgacctgaaaacacgggaaaatattaaaggtataattatgcgccctatttggcaaagcttcagcctgcggaggccgaaggttgaaatgaatgaagctgccgaagaatgccagagagccttcggagttatttgttcttttattggaacgagagatttggtccaagagcatattgccttcagagtatggccgctcacggaaaaatgggaaatgccgcaagagaccataaaggaggctgacgaaggtggacttatcaggctgaagtatactttcaagttcggagataaattcgttgagtcagatgatgactggctaaaaagcattgaaaatttaagtgatgaactacttggggcttactcgaaggccgaagatactgcattgtcagcagccttcggaggccggaaaaagaaaagactgaaccgagtgtttgagcaatcgggttcgtctaccctgactatcgttatcccattcgagggcagaaaagaaaaggcacgacctctgcgaaagaagaagctgcagctgctcctagtgagccagcaccgaaaagaaaaaggataaaggtcctcacacatcggccacgctatattgaaccagcctcggtgcctgagttcaccagagagacctcttcggccaccgaggctgaacagccaaccttgctgccagaaattgcagaaatggccgaagcgccaacaagaacagaattggaagaaccaaagattttgttatcagaaaccaaagagatggccgaagcgccatcgacagaaaaaatggaagaagcaaaaggatcaaccgagggatcaaaaatatcagaagttttaagtccttcagcaaatgttgagacaataaaaaaccaaaagaggccagcggtaactccgaaaagaaaaagaatggccaatgtgctagatgttctggagacaattaagtcctcaagcacaactccgaagaagactgttgaaacttccgaagcgaaaactgagatttttgatactaaggctccagagcaagaaactgaggctgaagctgggccctcagagcccacgaaggtaaaatccttggaaaccgaggaagaaaaaatgacggagccaattcttgttgaagaaatcagtgctgttgcccccgaagcatcccccaaagtccttgattatattgttcgacatgcttcggggaaaaaattatcagtaaaagaaaagcaagaggcccagctttacgcccaaaaactgaagtatccaaagggggagttaatattcaacggcagtggagaagaagacttcctgtattgtctccctgacagcaaggagatttctgtctgtcgggagatgagcaagagcttcggatttgtggcagaacctcccaagctattgggcccacatgcacctgtccttgtcccaaggacctcaaacggctatgcatgtgcgtcaaacaacttaacaggatctgtccgagtgtcccaaggaccccggataaaccacttaccgccaagatcgcaggattaagtaaacacaactcacatacaaacacttgcagcggaaataaaatctttattacaaaatgattacaaatttatcaagatgatattatacctcatcggagtgattacaaaagaaagtgtttcaaaagaattacactttaaaatgttatataatatttgtaaatttgaaatacatgctagcttaagtgacaatcctcattaaagaaactatagaagggatatacttatataagaaggccgagcccaccggcacttagcaccatccacaacagaacaaaattacaacctgaaaaacaacagggaataaaaccctgagtacgcaattactcagcaagacttacccgactaaagaaaagactctcaagggtatgctggtttattgggaatcaaggtaaagcttatcaaatttcaaagactcgtttttgcagaaaagcttactagtagtggatccttatgccaagcttttacttcaccagttaagtaattttcctgaatctagattttcctaatctagattattcgcttgtcctacactagattcattttagcagctttagtttcacttgttatctacgatgagggtcgaagatccagtcttcatatccgagaagttcagcgatccgaatcgattaatacccagctggggatctccaaccacacgacatatgcttcccttaactcttttgcacatgtctaccattcccacggatcctccaccacatgaacaggtccgcgccacccgagagcacaccaccccttataggcggtcggttgccaggagggtacgtgccactctcgccatctctccactcccagtgcgcgattgtcttttcatgtatggaatagccgggttcaagcttacccatgacgaggtatgtggccagataaagggtcctagatcagcaggccaacaatcggtacggtccttaatcgacacagacgggcgacctgtccagctcaatgtctggtctcattttaaacaaattctcaaagtttgatacctggcagaggtaccctgcttgaatgatgaattcatccccgcggaggatgtctccatcatcccaagccctttttcttttttaaaaatcatgagtcatagatcaaaaacatttttcttaatctataagcataactaagcattactagtttttataaaacaggtaacaaggtatgataatcaatctttcaaggatggtaatgcatcaagtgtttaatcattcaactcctattacctaatgcagcatataagtgataaaattttgtaatacaaggaaggtggcaaatgcaccggggcttgcctgggataacactacgttagtgttgttagatgacgtccacttggcaatcatctcacatcctgacgcttgatccgatcacgcaaatcttcaagtttattcataagtatcccttgcgaagaagcccacgcttaacaccatattgtggtcgactcagctctggtcctccatatcacatgatcccttaacgtacctaaatgattatgcataatgcacatgagcatgggcataaaaaaccacaatatatataatctatactaaagaggataacacttaaaacaaacattacaacccttgagggtaactactagatacatttaattctatatcactcatggccttctagtcaaatggacctaaccaaatatcaagaaagcaatacatcatttttagacaacaaggcatttgatcaagcatttatttgcaactacgtaagcatagggacatagacaaagctaatcccaagtcacacgtattgtaatcaatgaattactagttaattaagttgcatgatcattactacctattactacctggataccttactctccaaacaaaaactcaagtaccagcatgagaaggcctagagatatacaaatccacaatactgtcccttactaactttctattagtaatggagaacacttaaacgacatgacctgatagaattaatatgacaaaccactaatgaaccataagtaaatctccatctatgacatttactcaatcaacaaatattaaatatgaaaattactaaaataagccatcacttcatcaattaagaataaaaaattgactaatccaacctagccaaacaagaatgactccaaacaatcaatttaacacatgaagattttggacagcagtacagcagtcaacagttttgctcataacttacaaaatatgcatccaaaaatagtaaactaagactttctggaaatcttagaaagtcctctataactcttatattatcatcacaacatgattcgacagaatggtcaaacagtgctaaactttaattctgtccagatttggatagaattcagctcttcacttcaaaaattcataactggagtttcagaaatccaaatcaggtgatcctagactttttagaaagctagtagaattgtctacaattcatttataatcatctcaaggtgattcaatgtgtatcgaag

SEQ ID NO: 39187 - DNA, 1198 bp, Zea Mays
gcggaggacgaggatgcgccggcgacggcggcagcgcagacggtctggtacgaccccatgacttcgccgcaggcgccggcgccgcagcagcagccggcgatagaggctgcgatgcggggggcctcgccgtcgatttcccaacacctacttgctggtaggttgctgcagcgacgagatcacccacatgtacaaaggaaagaccgtcatgaccgaggacgagcgctacgaatcgcttcggcattgcaagtgggtcgacgaggtcataccggacgctccatgggtgatcaaccaggagttcatcgacaagcacgacatcgactacgtcgctcacgacgcgctcccatacgctgacacgagtggagctgccaatgatgtctatgaatttgtgaaagccatcgggaagttcaaggagacgaagcgcaccgagggcatctcgacgtcggacatcatcatgaggatcttgaaggactacaaccagtacatcatgcggaacctcacccgcgggtacagccgcaaagatctcggcgtcagctacgtcaaggagaagcagctgagagtcaacatggggatcagcaagctacgggagaaggtgaaggagcaccaggagaagttccacagcgcggcgaagatcgctgggaccaaccctgtggagtggatggagaacgcggaccgctggatcgttggcttccttgagaagttcgaggaaggctgccacatgatggaaactgccattaaaggtcggattcaggaggggttgaagcggcaaggcaggtcggagtcaaacctttctggagaggagtccgactcgtagttctgtgatctcccccaaatgaagctagacaaaaggagaactggagatcatttcccacagtctgtgtaacagtatgagattggttaattagcatgttattgtaggacgccatggatcattgtttagttgtacctggagattatgtagttttgaagaacaatcgtgtttctgtatgcgatcagttgctccttcattgagcatatctgcatctggcacctgctaggaagtaggaactgctattgttttcatagaactgaagatacgaagaatctgacccttttcttctgagtatgtgccgacctgtgtgttgcaccgccaaatgaactgaatattgctcatgcatctcttgtttaattatcatccatcgggatttaatgataaattaat

SEQ ID NO: 39188 - DNA, 1113 bp, Zea Mays
gcggaggacgaggatgcgccggcgacggcggcagcgcagacggtctgatttcccaacacctacttgctggtaggttgctgcagcgacgagatcacccacatgtacaaaggaaagaccgtcatgaccgaggacgagcgctacgaatcgcttcggcattgcaagtgggtcgacgaggtcataccggacgctccatgggtgatcaaccaggagttcatcgacaagcacgacatcgactacgtcgctcacgacgcgctcccatacgctgacacgagtggagctgccaatgatgtctatgaatttgtgaaagccatcgggaagttcaaggagacgaagcgcaccgagggcatctcgacgtcggacatcatcatgaggatcttgaaggactacaaccagtacatcatgcggaacctcacccgcgggtacagccgcaaagatctcggcgtcagctacgtcaaggagaagcagctgagagtcaacatggggatcagcaagctacgggagaaggtgaaggagcaccaggagaagttccacagcgcggcgaagatcgctgggaccaaccctgtggagtggatggagaacgcggaccgctggatcgttggcttccttgagaagttcgaggaaggctgccacatgatggaaactgccattaaaggtcggattcaggaggggttgaagcggcaaggcaggtcggagtcaaacctttctggagaggagtccgactcgtagttctgtgatctcccccaaatgaagctagacaaaaggagaactggagatcatttcccacagtctgtgtaacagtatgagattggttaattagcatgttattgtaggacgccatggatcattgtttagttgtacctggagattatgtagttttgaagaacaatcgtgtttctgtatgcgatcagttgctccttcattgagcatatctgcatctggcacctgctaggaagtaggaactgctattgttttcatagaactgaagatacgaagaatctgacccttttcttctgagtatgtgccgacctgtgtgttgcaccgccaaatgaactgaatattgctcatgcatctcttgtttaattatcatccatcgggatttaatgataaattaat

SEQ ID NO: 39189 - DNA, 977 bp, Zea Mays
atctcctcccgcagcctgcagctccgcctgatgtggctcggctccgttggtcatcacggcaagctacgttagtacataaaggctgtctccaacgatacaaacaatgcttcatcatgcttccatcctgtgggccatcctcggaagtcctcacccccacatactgccattcacggactgaacgtagatgaaagatgaagccttcagtccgcgtctcttcgtctcgagatctcgcgcccgcgccgtcgatggaaggctcgcctccagtccgcgcctacgcccgcaacctcgcccgcgcccaagatgtcgccctctcccccaccgttgtcctcgcttcctccctccagcacctgctgtctttctcactcaatggcgtggatcaggatggtcctcgcggcggaagccacctgagaaagccatgtgccccagcactcgcccccgcctcgcccgatcgatctgacacagtgcagctgactggcacacagtacgcatcgtcattggacttgctctggctcttcacctacaacaccctgaatgactacaagaggtaattgtatcgactccaccctgtctgctgagaccgtgttcgctgttgaagttggagaagttcaaagcacatcaattcaagtctgcctagcaggtgacgttggagccctacgagcatgaccatgcatgtgttgtgggcggttatagaatgcccaagaagcagaaggctacctgatcacctcatagatcataatccgcgctcatcttgtccaataaggatgcttcattgtattatggtttattaagatgtctgcatgatactgatggttacaatatagtggtggttagttgcaatgtagtggtgaaatagctagattaaaataacaatatttatgtatggctaggagcctagaatcacaaatagattatgaaatcttttttcataacaatataacacccatttgtatataaattattgtgtttttagatgtttc

SEQ ID NO: 39190 - DNA, 951 bp, Zea Mays
gcagctccgcctgatgtggctcggctccgttggtcatcacggcaagctacgttagtacataaaggctgtctccaacgatacaaacaatgcttcatcatgcttccatcctgtgggccatcctcggaagtcctcacccccacatactgccattcacggactgaacgtagatgaaagatgaagccttcagtccgcgtctcttcgtctcgagatctcgcgcccgcgccgtcgatggaaggctcgcctccagtccgcgcctacgcccgcaacctcgcccgcgcccaagatgatggtcctcgcggcggaagccacctgagaaagccatgtgccccagcactcgcccccgcctcgcccgatcgatctgacacagtgcagctgactggcacacagtacgcatcgtcattggacttgctctggctcttcacctacaacaccctgaatgactacaagagttaggatcttaacccttaatgcttcatacttcttgaagaacgatggccactttgtcattttaatcaagggtaattgtatcgactccaccctgtctgctgagaccgtgttcgctgttgaagttggagaagttcaaagcacatcaattcaagtctgcctagcaggtgacgttggagccctacgagcatgaccatgcatgtgttgtgggcggttatagaatgcccaagaagcagaaggctacctgatcacctcatagatcataatccgcgctcatcttgtccaataaggatgcttcattgtattatggtttattaagatgtctgcatgatactgatggttacaatatagtggtggttagttgcaatgtagtggtgaaatagctagattaaaataacaatatttatgtatggctaggagcctagaatcacaaatagattatgaaatcttttttcataacaatataacacccatttgtatataaattattgtgtttttagatgtttc

SEQ ID NO: 39191 - DNA, 1748 bp, Zea Mays
gcagctccgcctgatgtggctcggctccgttggtcatcacggcaagctacgttagtacataaaggctgtctccaacgatacaaacaatgtaaaagctttatctatatctctactactctataaaaaggtaacatgggcgttcatatcaggcttcatcatgcttccatcctgtgggccatcctcggaagtcctcacccccacatactgccattcacggactgaacgtagatgaaagatgaagccttcagtccgcgtctcttcgtctcgagatctcgcgcccgcgccgtcgatggaaggctcgcctccagtccgcgcctacgcccgcaacctcgcccgcgcccaagatgtcgccctctcccccaccgttgtcctcgcttcctccctccagcacctgctgtctttctcactcaatggcgtggatcaggatggtcctcgcggcggaagccacctgagaaagccatgtgccccagcactcgcccccgcctcgcccgatcgatctgacacagtgcagctgactggcacacagtacgcatcgtcattggacttgctctggctcttcacctacaacaccctgaatgactacaagagcttaatgttcatgttgcgccattggctaagctctagcgctgtggtggcggactttgccaaaagtctggtcctggcgagccctcttcgtcccgccgtcgcgacaacagcggggcacctcgtccgcagtggccgggccagggcaggggattcctatgcaattcttgtggctatgctggtttctcctctaattctgcttcaacttttggttttttcttggtgttgtttcattagagaatattgttttaccatctagctgagttggaagcccaataatataccaatattctttgtttttgcctttgaaatataacaattcttcagtttgttggaattaacgagtaagtgttttttgccatttaacgctaggggatgctctttgaagtggttattgttcagttaaaacttacacatcagtttattttcgttcttacttgatagcctaaacttactaattgatgtagtggaactgtagatgggcaaaggtttactgcatcaagaattctgaactaaacaagaacacaaataattttgttaagaatgctcattcattcacatactagaaaattttcaaacatgatgcagccattttggttgggggaaattgtcatgccagtgttttatgacttttaaatattgtgtgaatgtgttattctgtaggttaggatcttaacccttaatgcttcatacttcttgaagaacgatggccactttgtcattttaatcaagggtaattgtatcgactccaccctgtctgctgagaccgtgttcgctgttgaagttggagaagttcaaagcacatcaattcaagtctgcctagcaggtgacgttggagccctacgagcatgaccatgcatgtgttgtgggcggttatagaatgcccaagaagcagaaggctacctgatcacctcatagatcataatccgcgctcatcttgtccaataaggatgcttcattgtattatggtttattaagatgtctgcatgatactgatggttacaatatagtggtggttagttgcaatgtagtggtgaaatagctagattaaaataacaatatttatgtatggctaggagcctagaatcacaaatagattatgaaatcttttttcataacaatataacacccatttgtatataaattattgtgtttttagatgtttc

SEQ ID NO: 39192 - DNA, 1861 bp, Zea Mays
gcagctccgcctgatgtggctcggctccgttggtcatcacggcaagctacgttagtacataaaggctgtctccaacgatacaaacaatgtaaaagctttatctatatctctactactctataaaaaggtaacatgggcgttcatatcaggcttcatcatgcttccatcctgtgggccatcctcggaagtcctcacccccacatactgccattcacggactgaacgtagatgaaagatgaagccttcagtccgcgtctcttcgtctcgagatctcgcgcccgcgccgtcgatggaaggctcgcctccagtccgcgcctacgcccgcaacctcgcccgcgcccaagatgtcgccctctcccccaccgttgtcctcgcttcctccctccagcacctgctgtctttctcactcaatggcgtggatcaggatggtcctcgcggcggaagccacctgagaaagccatgtgccccagcactcgcccccgcctcgcccgatcgatctgacacagtgcagctgactggcacacagtacgcatcgtcattggacttgctctggctcttcacctacaacaccctgaatgactacaagagcttaatgttcatgttgcgccattggctaagctctagcgctgtggtggcggactttgccaaaagtctggtcctggcgagccctcttcgtcccgccgtcgcgacaacagcggggcacctcgtccgcagtggccgggccagggcaggggattcctatgcaattcttgtggctatgctggtttctcctctaattctgcttcaacttttggttttttcttggtgttgtttcattagagaatattgttttaccatctagctgagttggaagcccaataatataccaatattctttgtttttgcctttgaaatataacaattcttcagtttgttggaattaacgagtaagtgttttttgccatttaacgctaggggatgctctttgaagtggttattgttcagttaaaacttacacatcagtttattttcgttcttacttgatagcctaaacttactaattgatgtagtggaactgtagatgggcaaaggtttactgcatcaagaattctgaactaaacaagaacacaaataattttgttaagaatgctcattcattcacatactagaaaattttcaaacatgatgcagccattttggttgggggaaattgtcatgccagtgttttatgacttttaaatattgtgtgaatgtgttattctgtaggttaggatcttaacccttaatgcttcatacttcttgaagaacgatggccactttgtcattttaatcaaggtactccgagctattattcttaattttgtagcagttgtctgaaggacaggtctcttacagtggtgagaggactttttgttgtgtgaaaggtcctgcgaggtgccagcacttggggtaattgtatcgactccaccctgtctgctgagaccgtgttcgctgttgaagttggagaagttcaaagcacatcaattcaagtctgcctagcaggtgacgttggagccctacgagcatgaccatgcatgtgttgtgggcggttatagaatgcccaagaagcagaaggctacctgatcacctcatagatcataatccgcgctcatcttgtccaataaggatgcttcattgtattatggtttattaagatgtctgcatgatactgatggttacaatatagtggtggttagttgcaatgtagtggtgaaatagctagattaaaataacaatatttatgtatggctaggagcctagaatcacaaatagattatgaaatcttttttcataacaatataacacccatttgtatataaattattgtgtttttagatgtttc

SEQ ID NO: 39193 - DNA, 481 bp, Zea Mays
cttcatcatgcttccatcctgtgggccatcctcggaagtcctcacccccacatactgccattcacggactgaacgtagatgaaagatgaagccttcagtccgcgtctcttcgtctcgagatctcgcgcccgcgccgtcgatggaaggctcgcctccagtccgcgcctacgcccgcaacctcgcccgcgcccaagatgtcgccctctcccccaccgttgtcctcgcttcctccctccagcacctgctgtctttctcactcaatggcgtggatcaggatggtcctcgcggcggaagccacctgagaaagccatgtgccccagcactcgcccccgcctcgcccgatcgatctgacacagtgcagctgactggcacacagtacgcatcgtcattggacttgctctggctcttcacctacaacaccctgaatgactacaagattgtctgaaggacaggtctcttacagtggtgagaggactttttg

SEQ ID NO: 39194 - DNA, 935 bp, Zea Mays
cttcatcatgcttccatcctgtgggccatcctcggaagtcctcacccccacatactgccattcacggactgaacgtagatgaaagatgaagccttcagtccgcgtctcttcgtctcgagatctcgcgcccgcgccgtcgatggaaggctcgcctccagtccgcgcctacgcccgcaacctcgcccgcgcccaagatgtcgccctctcccccaccgttgtcctcgcttcctccctccagcacctgctgtctttctcactcaatggcgtggatcaggatggtcctcgcggcggaagccacctgagaaagccatgtgccccagcactcgcccccgcctcgcccgatcgatctgacacagctgactggcacacagtacgcatcgtcattggacttgctctggctcttcacctacaacaccctgaatgactacaagagttaggatcttaacccttaatgcttcatacttcttgaagaacgatggccactttgtcattttaatcaagggtaattgtatcgactccaccctgtctgctgagaccgtgttcgctgttgaagttggagaagttcaaagcacatcaattcaagtctgcctagcaggtgacgttggagccctacgagcatgaccatgcatgtgttgtgggcggttatagaatgcccaagaagcagaaggctacctgatcacctcatagatcataatccgcgctcatcttgtccaataaggatgcttcattgtattatggtttattaagatgtctgcatgatactgatggttacaatatagtggtggttagttgcaatgtagtggtgaaatagctagattaaaataacaatatttatgtatggctaggagcctagaatcacaaatagattatgaaatcttttttcataacaatataacacccatttgtatataaattattgtgtttttagatgtttc

SEQ ID NO: 39195 - DNA, 2927 bp, Zea Mays
ccccgaccgacactcgggctcgtgaaccccgtcccgtaatttctctatatatcccgtccctccccccacgtacttcactcggcctccatctccccacgcaccccggcgcccgcgccgcgccaccttctctcccccctcctcctcctcctctctctctctctctctctctgccacacagcacaccagaagggcagcaggggaggtagagagaggtagcttcgcattctcggtttccctccgcgcgtgtcctcccagcctcgacagagagaagggccaccatcgtccctgcctgattgcgcgccaggcaggcaggcattatggcgccgggcggccggcgcagcaacggcgagacgccgacaggacagcagcagcagcagcagcaggctgacggcaggcgcgggtgcgcatgcggcgggttccccgtgtgcgcgtgcgccggcgcggcggcgggactacgacgagttcaaggcgcgcatcaacgggctggagaacgacatcaggcagcgctccgacgcctacaacgccgccagggggctcaaggacggcgagcccagggctacgtggatggccgacggcacacagtgggagggcacctgggttgagccgtccgagaaccaccgcaagggcgaccatgccggcatcgtcctggtgcttctgaaccacccgagccacagccgtcagctcgggccgccggcgagcgcggacaacccgctggacttgagcatggtggacgtgcggctccccatgctggtgtacgtctcccgcgagaagcggcccgggcacaaccaccagaagaaggccggcgccatgaacgcgctgacccggtgctccgccgtgctctccaactcgcccttcatcctgaacctggactgcgaccactacatcaacaactcgcaggcgctgcgcgcgggcatctgcttcatgctcgggcgggacagcgacacggtggcgttcgtccagttcccgcagcgcttcgagggcgtggaccccacggacctgtacgccaaccacaaccgcatcttcttcgacggcacgctccgggcgctggacggcatgcagggccccatctacgtcggcacgggctgcctgttccgccgcatcacgctctacggcttcgacccgccgcggatcaacgtgggcgggccgtgcttcccgtcgctgggcggcatgttcgccaagaccaagtacgagaagcctgggctggagctcaccaccaaggccgccgtggccaagggcaagcacggcttcctgcccatgcccaagaagtcgtacggcaagtcggacgcgttcgcggacaccatcccgatggcgtcgcacccgtcgccgttcgcggccgcggccgccgtcgtggcggaagaggcgaccatcgccgaggcagtggcggtgtgcgcggcggcgtacgagaagaagaccgggtggggcagcgacatcgggtgggtgtacggcacggtgacggaggacgtggtgacggggtaccggatgcacatcaaggggtggcgctcccgctactgctccatctacccgcacgccttcatcggcaccgcccccatcaacctgacggagcggctgttccaggtgctccgctggtccacgggctccctggagatcttcttctcccggaacaacccgctgttcgggagcacgttcctgcacccgctgcagcgcgtggcgtacatcaacatcaccacgtacccgttcacggcgatcttcctcatcttctacaccacggtgccggcgctgtcgttcgtgacggggcacttcatcgtgcagcggcccaccaccatgttctacgtgtacctggccatcgtgctgggcacgctgctgatcctggccgtcctggaggtgaagtgggcgggcgtgaccgtgttcgagtggttccggaacgggcagttctggatgacggccagctgctccgcgtacctggccgccgtgtgccaggtgctggtgaaggtggtgttccggcgggacatctcgttcaagctgacgtcgaagcagcccgcgggggacgagaagaaggacccctacgccgacctgtacgtggtgcgctggacctggctcatggtgacgcccatcatcatcatcctcgtcaacatcatcggctccgccgtggccttcgccaaggtgctggacggcgagtggacgcactggctaaaggtggccggcggcgtcttcttcaacttctgggtgctgttccacctctaccccttcgccaagggcatcctggggaggcacggcaagacccccgtggtggtgctcgtctggtgggccttcaccttcgtcatcaccgccgtgctgtacatcaacataccccacatccacggccccggcggcaagcacggcggcgcgatcggaaagcacggcgccgcccaccatggcaagaagttcgacggctactacctctggccgtgaaggatcgatcgatcggagcagccaacccagcatcgtcatgcatgcacatacctgccctgatgatgatatggtgagccgcgaaggtgaagagagtacgttcccgttcatccatcgtccttagtgatgcccggtgattagttgatgatgaagagtgaagaagactacacaccaacccacacacatttgatcgacccagcgacgtacccgccaattttttttcttcttctttcctttttgcccgcccccttttcttcattctttttcttctagttttgtccagaaattgaaagatgtgttaagatgtgttgatttgatttagttttttaattaccgtacccgtggtaattaaattatgtacctacttatatatacattacgccgaagaggaaggatcactttgtataagaaaagagagaaatgggggatgtaggagggggggctaggggcccggctttggggtggtattcttttagcatatggaacacaataaatttaatttcattcttggaaaaaaagaa

SEQ ID NO: 39196 - DNA, 3517 bp, Zea Mays
catctccccacgcaccccggcgcccgcgccgcgccaccttctctcccccctcctcctcctcctctctctctctctctctctctgccacacagcacaccagaagggcagcaggggaggtagagagaggtagcttcgcattctcggtttccctccgcgcgtgtcctcccagcctcgacagagagaagggccaccatcgtccctgcctgattgcgcgccaggcaggcaggcattatggcgccgggcggccggcgcagcaacggcgagacgccgacaggacagcagcagcagcagcagcaggctgacggcaggcgcgggtgcgcatgcggcgggttccccgtgtgcgcgtgcgccggcgcggcggcggtggcgtccgccgcctcctccgccgacatggaccgcgtggcggtggccgccaccgagggccagatcggcgccgtcaacgacgagagctgggtggcggtcgacctcagcgacgacggcctctcctccgccgccgacccgggggccgtcgcgctcgaggaacgccccgtcttccgcaccgagaagatcaagggtgtcctcctccacccctacagggtgctcatcttcgtgcgcctgatcgcgttcacgctgttcgtgatctggcgcatctcgcaccgcaacccggacgcgctgtggctgtgggtgacgtcgatcgcgggcgagttctggttcggcttctcgtggctgctggaccagctgccgaagctgaacccgatcaaccgcgtgccggacctgggggcgctgcggcagcggttcgaccgcgccgacgggacgtcgcggctgccggggctggacatcttcgtgaccacggcggacccgttcaaggagccgatcctgagcacggccaactccatcctctccatcctggccgccgactaccccgtggagcgcaacacgtgctacctctccgacgactcgggcatgctgctcacgtacgaggccatggcggaggccgccaagttcgccaccgtctgggtgcccttctgccgcaagcacggcatcgagccgcgcggccccgagagctacttcgagctcaagtcccacccctacatgggccgctcccaggaggacttcgtcaacgaccgccgccgcgtgcgcagggactacgacgagttcaaggcgcgcatcaacgggctggagaacgacatcaggcagcgctccgacgcctacaacgccgccagggggctcaaggacggcgagcccagggctacgtggatggccgacggcacacagtgggagggcacctgggttgagccgtccgagaaccaccgcaagggcgaccatgccggcatcgtcctggtgcttctgaaccacccgagccacagccgtcagctcgggccgccggcgagcgcggacaacccgctggacttgagcatggtggacgtgcggctccccatgctggtgtacgtctcccgcgagaagcggcccgggcacaaccaccagaagaaggccggcgccatgaacgcgctgacccggtgctccgccgtgctctccaactcgcccttcatcctgaacctggactgcgaccactacatcaacaactcgcaggcgctgcgcgcgggcatctgcttcatgctcgggcgggacagcgacacggtggcgttcgtccagttcccgcagcgcttcgagggcgtggaccccacggacctgtacgccaaccacaaccgcatcttcttcgacggcacgctccgggcgctggacggcatgcagggccccatctacgtcggcacgggctgcctgttccgccgcatcacgctctacggcttcgacccgccgcggatcaacgtgggcgggccgtgcttcccgtcgctgggcggcatgttcgccaagaccaagtacgagaagcctgggctggagctcaccaccaaggccgccgtggccaagggcaagcacggcttcctgcccatgcccaagaagtcgtacggcaagtcggacgcgttcgcggacaccatcccgatggcgtcgcacccgtcgccgttcgcggccgcggccgccgtcgtggcggaagaggcgaccatcgccgaggcagtggcggtgtgcgcggcggcgtacgagaagaagaccgggtggggcagcgacatcgggtgggtgtacggcacggtgacggaggacgtggtgacggggtaccggatgcacatcaaggggtgctccgctggtccacgggctccctggagatcttcttctcccggaacaacccgctgttcgggagcacgttcctgcacccgctgcagcgcgtggcgtacatcaacatcaccacgtacccgttcacggcgatcttcctcatcttctacaccacggtgccggcgctgtcgttcgtgacggggcacttcatcgtgcagcggcccaccaccatgttctacgtgtacctggccatcgtgctgggcacgctgctgatcctggccgtcctggaggtgaagtgggcgggcgtgaccgtgttcgagtggttccggaacgggcagttctggatgacggccagctgctccgcgtacctggccgccgtgtgccaggtgctggtgaaggtggtgttccggcgggacatctcgttcaagctgacgtcgaagcagcccgcgggggacgagaagaaggacccctacgccgacctgtacgtggtgcgctggacctggctcatggtgacgcccatcatcatcatcctcgtcaacatcatcggctccgccgtggccttcgccaaggtgctggacggcgagtggacgcactggctaaaggtggccggcggcgtcttcttcaacttctgggtgctgttccacctctaccccttcgccaagggcatcctggggaggcacggcaagacccccgtggtggtgctcgtctggtgggccttcaccttcgtcatcaccgccgtgctgtacatcaacataccccacatccacggccccggcggcaagcacggcggcgcgatcggaaagcacggcgccgcccaccatggcaagaagttcgacggctactacctctggccgtgaaggatcgatcgatcggagcagccaacccagcatcgtcatgcatgcacatacctgccctgatgatgatatggtgagccgcgaaggtgaagagagtacgttcccgttcatccatcgtccttagtgatgcccggtgattagttgatgatgaagagtgaagaagactacacaccaacccacacacatttgatcgacccagcgacgtacccgccaattttttttcttcttctttcctttttgcccgcccccttttcttcattctttttcttctagttttgtccagaaattgaaagatgtgttaagatgtgttgatttgatttagttttttaattaccgtacccgtggtaattaaattatgtacctacttatatatacattacgccgaagaggaaggatcactttgtataagaaaagagagaaatgggggatgtaggagggggggctaggggcccggctttggggtggtattcttttagcatatggaacacaataaatttaatttcattcttggaaaaaaagaa

SEQ ID NO: 39197 - DNA, 2976 bp, Zea Mays
ggggcattccagttgcaccctctaatttgggaagggtgctcatcttcgtgcgcctgatcgcgttcacgctgttcgtgatctggcgcatctcgcaccgcaacccggacgcgctgtggctgtgggtgacgtcgatcgcgggcgagttctggttcggcttctcgtggctgctggaccagctgccgaagctgaacccgatcaaccgcgtgccggacctgggggcgctgcggcagcggttcgaccgcgccgacgggacgtcgcggctgccggggctggacatcttcgtgaccacggcggacccgttcaaggagccgatcctgagcacggccaactccatcctctccatcctggccgccgactaccccgtggagcgcaacacgtgctacctctccgacgactcgggcatgctgctcacgtacgaggccatggcggaggccgccaagttcgccaccgtctgggtgcccttctgccgcaagcacggcatcgagccgcgcggccccgagagctacttcgagctcaagtcccacccctacatgggccgctcccaggaggacttcgtcaacgaccgccgccgcgtgcgcagggactacgacgagttcaaggcgcgcatcaacgggctggagaacgacatcaggcagcgctccgacgcctacaacgccgccagggggctcaaggacggcgagcccagggctacgtggatggccgacggcacacagtgggagggcacctgggttgagccgtccgagaaccaccgcaagggcgaccatgccggcatcgtcctggtgcttctgaaccacccgagccacagccgtcagctcgggccgccggcgagcgcggacaacccgctggacttgagcatggtggacgtgcggctccccatgctggtgtacgtctcccgcgagaagcggcccgggcacaaccaccagaagaaggccggcgccatgaacgcgctgacccggtgctccgccgtgctctccaactcgcccttcatcctgaacctggactgcgaccactacatcaacaactcgcaggcgctgcgcgcgggcatctgcttcatgctcgggcgggacagcgacacggtggcgttcgtccagttcccgcagcgcttcgagggcgtggaccccacggacctgtacgccaaccacaaccgcatcttcttcgacggcacgctccgggcgctggacggcatgcagggccccatctacgtcggcacgggctgcctgttccgccgcatcacgctctacggcttcgacccgccgcggatcaacgtgggcgggccgtgcttcccgtcgctgggcggcatgttcgccaagaccaagtacgagaagcctgggctggagctcaccaccaaggccgccgtggccaagggcaagcacggcttcctgcccatgcccaagaagtcgtacggcaagtcggacgcgttcgcggacaccatcccgatggcgtcgcacccgtcgccgttcgcggccgcggccgccgtcgtggcggaagaggcgaccatcgccgaggcagtggcggtgtgcgcggcggcgtacgagaagaagaccgggtggggcagcgacatcgggtgggtgtacggcacggtgacggaggacgtggtgacggggtaccggatgcacatcaaggggtgctccgctggtccacgggctccctggagatcttcttctcccggaacaacccgctgttcgggagcacgttcctgcacccgctgcagcgcgtggcgtacatcaacatcaccacgtacccgttcacggcgatcttcctcatcttctacaccacggtgccggcgctgtcgttcgtgacggggcacttcatcgtgcagcggcccaccaccatgttctacgtgtacctggccatcgtgctgggcacgctgctgatcctggccgtcctggaggtgaagtgggcgggcgtgaccgtgttcgagtggttccggaacgggcagttctggatgacggccagctgctccgcgtacctggccgccgtgtgccaggtgctggtgaaggtggtgttccggcgggacatctcgttcaagctgacgtcgaagcagcccgcgggggacgagaagaaggacccctacgccgacctgtacgtggtgcgctggacctggctcatggtgacgcccatcatcatcatcctcgtcaacatcatcggctccgccgtggccttcgccaaggtgctggacggcgagtggacgcactggctaaaggtggccggcggcgtcttcttcaacttctgggtgctgttccacctctaccccttcgccaagggcatcctggggaggcacggcaagacccccgtggtggtgctcgtctggtgggccttcaccttcgtcatcaccgccgtgctgtacatcaacataccccacatccacggccccggcggcaagcacggcggcgcgatcggaaagcacggcgccgcccaccatggcaagaagttcgacggctactacctctggccgtgaaggatcgatcgatcggagcagccaacccagcatcgtcatgcatgcacatacctgccctgatgatgatatggtgagccgcgaaggtgaagagagtacgttcccgttcatccatcgtccttagtgatgcccggtgattagttgatgatgaagagtgaagaagactacacaccaacccacacacatttgatcgacccagcgacgtacccgccaattttttttcttcttctttcctttttgcccgcccccttttcttcattctttttcttctagttttgtccagaaattgaaagatgtgttaagatgtgttgatttgatttagttttttaattaccgtacccgtggtaattaaattatgtacctacttatatatacattacgccgaagaggaaggatcactttgtataagaaaagagagaaatgggggatgtaggagggggggctaggggcccggctttggggtggtattcttttagcatatggaacacaataaatttaatttcattcttggaaaaaaagaa

SEQ ID NO: 39198 - DNA, 2308 bp, Zea Mays
cgccctcaatcatttgattccccggctaagtgcttctgaaccacccgagccacagccgtcagctcgggccgccggcgagcgcggacaacccgctggacttgagcatggtggacgtgcggctccccatgctggtgtacgtctcccgcgagaagcggcccgggcacaaccaccagaagaaggccggcgccatgaacgcgctgacccggtgctccgccgtgctctccaactcgcccttcatcctgaacctggactgcgaccactacatcaacaactcgcaggcgctgcgcgcgggcatctgcttcatgctcgggcgggacagcgacacggtggcgttcgtccagttcccgcagcgcttcgagggcgtggaccccacggacctgtacgccaaccacaaccgcatcttcttcgacggcacgctccgggcgctggacggcatgcagggccccatctacgtcggcacgggctgcctgttccgccgcatcacgctctacggcttcgacccgccgcggatcaacgtgggcgggccgtgcttcccgtcgctgggcggcatgttcgccaagaccaagtacgagaagcctgggctggagctcaccaccaaggccgccgtggccaagggcaagcacggcttcctgcccatgcccaagaagtcgtacggcaagtcggacgcgttcgcggacaccatcccgatggcgtcgcacccgtcgccgttcgcggccgcggccgccgtcgtggcggaagaggcgaccatcgccgaggcagtggcggtgtgcgcggcggcgtacgagaagaagaccgggtggggcagcgacatcgggtgggtgtacggcacggtgacggaggacgtggtgacggggtaccggatgcacatcaaggggtggcgctcccgctactgctccatctacccgcacgccttcatcggcaccgcccccatcaacctgacggagcggctgttccaggtgctccgctggtccacgggctccctggagatcttcttctcccggaacaacccgctgttcgggagcacgttcctgcacccgctgcagcgcgtggcgtacatcaacatcaccacgtacccgttcacggcgatcttcctcatcttctacaccacggtgccggcgctgtcgttcgtgacggggcacttcatcgtgcagcggcccaccaccatgttctacgtgtacctggccatcgtgctgggcacgctgctgatcctggccgtcctggaggtgaagtgggcgggcgtgaccgtgttcgagtggttccggaacgggcagttctggatgacggccagctgctccgcgtacctggccgccgtgtgccaggtgctggtgaaggtggtgttccggcgggacatctcgttcaagctgacgtcgaagcagcccgcgggggacgagaagaaggacccctacgccgacctgtacgtggtgcgctggacctggctcatggtgacgcccatcatcatcatcctcgtcaacatcatcggctccgccgtggccttcgccaaggtgctggacggcgagtggacgcactggctaaaggtggccggcggcgtcttcttcaacttctgggtgctgttccacctctaccccttcgccaagggcatcctggggaggcacggcaagacccccgtggtggtgctcgtctggtgggccttcaccttcgtcatcaccgccgtgctgtacatcaacataccccacatccacggccccggcggcaagcacggcggcgcgatcggaaagcacggcgccgcccaccatggcaagaagttcgacggctactacctctggccgtgaaggatcgatcgatcggagcagccaacccagcatcgtcatgcatgcacatacctgccctgatgatgatatggtgagccgcgaaggtgaagagagtacgttcccgttcatccatcgtccttagtgatgcccggtgattagttgatgatgaagagtgaagaagactacacaccaacccacacacatttgatcgacccagcgacgtacccgccaattttttttcttcttctttcctttttgcccgcccccttttcttcattctttttcttctagttttgtccagaaattgaaagatgtgttaagatgtgttgatttgatttagttttttaattaccgtacccgtggtaattaaattatgtacctacttatatatacattacgccgaagaggaaggatcactttgtataagaaaagagagaaatgggggatgtaggagggggggctaggggcccggctttggggtggtattcttttagcatatggaacacaataaatttaatttcattcttggaaaaaaagaa

SEQ ID NO: 39199 - DNA, 1199 bp, Zea Mays
gtttcctttttcattccatgacatcccctgcacatccttgccggtggcgacttcacctccacatcctgctagcggcgactttacctcccctttcttgccggtagcaacttcacatccccttcagcctctctgtcccaagattaggatggctctagggaggatgggatcacgatgcaaaagggatgccctagcagaaaccactcctactgaatatgagaaacagagggcagcacatgtgatgaggaacaaccaaatgttgcaacggcttgggattaatcagctgcgcacaataatgactgctacaagagtaaggagcaaagatgattgttcagaggaatctgggtctttgtatgacggtgaggacagtgaaggctctgagcaagaggaggatttccaagttgcaaaagttgcattttacacgcacaacaattgtgtcaagaacaaacttaatcgtgagaagatgcaatttccacagtgcacaggatctcaatcctacattgcaaaatcctatgtagtgaggcaagaaaaatataaagatatggaacctagtgtaattgatcttttcaaggagatgcattgcagcaagaagaaaggatttagtgaggccgttcagaaagctatagtgatatggaagcaatggtggcaacaccagttgaagatggacagcatgtgctgtctttgacagaagttgtttccaatgtgctgtcgggttcaagtaaatttcttcacaatgctggccttttacctgcctccaagagaagcaatacaaggactatctcgacaaggatgcaagagcttcagactcaattggacactgagaggcaagaaaaaaatggatttcgagaagaaatggaaaccttaaaggcccagtcacaagcgtctaaggcaaccattgctaatcaatcgactgagattgcagatttgaagaagtccttatcagaaaataacagtctccttcgacaaatattaagcatcaatcgtggccagatgactcctccttaagtatgattgctagggtgttggtgtcaaccatcctgaagattgatctcacaaaactttagatctcgttttatccttatgattgctgtagaaattaataggaactacaacttgttctattgttcacttgttatagaggattatgaatcatgtttaatgttaaaagcttatgtgttggatgcattatgcttgaaatatat

SEQ ID NO: 39200 - DNA, 1893 bp, Zea Mays
ccagctttccaattttctttacatggttatatttcaatagctggcaatgccatagaattaatttgtactaacaaaaggtaactgttcgatgtatagagaaaaatctcctttatattaaagttatcctactgctggttagatgattaaaaaaatggataccttgtccctttccttctacgtccatctactctgcaagaattgtcccataaatgagcttcatatttcctactccacgtatgcctgcacaaattgatgacagcaaattaatgcttagaaggcaaggtgcatttaattaagatacaaagtgataaaccaattgtattgtttgtctccccttagaaactattacaaattacagggacactggattcctatgtctttcgagtgcctgcatccttagttcctgaaaaaaatgtggctctactcactgaaaaaaggaattaaaagaaaaggatttgttcaaaaactcatctgccatctcatagtaggacactatgtgaaggatgggacaaagcagagaggatgacgattccctatgcccgcaactgaactgagatggcatgagcaagaagccatctggttctctcaaaggcgatggcttccttaagccccacaaatcagaaccacaacaacagccacagactcaaaagcaaaaccaaaaacatggagctcaggcaataaaaacaagaaaaaaagaaaaatacgaagatcaaaaacttgatgaagtatggctatggtggcgactccatatgaccaggatttcgatccaatggctatggtgtatttgatcaaccacaaaaggtaagttctaaatttgaggcagactccaacctaaaatggaacatgaatccaaatattgctattattcccacaccagttggttccataacaatacatgcatagacggtggcagaccttcaggtgcaacaggcagcttcggtcctgacagtcttatttgtgaggggtcgttaggccccgcgtttacaaagcgaaattcggtgatcagaaggtatatcgctaattcttacatgttgaaaccaactattaggccactgtatcttgatgatatgcttcatttcagattcacgaatttcaaattatgatcaaaactattgcgatatcatcactttctggatggtaaatttcaggaatggctgtaaagaaaataaacttttctgcatttcgaagccatccttcagatttgttcgttgagttagttgcaagtatttcaaggctaaaccatccaaaacttgctggttattgccagccgatggagaagctcctagcgaagcccattcgccacctcctgcagatgctgatggtcctagtctgcctcctctaggtaccagcaccaaccgagcctcctgttcttccgcacgccgcagatcggacccaccacgaccatgtttcgcgctgacgagcccggggaggggaccggcggcaagacgatgcccacccgggcgagaggacaccagatctggagaaggtaggactggatccgcacttggaggccccaaatccacacatcaactgactggatgccgctaatgctgctggaggttcaatcggggaacaataggatccagagcggtggggaagtggtaagcctctctgtggctggtgctggcgcgcgaatggtggcggcgaatgcgtgtggacggttgaacagatgggggagggaaggagcgagagagacggggagggagcagtggagcacgacagcgcggagacggaggcgaggcaggacgttgccggagcgcgggtggggtcgttgcgcgcagcggtgacacggcgggcgtgatttccgggtggcggacagcgaggcttgcgcaaggaagggggcgggggcatggtgaaatggtgtggacgcccacactgaaatggcgaggcttg

SEQ ID NO: 39201 - DNA, 1485 bp, Zea Mays
ttcgttctcgtctgcaagggcgaagggcaatgcaaatgaccaccaacctggccttccgtgtgcacgagcactgcacgaccactgcctgcgtgcatcaccgcaggaaccagactgatgagtaatctaatgactcattgtgttgtctagggcaggcagaatattacgcacgcgtgttggagtatttttaaaggatctcacgttacatgtggaataacatcaacaaagttgggggggaaatgtcgagaggcaatttttttttggcacagagaaaaaagaagttgcaataggcggagcggagagaagctttagataccttttcggccacccatcatatactctgtctgctgttcttccctataaattcgtcgacctctccatatcacagagagatagagagagagagagatagacaggagagagagagagaggggaagagagagagagagagagagagagatagatgtggtaactcaagaactgttcttatgcatgcagcagccataagcattgctactagcgtctcctgcacgtgctgtgtcgtttccagggtttcatgcggggcgaagcagctggtctctgccgcctgaacgccgccggaatctgcgaggcctccccgagctgcgtgcgtcgtcggataaggcagccggcacggcaatgccggttccgcttgctccgtacccagctcctccggcgccattcacgccgcccaatggggcccagagccagctcgtctgcaccgggtgccggaacctcctcatgtacccagctggtgcgacgtcggtctgctgcgccgtctgcagcaccgtcaccgccgtgccggctccaggaactgagatggcgcagctagtgtgcggaggatgccacaccctcctcatgtacatacgcggcgcgacgagcgtgcagtgttcttgctgccacactgtgaacctggctatggaagcaaatcaagtcgcgcatgtgaactgcgggaactgccgcatgctgctcatgtaccagtacggggctcggtccgtgaagtgcgcggtctgcagttttgtgacatcggttggaacctcacctggtgcagagcagaagcccagcagctgagctgatagtgtccctgaaagtgctgtgagaccacctatgaaaaggatgctttgagtgcacatgtatagagttcttccctgaagcgattctttcactttcttttcttttgttttcttttgttttcttttcttttttggttcctcctcaccatctccaccccacccgtccacttctgcgttccttcgatggatctcgcgagcccgcggaataaatgagagttttggatatatagctagggcttaacctcgtcgacttgtctgtaaaatcgaatgagacatatatataaacctatgttgttttccttgtttctgaatttctggatgcttctctggctgctctttgatctgaacaatttgtatttgtgcacggtaatcgaatgacacacacacataaggatct

SEQ ID NO: 39202 - DNA, 1991 bp, Zea Mays
gggcaatgcaaatgaccaccaacctggccttccgtgtgcacgagcactgcacgaccactgcctgcgtgcatcaccgcaggaaccagactgatgagtaatctaatgactcattgtgttgtctagggcaggcagaatattacgcacgcgtgttggagtatttttaaaggatctcacgttacatgtggaataacatcaacaaagttgggggggaaatgtcgagaggcaatttttttttggcacagagaaaaaagaagttgcaataggcggagcggagagaagctttagataccttttcggccacccatcatatactctgtctgctgttcttccctataaattcgtcgacctctccatatcacagagagatagagagagagagagatagacaggagagagagagagaggggaagagagagagagagagagagagagatagatgtggtaactcaagaactgttcttatgcatgcagcagccataagcattgctactaggtgccgattcccctcttctttgttttttattcccctcttgctcttctttgatgatgattggctgggaactacatcttggaattccttttttttctctctctcactcgatttctttgtttgattattggccatggtgggtgattcctcgcctgttttatctcgaaactggattagctgcgagtttttttttcttctttcaacccgctgcgttattctaagctcggtctactcgttgcatcaggccaacaatggcaagtggcttccatgaacatggctgtccatgaaaaatcccccgtatgcatgctcggtctaatctcctcaagctagcgaaacgaaatttcctaaaagccggtctggtcctcgaatacagcttgttgcctgagccgctgggagtcctatggagtagtagagttcttcaccttcttctgcgcgcgattactgttagccggcttgaggagaagctggaacgatcttgacgtgcattcagagaatcgatttttccccgtctcccaaggactcctcgtccattacgtctcctgcacgtgctgtgtcgtttccagggtttcatgcggggcgaagcagctggtctctgccgcctgaacgccgccggaatctgcgaggcctccccgagctgcgtgcgtcgtcggataaggcagccggcacggcaatgccggttccgcttgctccgtacccagctcctccggcgccattcacgccgcccaatggggcccagagccagctcgtctgcaccgggtgccggaacctcctcatgtacccagctggtgcgacgtcggtctgctgcgccgtctgcagcaccgtcaccgccgtgccggctccaggaactgagatggcgcagctagtgtgcggaggatgccacaccctcctcatgtacatacgcggcgcgacgagcgtgcagtgttcttgctgccacactgtgaacctggctatggaagcaaatcaagtcgcgcatgtgaactgcgggaactgccgcatgctgctcatgtaccagtacggggctcggtccgtgaagtgcgcggtctgcagttttgtgacatcggttggaacctcacctggtgcagagcagaagcccagcagctgagctgatagtgtccctgaaagtgctgtgagaccacctatgaaaaggatgctttgagtgcacatgtatagagttcttccctgaagcgattctttcactttcttttcttttgttttcttttgttttcttttcttttttggttcctcctcaccatctccaccccacccgtccacttctgcgttccttcgatggatctcgcgagcccgcggaataaatgagagttttggatatatagctagggcttaacctcgtcgacttgtctgtaaaatcgaatgagacatatatataaacctatgttgttttccttgtttctgaatttctggatgcttctctggctgctctttgatctgaacaatttgtatttgtgcacggtaatcgaatgacacacacacataaggatct

SEQ ID NO: 39203 - DNA, 2597 bp, Zea Mays
gggcaatgcaaatgaccaccaacctggccttccgtgtgcacgagcactgcacgaccactgcctgcgtgcatcaccgcaggaaccagactgatgagtaatctaatgactcattgtgttgtctagggcaggcagaatattacgcacgcgtgttggagtatttttaaaggatctcacgttacatgtggaataacatcaacaaagttgggggggaaatgtcgagaggcaatttttttttggcacagagaaaaaagaagttgcaataggcggagcggagagaagctttagataccttttcggccacccatcatatactctgtctgctgttcttccctataaattcgtcgacctctccatatcacagagagatagagagagagagagatagacaggagagagagagagaggggaagagagagagagagagagagagagatagatgtggtaactcaagaactgttcttatgcatgcagcagccataagcattgctactaggtgccgattcccctcttctttgttttttattcccctcttgctcttctttgatgatgattggctgggaactacatcttggaattccttttttttctctctctcactcgatttctttgtttgattattggccatggtgggtgattcctcgcctgttttatctcgaaactggattagctgcgagtttttttttcttctttcaacccgctgcgttattctaagctcggtctactcgttgcatcaggccaacaatggcaagtggcttccatgaacatggctgtccatgaaaaatcccccgtatgcatgctcggtctaatctcctcaagctagcgaaacgaaatttcctaaaagccggtctggtcctcgaatacagcttgttgcctgagccgctgggagtcctatggagtagtagagttcttcaccttcttctgcgcgcgattactgttagccggcttgaggagaagctggaacgatcttgacgtgcattcagagaatcgatttttccccgtctcccaaggactcctcgtccattagtaatcgattttactgctactgaacagctctttgcgtgcattttctccgagatttctgtggatttcaaatttcaatgcaactgaagccactctgtctctctccctcgctctgtttcgtcagcgtctcctgcacgtgctgtgtcgtttccagggtttcatgcggggcgaagcagctggtctctgccgcctgaacgccgccggaatctgcgaggcctccccgagctgcgtgcgtcgtcggataaggcagccggcacggcaatgccggttccgcttgctccgtacccagctcctccggcgccattcacgccgcccaatggggcccagagccagctcgtctgcaccgggtgccggaacctcctcatgtacccagctggtgcgacgtcggtctgctgcgccgtctgcagcaccgtcaccgccgtgccggctccaggaactgagatggcgcagctagtgtgcggaggatgccacaccctcctcatgtacatacgcggcgcgacgagcgtgcagtgttcttgctgccacactgtgaacctggctatggaaggtaaatcctgtgacttcgattcctgtacgaaagaagaagaagaagaaaaaaaaatcctgctttctgtatattgtgtggtctggaaagctcagcaaccttccaatagcattttaacgtcgtagaattggcctatcttggagtcgtaatcgttgaaattggctattatccagagagatggaaaagcttgacagggatgtcctagagtcactggactggagctgaatgaatatctcgtagagatgcttcagtgtgccgagcacagcatttactggaactttcctacaaggaaggattttagtcccatgaccatgaccacccgttgaattcatcaagttgcgaactttgtcaaaaagaaagggaaaaataaacatcacgttcagagattgtgtatttgtccagggttcagaaatcaagtgctctgctcattcctaacatctccagtgacgaacggtcttcttgttttttttcttcttcttccgtcgcagcaaatcaagtcgcgcatgtgaactgcgggaactgccgcatgctgctcatgtaccagtacggggctcggtccgtgaagtgcgcggtctgcagttttgtgacatcggttggaacctcacctggtgcagagcagaagcccagcagctgagctgatagtgtccctgaaagtgctgtgagaccacctatgaaaaggatgctttgagtgcacatgtatagagttcttccctgaagcgattctttcactttcttttcttttgttttcttttgttttcttttcttttttggttcctcctcaccatctccaccccacccgtccacttctgcgttccttcgatggatctcgcgagcccgcggaataaatgagagttttggatatatagctagggcttaacctcgtcgacttgtctgtaaaatcgaatgagacatatatataaacctatgttgttttccttgtttctgaatttctggatgcttctctggctgctctttgatctgaacaatttgtatttgtgcacggtaatcgaatgacacacacacataaggatct

SEQ ID NO: 39204 - DNA, 1770 bp, Zea Mays
tgcaaatgaccaccaacctggccttccgtgtgcacgagcactgcacgaccactgcctgcgtgcatcaccgcaggaaccagactgatgagtaatctaatgactcattgtgttgtctagggcaggcagaatattacgcacgcgtgttggagtatttttaaaggatctcacgttacatgtggaataacatcaacaaagttgggggggaaatgtcgagaggcaatttttttttggcacagagaaaaaagaagttgcaataggcggagcggagagaagctttagataccttttcggccacccatcatatactctgtctgctgttcttccctataaattcgtcgacctctccatatcacagagagatagagagagagagagatagacaggagagagagagagaggggaagagagagagagagagagagagagatagatgtggtaactcaagaactgttcttatgcatgcagcagccataagcattgctactagcgtctcctgcacgtgctgtgtcgtttccagggtttcatgcggggcgaagcagctggtctctgccgcctgaacgccgccggaatctgcgaggcctccccgagctgcgtgcgtcgtcggataaggcagccggcacggcaatgccggttccgcttgctccgtacccagctcctccggcgccattcacgccgcccaatggggcccagagccagctcgtctgcaccgggtgccggaacctcctcatgtacccagctggtgcgacgtcggtctgctgcgccgtctgcagcaccgtcaccgccgtgccggctccaggaactgagatggcgcagctagtgtgcggaggatgccacaccctcctcatgtacatacgcggcgcgacgagcgtgcagtgttcttgctgccacactgtgaacctggctatggaagagagatggaaaagcttgacagggatgtcctagagtcactggactggagctgaatgaatatctcgtagagatgcttcagtgtgccgagcacagcatttactggaactttcctacaaggaaggattttagtcccatgaccatgaccacccgttgaattcatcaagttgcgaactttgtcaaaaagaaagggaaaaataaacatcacgttcagagattgtgtatttgtccagggttcagaaatcaagtgctctgctcattcctaacatctccagtgacgaacggtcttcttgttttttttcttcttcttccgtcgcagcaaatcaagtcgcgcatgtgaactgcgggaactgccgcatgctgctcatgtaccagtacggggctcggtccgtgaagtgcgcggtctgcagttttgtgacatcggttggaacctcacctggtgcagagcagaagcccagcagctgagctgatagtgtccctgaaagtgctgtgagaccacctatgaaaaggatgctttgagtgcacatgtatagagttcttccctgaagcgattctttcactttcttttcttttgttttcttttgttttcttttcttttttggttcctcctcaccatctccaccccacccgtccacttctgcgttccttcgatggatctcgcgagcccgcggaataaatgagagttttggatatatagctagggcttaacctcgtcgacttgtctgtaaaatcgaatgagacatatatataaacctatgttgttttccttgtttctgaatttctggatgcttctctggctgctctttgatctgaacaatttgtatttgtgcacggtaatcgaatgacacacacacataaggatct

SEQ ID NO: 39205 - DNA, 2280 bp, Zea Mays
cttccgtgtgcacgagcactgcacgaccactgcctgcgtgcatcaccgcaggaaccagactgatgagtaatctaatgactcattgtgttgtctagggcaggcagaatattacgcacgcgtgttggagtatttttaaaggatctcacgttacatgtggaataacatcaacaaagttgggggggaaatgtcgagaggcaatttttttttggcacagagaaaaaagaagttgcaataggcggagcggagagaagctttagataccttttcggccacccatcatatactctgtctgctgttcttccctataaattcgtcgacctctccatatcacagagagatagagagagagagagatagacaggagagagagagagaggggaagagagagagagagagagagagagatagatgtggtaactcaagaactgttcttatgcatgcagcagccataagcattgctactagcgtctcctgcacgtgctgtgtcgtttccagggtttcatgcggggcgaagcagctggtctctgccgcctgaacgccgccggaatctgcgaggcctccccgagctgcgtgcgtcgtcggataaggcagccggcacggcaatgccggttccgcttgctccgtacccagctcctccggcgccattcacgccgcccaatggggcccagagccagctcgtctgcaccgggtgccggaacctcctcatgtacccagctggtgcgacgtcggtctgctgcgccgtctgcagcaccgtcaccgccgtgccggctccaggtacgccgtacgcgcatggcatgaatcaatatcaccttcgtcaagaacttgcgagcaaataaacacggcgccgtggagccacatttgtgtgtgcagagctagcagtgcaacactgtccctttcgtctctctgttctttttaaccagttaagaagtagcatttgctgcatccataaagttttgtttgcctttttttttgagatgaaggctttcattcgctacagagacctagctgtaggttccatgatagttcaaggggacaactttggtggtttccctctgaacctcttgcagttctggtgctgtagcagtagttggttactggcctctgaaacgtgaagctgccgcgtgaatcttctgcaggaactgagatggcgcagctagtgtgcggaggatgccacaccctcctcatgtacatacgcggcgcgacgagcgtgcagtgttcttgctgccacactgtgaacctggctatggaaggtaaatcctgtgacttcgattcctgtacgaaagaagaagaagaagaaaaaaaaatcctgctttctgtatattgtgtggtctggaaagctcagcaaccttccaatagcattttaacgtcgtagaattggcctatcttggagtcgtaatcgttgaaattggctattatccagagagatggaaaagcttgacagggatgtcctagagtcactggactggagctgaatgaatatctcgtagagatgcttcagtgtgccgagcacagcatttactggaactttcctacaaggaaggattttagtcccatgaccatgaccacccgttgaattcatcaagttgcgaactttgtcaaaaagaaagggaaaaataaacatcacgttcagagattgtgtatttgtccagggttcagaaatcaagtgctctgctcattcctaacatctccagtgacgaacggtcttcttgttttttttcttcttcttccgtcgcagcaaatcaagtcgcgcatgtgaactgcgggaactgccgcatgctgctcatgtaccagtacggggctcggtccgtgaagtgcgcggtctgcagttttgtgacatcggttggaacctcacctggtgcagagcagaagcccagcagctgagctgatagtgtccctgaaagtgctgtgagaccacctatgaaaaggatgctttgagtgcacatgtatagagttcttccctgaagcgattctttcactttcttttcttttgttttcttttgttttcttttcttttttggttcctcctcaccatctccaccccacccgtccacttctgcgttccttcgatggatctcgcgagcccgcggaataaatgagagttttggatatatagctagggcttaacctcgtcgacttgtctgtaaaatcgaatgagacatatatataaacctatgttgttttccttgtttctgaatttctggatgcttctctggctgctctttgatctgaacaatttgtatttgtgcacggtaatcgaatgacacacacacataaggatct

SEQ ID NO: 39206 - DNA, 2176 bp, Zea Mays
atgactcattgtgttgtctagggcaggcagaatattacgcacgcgtgttggagtatttttaaaggatctcacgttacatgtggaataacatcaacaaagttgggggggaaatgtcgagaggcaatttttttttggcacagagaaaaaagaagttgcaataggcggagcggagagaagctttagataccttttcggccacccatcatatactctgtctgctgttcttccctataaattcgtcgacctctccatatcacagagagatagagagagagagagatagacaggagagagagagagaggggaagagagagagagagagagagagagatagatgtggtaactcaagaactgttcttatgcatgcagcagccataagcattgctactagggtttcatgcggggcgaagcagctggtctctgccgcctgaacgccgccggaatctgcgaggcctccccgagctgcgtgcgtcgtcggataaggcagccggcacggcaatgccggttccgcttgctccgtacccagctcctccggcgccattcacgccgcccaatggggcccagagccagctcgtctgcaccgggtgccggaacctcctcatgtacccagctggtgcgacgtcggtctgctgcgccgtctgcagcaccgtcaccgccgtgccggctccaggtacgccgtacgcgcatggcatgaatcaatatcaccttcgtcaagaacttgcgagcaaataaacacggcgccgtggagccacatttgtgtgtgcagagctagcagtgcaacactgtccctttcgtctctctgttctttttaaccagttaagaagtagcatttgctgcatccataaagttttgtttgcctttttttttgagatgaaggctttcattcgctacagagacctagctgtaggttccatgatagttcaaggggacaactttggtggtttccctctgaacctcttgcagttctggtgctgtagcagtagttggttactggcctctgaaacgtgaagctgccgcgtgaatcttctgcaggaactgagatggcgcagctagtgtgcggaggatgccacaccctcctcatgtacatacgcggcgcgacgagcgtgcagtgttcttgctgccacactgtgaacctggctatggaaggtaaatcctgtgacttcgattcctgtacgaaagaagaagaagaagaaaaaaaaatcctgctttctgtatattgtgtggtctggaaagctcagcaaccttccaatagcattttaacgtcgtagaattggcctatcttggagtcgtaatcgttgaaattggctattatccagagagatggaaaagcttgacagggatgtcctagagtcactggactggagctgaatgaatatctcgtagagatgcttcagtgtgccgagcacagcatttactggaactttcctacaaggaaggattttagtcccatgaccatgaccacccgttgaattcatcaagttgcgaactttgtcaaaaagaaagggaaaaataaacatcacgttcagagattgtgtatttgtccagggttcagaaatcaagtgctctgctcattcctaacatctccagtgacgaacggtcttcttgttttttttcttcttcttccgtcgcagcaaatcaagtcgcgcatgtgaactgcgggaactgccgcatgctgctcatgtaccagtacggggctcggtccgtgaagtgcgcggtctgcagttttgtgacatcggttggaacctcacctggtgcagagcagaagcccagcagctgagctgatagtgtccctgaaagtgctgtgagaccacctatgaaaaggatgctttgagtgcacatgtatagagttcttccctgaagcgattctttcactttcttttcttttgttttcttttgttttcttttcttttttggttcctcctcaccatctccaccccacccgtccacttctgcgttccttcgatggatctcgcgagcccgcggaataaatgagagttttggatatatagctagggcttaacctcgtcgacttgtctgtaaaatcgaatgagacatatatataaacctatgttgttttccttgtttctgaatttctggatgcttctctggctgctctttgatctgaacaatttgtatttgtgcacggtaatcgaatgacacacacacataaggatct

SEQ ID NO: 39207 - DNA, 2047 bp, Zea Mays
gatagacaggagagagagagagaggggaagagagagagagagagagagagagatagatgtggtaactcaagaactgttcttatgcatgcagcagccataagcattgctactaggccaacaatggcaagtggcttccatgaacatggctgtccatgaaaaatcccccgtatgcatgctcggtctaatctcctcaagctagcgaaacgaaatttcctaaaagccggtctggtcctcgaatacagcttgttgcctgagccgctgggagtcctatggagtagtagagttcttcaccttcttctgcgcgcgattactgttagccggcttgaggagaagctggaacgatcttgacgtgcattcagagaatcgatttttccccgtctcccaaggactcctcgtccattacgtctcctgcacgtgctgtgtcgtttccagggtttcatgcggggcgaagcagctggtctctgccgcctgaacgccgccggaatctgcgaggcctccccgagctgcgtgcgtcgtcggataaggcagccggcacggcaatgccggttccgcttgctccgtacccagctcctccggcgccattcacgccgcccaatggggcccagagccagctcgtctgcaccgggtgccggaacctcctcatgtacccagctggtgcgacgtcggtctgctgcgccgtctgcagcaccgtcaccgccgtgccggctccaggtacgccgtacgcgcatggcatgaatcaatatcaccttcgtcaagaacttgcgagcaaataaacacggcgccgtggagccacatttgtgtgtgcagagctagcagtgcaacactgtccctttcgtctctctgttctttttaaccagttaagaagtagcatttgctgcatccataaagttttgtttgcctttttttttgagatgaaggctttcattcgctacagagacctagctgtaggttccatgatagttcaaggggacaactttggtggtttccctctgaacctcttgcagttctggtgctgtagcagtagttggttactggcctctgaaacgtgaagctgccgcgtgaatcttctgcaggaactgagatggcgcagctagtgtgcggaggatgccacaccctcctcatgtacatacgcggcgcgacgagcgtgcagtgttcttgctgccacactgtgaacctggctatggaagagagatggaaaagcttgacagggatgtcctagagtcactggactggagctgaatgaatatctcgtagagatgcttcagtgtgccgagcacagcatttactggaactttcctacaaggaaggattttagtcccatgaccatgaccacccgttgaattcatcaagttgcgaactttgtcaaaaagaaagggaaaaataaacatcacgttcagagattgtgtatttgtccagggttcagaaatcaagtgctctgctcattcctaacatctccagtgacgaacggtcttcttgttttttttcttcttcttccgtcgcagcaaatcaagtcgcgcatgtgaactgcgggaactgccgcatgctgctcatgtaccagtacggggctcggtccgtgaagtgcgcggtctgcagttttgtgacatcggttggaacctcacctggtgcagagcagaagcccagcagctgagctgatagtgtccctgaaagtgctgtgagaccacctatgaaaaggatgctttgagtgcacatgtatagagttcttccctgaagcgattctttcactttcttttcttttgttttcttttgttttcttttcttttttggttcctcctcaccatctccaccccacccgtccacttctgcgttccttcgatggatctcgcgagcccgcggaataaatgagagttttggatatatagctagggcttaacctcgtcgacttgtctgtaaaatcgaatgagacatatatataaacctatgttgttttccttgtttctgaatttctggatgcttctctggctgctctttgatctgaacaatttgtatttgtgcacggtaatcgaatgacacacacacataaggatct

SEQ ID NO: 39208 - DNA, 1077 bp, Zea Mays
gaaggatccagggccaatgtctcaatctcccggtacgtgatttacgtaacatggtataaaagagctaattagatccggcttattagccgccgatcctgactcctcgtcggcgccgtcgcgactccacctttgggccgctgtcgcggttcgtcggtcgccgtcgcgtctcctcgtcgggtgtcgtcgcgcctccacttttggccgccgtcgcggtcttgcctcttcactcagccgtcgtcgcggccttccacgtctgccaccggcctctactccgcgatctctggtggcgcgcgtctccaccggcggccagatttttttttctttcctccccgctcggaccgtcccgccccggctgtctctgctccgcccggttgtcttctctcaccggcgtccggacaagggcggcgccaaacgccaccacaaggttcagcgcgtcaacacgcaggctctgctccgcctggatctcgcgccccggcctctgctcagcgatctcacgctcaggcccgcaagctctgctctgtcacatcgtccagacgaggctttcttcatcctcggtcaagatccagccctctgctccgccgatggctcctgtctgcatcaagctggtcctctggatcgtcgaagcgggactgtgattgggactggccatcgccatagagatcttcctgactctatactctggactctttacgtctacctcctgtctacactgccagtgtttcatccgatgtgtccacttcatcttttgctcaatggcatcatcgtcttggccacttatgtgggtctaggttatctactctagttcataaaggatgtttaggtcataccaacattgagtcaaattttcattgtaagggttgtaagcttggtaaacaaatacaacttccatatttatctagtgcttcttactcaactcgcccttttcaacttattcattctgatgtattgggtcctgctccttttcccacaaaaggaggtcataagtactatgtcatttttatagacgatcattcgaatatacttgttttttttcatgaaacatcgttctgagctatattctatttatcagtctttcac

SEQ ID NO: 39209 - DNA, 1943 bp, Zea Mays
ctcaatctcccggtacgtgatttacgtaacatggtataaaagagctaattagatccggcttattagccgccgatcctgactcctcgtcggcgccgtcgcgactccacctttgggccgctgtcgcggttcgtcggtcgccgtcgcgtctcctcgtcgggtgtcgtcgcgcctccacttttggccgccgtcgcggtcttgcctcttcactcagccgtcgtcgcggccttccacgtctgccaccggcctctactccgcgatctctggtggcgcgcgtctccaccggcggccagatttttttttctttcctccccgctcggaccgtcccgccccggctgtctctgctccgcccggttgtcttctctcaccggcgtccggacaagggcggcgccaaacgccaccacaaggttcagcgcgtcaacacgcaggctctgctccgcctggatctcgcgccccggcctctgctcagcgatctcacgctcaggcccgcaagctctgctctgtcacatcgtccagacgaggctttcttcatcctcggtcaagatccagccctctgctccgccgatggctcctgtctgcatcaagctggtcctctggtcagtttggatactgctgggtttttccttccctacaagtttgattgaaacaaccttcagtgctagtataacatatcacacactaatacaattattatcaacatcactttgaatggtcaaaattaccatgaacggtccttctgtgtagaaactgctttgcgaggtcatggtcttgcttttcatttgattgatgatctacctgtgcctactgcaaataacattaatgcttctgaaatcaagacttagacaattaatgatggaaatgtgatggctgatattgttaacagtgtcaagccatccatgattatgagtctttcttcattcaagactgcaaaagctatgtggttttatttacagaagcgttatgttcaagatagtggtgctcttcttcatactcttatgtagaaatacatttaatagagcaacatgatctgtccattgataattattattcagcttttgatcgcctgatggatcctttaatgtctatggttccttcatgcactgctgatgattgcactgcacataagttcattgaaaaattcttcacatacagattttttatgggtctcaagacagattttgaggctattcgtaccagattgcttcatagatctgcaagtctgaccatgacagaggctttatctgatttgcttgctgaggagactcgcctctcatctatgtttgtacctcatactcatgtgtcctataaagtgttagcaacttctcacaagtatggtggaaaaggtggctactttgagccttgcaagcattgcaacaagactacacatcggtctgatcaatgttttcttaagtatccagagaagttagcggagtttcgttctcaccgtactaatcaagggcatgggccatccaagggttcagtgatcgtcgaagcgggactgtgattgggactggccatcgccatagagatcttcctgactctatactctggactctttacgtctacctcctgtctacactgccagtgtttcatccgatgtgtccacttcatcttttgctcaatggcatcatcgtcttggccacttatgtgggtctaggttatctactctagttcataaaggatgtttaggtcataccaacattgagtcaaattttcattgtaagggttgtaagcttggtaaacaaatacaacttccatatttatctagtgcttcttactcaactcgcccttttcaacttattcattctgatgtattgggtcctgctccttttcccacaaaaggaggtcataagtactatgtcatttttatagacgatcattcgaatatacttgttttttttcatgaaacatcgttctgagctatattctatttatcagtctttcac

SEQ ID NO: 39210 - DNA, 2091 bp, Zea Mays
ctcaatctcccggtacgtgatttacgtaacatggtataaaagagctaattagatccggcttattagccgccgatcctgactcctcgtcggcgccgtcgcgactccacctttgggccgctgtcgcggttcgtcggtcgccgtcgcgtctcctcgtcgggtgtcgtcgcgcctccacttttggccgccgtcgcggtcttgcctcttcactcagccgtcgtcgcggccttccacgtctgccaccggcctctactccgcgatctctggtggcgcgcgtctccaccggcggccagatttttttttctttcctccccgctcggaccgtcccgccccggctgtctctgctccgcccggttgtcttctctcaccggcgtccggacaagggcggcgccaaacgccaccacaaggttcagcgcgtcaacacgcaggctctgctccgcctggatctcgcgccccggcctctgctcagcgatctcacgctcaggcccgcaagctctgctctgtcacatcgtccagacgaggctttcttcatcctcggtcaagatccagccctctgctccgccgatggctcctgtctgcatcaagctggtcctctggtcagtttggatactgctgggtttttccttccctacaagtttgattgaaacaaccttcagtgctagtataacatatcacacactaatacaattattatcaacatcactttgaatggtcaaaattaccatgaacggtccttctgtgtagaaactgctttgcgaggtcatggtcttgcttttcatttgattgatgatctacctgtgcctactgcaaataacattaatgcttctgaaatcaagacttagacaattaatgatggaaatgtgatggctgatattgttaacagtgtcaagccatccatgattatgagtctttcttcattcaagactgcaaaagctatgtggttttatttacagaagcgttatgttcaagatagtggtgctcttcttcatactcttatgtagaaatacatttaatagagcaacatgatctgtccattgataattattattcagcttttgatcgcctgatggatcctttaatgtctatggttccttcatgcactgctgatgattgcactgcacataagttcattgaaaaattcttcacatacagattttttatgggtctcaagacagattttgaggctattcgtaccagattgcttcatagatctgcaagtctgaccatgacagaggctttatctgatttgcttgctgaggagactcgcctctcatctatgtttgtacctcatactcatgtgtcctataaagtgttagcaacttctcacaagtatggtggaaaaggtggctactttgagccttgcaagcattgcaacaagactacacatcggtctgatcaatgttttcttaagtatccagagaagttagcggagtttcgttctcaccgtactaatcaagggcatgggccatccaagggttcagtgtgagttgctgctatctctggcagtgcttctccgtccacatgggttgggttgttgattctggtgcctcatttcatgtaactttagatcaatctcagttggatacatgtgcaacagtcactaatgggtcttctgttcaaatggttgatggatcgtcgaagcgggactgtgattgggactggccatcgccatagagatcttcctgactctatactctggactctttacgtctacctcctgtctacactgccagtgtttcatccgatgtgtccacttcatcttttgctcaatggcatcatcgtcttggccacttatgtgggtctaggttatctactctagttcataaaggatgtttaggtcataccaacattgagtcaaattttcattgtaagggttgtaagcttggtaaacaaatacaacttccatatttatctagtgcttcttactcaactcgcccttttcaacttattcattctgatgtattgggtcctgctccttttcccacaaaaggaggtcataagtactatgtcatttttatagacgatcattcgaatatacttgttttttttcatgaaacatcgttctgagctatattctatttatcagtctttcac

SEQ ID NO: 39211 - DNA, 1450 bp, Zea Mays
ctcaatctcccggtacgtgatttacgtaacatggtataaaagagctaattagatccggcttattagccgccgatcctgactcctcgtcggcgccgtcgcgactccacctttgggccgctgtcgcggttcgtcggtcgccgtcgcgtctcctcgtcgggtgtcgtcgcgcctccacttttggccgccgtcgcggtcttgcctcttcactcagccgtcgtcgcggccttccacgtctgccaccggcctctactccgcgatctctggtggcgcgcgtctccaccggcggccagatttttttttctttcctccccgctcggaccgtcccgccccggctgtctctgctccgcccggttgtcttctctcaccggcgtccggacaagggcggcgccaaacgccaccacaaggttcagcgcgtcaacacgcaggctctgctccgcctggatctcgcgccccggcctctgctcagcgatctcacgctcaggcccgcaagctctgctctgtcacatcgtccagacgaggctttcttcatcctcggtcaagatccagccctctgctccgccgatggctcctgtctgcatcaagctggtcctctgattttttatgggtctcaagacagattttgaggctattcgtaccagattgcttcatagatctgcaagtctgaccatgacagaggctttatctgatttgcttgctgaggagactcgcctctcatctatgtttgtacctcatactcatgtgtcctataaagtgttagcaacttctcacaagtatggtggaaaaggtggctactttgagccttgcaagcattgcaacaagactacacatcggtctgatcaatgttttcttaagtatccagagaagttagcggagtttcgttctcaccgtactaatcaagggcatgggccatccaagggttcagtatcaatctcagttggatacatgtgcaacagtcactaatgggtcttctgttcaaatggttgatggatcgtcgaagcgggactgtgattgggactggccatcgccatagagatcttcctgactctatactctggactctttacgtctacctcctgtctacactgccagtgtttcatccgatgtgtccacttcatcttttgctcaatggcatcatcgtcttggccacttatgtgggtctaggttatctactctagttcataaaggatgtttaggtcataccaacattgagtcaaattttcattgtaagggttgtaagcttggtaaacaaatacaacttccatatttatctagtgcttcttactcaactcgcccttttcaacttattcattctgatgtattgggtcctgctccttttcccacaaaaggaggtcataagtactatgtcatttttatagacgatcattcgaatatacttgttttttttcatgaaacatcgttctgagctatattctatttatcagtctttcac

SEQ ID NO: 39212 - DNA, 1340 bp, Zea Mays
attagatccggcttattagccgccgatcctgactcctcgtcggcgccgtcgcgactccacctttgggccgctgtcgcggttcgtcggtcgccgtcgcgtctcctcgtcgggtgtcgtcgcgcctccacttttggccgccgtcgcggtcttgcctcttcactcagccgtcgtcgcggccttccacgtctgccaccggcctctactccgcgatctctggtggcgcgcgtctccaccggcggccagatttttttttctttcctccccgctcggaccgtcccgccccggctgtctctgctccgcccggttgtcttctctcaccggcgtccggacaagggcggcgccaaacgccaccacaaggttcagcgcgtcaacacgcaggctctgctccgcctggatctcgcgccccggcctctgctcagcgatctcacgctcaggcccgcaagctctgctctgtcacatcgtccagacgaggctttcttcatcctcggtcaagatccagccctctgctccgccgatggctcctgtctgcatcaagctggtcctctgattttttatgggtctcaagacagattttgaggctattcgtaccagattgcttcatagatctgcaagtctgaccatgacagaggctttatctgatttgcttgctgaggagactcgcctctcatctatgtttgtacctcatactcatgtgtcctataaagtgttagcaacttctcacaagtatggtggaaaaggtggctactttgagccttgcaagcattgcaacaagactacacatcggtctgatcaatgttttcttaagtatccagagaagttagcggagtttcgttctcaccgtactaatcaagggcatgggccatccaagggttcagtgatcgtcgaagcgggactgtgattgggactggccatcgccatagagatcttcctgactctatactctggactctttacgtctacctcctgtctacactgccagtgtttcatccgatgtgtccacttcatcttttgctcaatggcatcatcgtcttggccacttatgtgggtctaggttatctactctagttcataaaggatgtttaggtcataccaacattgagtcaaattttcattgtaagggttgtaagcttggtaaacaaatacaacttccatatttatctagtgcttcttactcaactcgcccttttcaacttattcattctgatgtattgggtcctgctccttttcccacaaaaggaggtcataagtactatgtcatttttatagacgatcattcgaatatacttgttttttttcatgaaacatcgttctgagctatattctatttatcagtctttcac

SEQ ID NO: 39213 - DNA, 217 bp, Zea Mays
atgccctcggccccggccgcccccgccccctgccccggccgcagatgcccctgccgcgcccggccacaactgcggacgcccccaccacggacgcccccgccctcggccccggtcgcccctaccgcatccggccgcccccgccgcggacacccccgccaacaagtacgccagctttgcactgggatatatgagaaatctgtgggttcctccttccagc

SEQ ID NO: 39214 - DNA, 2972 bp, Zea Mays
gcctcgtcgtccgagtcgaggagttgtcgtcgtcaggtacatcgctgacgcggacggctgaggcaaatcaaaatgcgatgtcactgttgtgcacatctgagtttgaaggccaattcacaacaaaaccctagctactgcttcgtctgccgaattccccctccgctcgcttcgcacgccgcccgtcgccgcggcggcgtctgcgattgtccctcccgctgcaaggagcacatgcttctcgccgcgccgttagcccgccgccgccaccaccggttcaccttcagctatgtcttctcaggtcgacaggcgcagccagtccgccgggaagcgcgcccgcaccgacggcagccggcgtgaggacgactgggtttgccccagctgcaagaacgtcaacttcgccttccgcaccacttgcaacatgcgcagctgcaaccagtccaggccagcagatcacacgaaggccatgcaaaccccgcctcactatcccacgtcagggggttacatgggccctgggacgccaccatcgatgtaccttggtgggggcgctcccccatatggatcctcaatgtttaatgggcctgcggtgacacgctatggtattccgcaatttcctgggggttctgcgtattcatatggatatggtggtcccataccaatggggagcccctacgggccaatgcaaattgctgggccaactccatactctggtggaactatgatgacagcaggtggaatgtatggaattcccatggacaggtatgggccaatacctgctggtcctggtccaatggtatgtgctcttgtgattattcttctgtatacctattacctcatgctaatttaactactgttgccttacatgaagaactttcaacatgtttgttgttctgttactctattacattttttgtttggtatttatgatttctgtgattgtgtctacatggattaactgttatgattccttaaatctatatttcctgaacctgaaagggcacaagggctggctcatattctgatgaaggttctcagaagaagcctgcaggagctggccgtgataatgattgggagtgtccaaattgccataacatcaactttggctttcgcacagtctgtaatatgagaaagtgcaacacacctagacctgcaaaccagggatctaagtctgatggtttaaggggctcaagtaagtttccacatgataagggtttagtgctccttcctcatccaatcttctttgcgtataacaaatgtccctgaattacaaatttttttgtaatatttgttatcactagacatttctttgaaggaattagtgtgttttctttggattttcgcacataaattatgggctactttatctaatggtctatgtagtttattgttccatcaattctgttcgaactcacaccccaacctctaattgatagaagcaaagatgccagagggcagttggaagtgtgagcagtgcaataacataaattatcctttccgaacaaaatgcaatcgtccccaatgtggagcagaaaagccatcacaaacaaacaatgtgaatggttcagcgacagatcaggacaatcagtgagtcctaggacagtaatgagggtcaagaaggtccagcgtcgtcgtcaaggttcagtctgaatgtggggtacatctctgtcagtagtcgctccagttgttacaagtttcttccccttgggaccttagtcgagttggcaatggagtcttgtcttccctaatcactacagataatggtcaagaacatcgttcttgcctttcctggctgagcttggttacttgtctttgttactacttactagtactctgggtaaagtgccatctgttatatgaatgccttttagttatctgtgtcatagaatatcactcatctgttatgaagtatcacaaccgtcatcattttgtcttggttttgttaaggctgcgttctggtcgttgtttttcgatttatggttggtttgttattttacaggtgttatttctgaaacctttctttccttccatagtagtttccttagggatgttgcaacttaatgaggagctctactgaaataattaggagaattctttccctgttaagggctagtttgttagccagggaattggaggatagcaaggggtttcctcccccataggttacctctatttcccttgtcaccaaaccagcccttaggaatagttaggtctgaagttgacagtgaacgtctcggatgcataactgcatatgctactgttattgtcttccatgttctccgggtccggggcttcagctaatagctgttcaagtatgaccgtacagtattttggttagaagagatgctccttggtgaaagtgatgtgcatctcactgtgcagtggtagtagactaatcaccctgcatgcttgtcttgattatgactgattcactgacttggtaccattggacttagtttttgccatgtaacattacgaagcttttatcaaagctacgacttctgcatgaatttcaagacagcagtgagcagacggatcttccttgtcctactgctggatcaccgacattgcggatgtcagcgctcagtgaattgcagaacagtctttcaaactgatgcgctaccatttcgtattggaaaacaaggacaagcggttcggcccagaagtgttttagtactcgagctgcatgcaggcccatttagcacgatctggctatgacttcctacatggcccagaagccgtcgtctactgatcgctccagcttcttcttccttcgtcgccgctgggctggtaacattcattcgcggaccatcctccctcgatcgaagttagcgaggccttgccactgcacctcatcgcttggccaccctctgttctccgttgcggggcggactataatttccgctacaaagtatttacatgacatttgtggcaccgtcaatgctctactcatattttcaattttttaaaattataacgat

SEQ ID NO: 39215 - DNA, 2752 bp, Zea Mays
ctgaggcaaatcaaaatgcgatgtcactgttgtgcacatctgagtttgaaggccaattcacaacaaaaccctagctactgcttcgtctgccgaattccccctccgctcgcttcgcacgccgcccgtcgccgcggcggcgtctgcgattgtccctcccgctgcaaggagcacatgcttctcgccgcgccgttagcccgccgccgccaccaccggttcaccttcagctatgtcttctcaggcagccggcgtgaggacgactgggtttgccccagctgcaagaacgtcaacttcgccttccgcaccacttgcaacatgcgcagctgcaaccagtccaggccagcagatcacacggtggaatgtatggaattcccatggacaggtatgggccaatacctgctggtcctggtccaatggtatgtgctcttgtgattattcttctgtatacctattacctcatgctaatttaactactgttgccttacatgaagaactttcaacatgtttgttgttctgttactctattacattttttgtttggtatttatgatttctgtgattgtgtctacatggattaactgttatgattccttaaatctatatttcctgaacctgaaagggcacaagggctggctcatattctgatgaaggttctcagaagaagcctgcaggagctggccgtgataatgattgggagtgtccaaattgccataacatcaactttggctttcgcacagtctgtaatatgagaaagtgcaacacacctagacctgcaaaccagggatctaagtctgatggtttaaggggctcaagtaagtttccacatgataagggtttagtgctccttcctcatccaatcttctttgcgtataacaaatgtccctgaattacaaatttttttgtaatatttgttatcactagacatttctttgaaggaattagtgtgttttctttggattttcgcacataaattatgggctactttatctaatggtctatgtagtttattgttccatcaattctgttcgaactcacaccccaacctctaattgatagaagcaaagatgccagagggcagttggaagtgtgagcagtgcaataacataaattatcctttccgaacaaaatgcaatcgtccccaatgtggagcagaaaagccatcacaaacaaacaatgtgaatggttcagcgacagatcaggacaatcaggtctgtgtttcagaaccttcagtatggtcctcaacatttgctgcacctttatttagaacattaacttgcatgcctattatatatttaatactgtttttaatcattttgttgccctcatatttgattgcatatagcttgatttatcatgttacagtgagtcctaggacagtaatgagggtcaagaaggtccagcgtcgtcgtcaaggttcagtctgaatgtggggtacatctctgtcagtagtcgctccagttgttacaagtttcttccccttgggaccttagtcgagttggcaatggagtcttgtcttccctaatcactacagataatggtcaagaacatcgttcttgcctttcctggctgagcttggttacttgtctttgttactacttactagtactctgggtaaagtgccatctgttatatgaatgccttttagttatctgtgtcatagaatatcactcatctgttatgaagtatcacaaccgtcatcattttgtcttggttttgttaaggctgcgttctggtcgttgtttttcgatttatggttggtttgttattttacaggtgttatttctgaaacctttctttccttccatagtagtttccttagggatgttgcaacttaatgaggagctctactgaaataattaggagaattctttccctgttaagggctagtttgttagccagggaattggaggatagcaaggggtttcctcccccataggttacctctatttcccttgtcaccaaaccagcccttaggaatagttaggtctgaagttgacagtgaacgtctcggatgcataactgcatatgctactgttattgtcttccatgttctccgggtccggggcttcagctaatagctgttcaagtatgaccgtacagtattttggttagaagagatgctccttggtgaaagtgatgtgcatctcactgtgcagtggtagtagactaatcaccctgcatgcttgtcttgattatgactgattcactgacttggtaccattggacttagtttttgccatgtaacattacgaagcttttatcaaagctacgacttctgcatgaatttcaagacagcagtgagcagacggatcttccttgtcctactgctggatcaccgacattgcggatgtcagcgctcagtgaattgcagaacagtctttcaaactgatgcgctaccatttcgtattggaaaacaaggacaagcggttcggcccagaagtgttttagtactcgagctgcatgcaggcccatttagcacgatctggctatgacttcctacatggcccagaagccgtcgtctactgatcgctccagcttcttcttccttcgtcgccgctgggctggtaacattcattcgcggaccatcctccctcgatcgaagttagcgaggccttgccactgcacctcatcgcttggccaccctctgttctccgttgcggggcggactataatttccgctacaaagtatttacatgacatttgtggcaccgtcaatgctctactcatattttcaattttttaaaattataacgat

SEQ ID NO: 39216 - DNA, 2465 bp, Zea Mays
ctgaggcaaatcaaaatgcgatgtcactgttgtgcacatctgagtttgaaggccaattcacaacaaaaccctagctactgcttcgtctgccgaattccccctccgctcgcttcgcacgccgcccgtcgccgcggcggcgtctgcgattgtccctcccgctgcaaggagcacatgcttctcgccgcgccgttagcccgccgccgccaccaccggttcaccttcagctatgtcttctcaggtcgacaggcgcagccagtccgccgggaagcgcgcccgcaccgacggcagccggcgtgaggacgactgggtttgccccagctgcaagaacgtcaacttcgccttccgcaccacttgcaacatgcgcagctgcaaccagtccaggccagcagatcacacggccatgcaaaccccgcctcactatcccacgtcagggggttacatgggccctgggacgccaccatcgatgtaccttggtgggggcgctcccccatatggatcctcaatgtttaatgggcctgcggtgacacgctatggtattccgcaatttcctgggggttctgcgtattcatatggatatggtggtcccataccaatggggagcccctacgggccaatgcaaattgctgggccaactccatactctggtggaactatgatgacagcaggtggaatgtatggaattcccatggacaggtatgggccaatacctgctggtcctggtccaatgggcacaagggctggctcatattctgatgaaggttctcagaagaagcctgcaggagctggccgtgataatgattgggagtgtccaaattgccataacatcaactttggctttcgcacagtctgtaatatgagaaagtgcaacacacctagacctgcaaaccagggatctaagtctgatggtttaaggggctcaaaagcaaagatgccagagggcagttggaagtgtgagcagtgcaataacataaattatcctttccgaacaaaatgcaatcgtccccaatgtggagcagaaaagccatcacaaacaaacaatgtgaatggttcagcgacagatcaggacaatcagtgagtcctaggacagtaatgagggtcaagaaggtccagcgtcgtcgtcaaggttcagtctgaatgtggggtacatctctgtcagtagtcgctccagttgttacaagtttcttccccttgggaccttagtcgagttggcaatggagtcttgtcttccctaatcactacagataatggtcaagaacatcgttcttgcctttcctggctgagcttggttacttgtctttgttactacttactagtactctgggtaaagtgccatctgttatatgaatgccttttagttatctgtgtcatagaatatcactcatctgttatgaagtatcacaaccgtcatcattttgtcttggttttgttaaggctgcgttctggtcgttgtttttcgatttatggttggtttgttattttacaggtgttatttctgaaacctttctttccttccatagtagtttccttagggatgttgcaacttaatgaggagctctactgaaataattaggagaattctttccctgttaagggctagtttgttagccagggaattggaggatagcaaggggtttcctcccccataggttacctctatttcccttgtcaccaaaccagcccttaggaatagttaggtctgaagttgacagtgaacgtctcggatgcataactgcatatgctactgttattgtcttccatgttctccgggtccggggcttcagctaatagctgttcaagtatgaccgtacagtattttggttagaagagatgctccttggtgaaagtgatgtgcatctcactgtgcagtggtagtagactaatcaccctgcatgcttgtcttgattatgactgattcactgacttggtaccattggacttagtttttgccatgtaacattacgaagcttttatcaaagctacgacttctgcatgaatttcaagacagcagtgagcagacggatcttccttgtcctactgctggatcaccgacattgcggatgtcagcgctcagtgaattgcagaacagtctttcaaactgatgcgctaccatttcgtattggaaaacaaggacaagcggttcggcccagaagtgttttagtactcgagctgcatgcaggcccatttagcacgatctggctatgacttcctacatggcccagaagccgtcgtctactgatcgctccagcttcttcttccttcgtcgccgctgggctggtaacattcattcgcggaccatcctccctcgatcgaagttagcgaggccttgccactgcacctcatcgcttggccaccctctgttctccgttgcggggcggactataatttccgctacaaagtatttacatgacatttgtggcaccgtcaatgctctactcatattttcaattttttaaaattataacgat

SEQ ID NO: 39217 - DNA, 1583 bp, Zea Mays
ctggattaaaaaccaaaaaattcggtatttgccacgggcaggcagcgagacgatggcaagcctactcaggcgatccgcggtacccgcgcgccagctcctcctcctcctcccgcgccacctcgcagccgccggctccgcccccgcctcgtcccgttcgttttcccgcttccacccccgcgacgacgatgacagctctatgttcgatccaccggagccgccggtgaactggggcatgaacatagttccggagaagaaggctttcgtcgtggagaggttcgggaagtatctcaagaccctcgactccgggttccacctgctgatccccgccgtcgaccgtattgcctacgtgcactcgctcaaggaggagaccatccccattcccgaccagaacgcaatcaccaaggacaacgtcaccatacagatcgacagcgtcatatatatcaagatcatggacccctaccttgcttcctatggtgtggaggatccaatctatgctgtcctacaacttgcacaaacaaccatgagaagtgaacttgggaagataaccttagacaagacttttgaggagagagatgcattaaatgagaaaattgtgagtgccatcaatgaagcagccacagattggggcttgaagtgtattcgctatgagatcagggacataactcctccaacagggattaggcaggctatggagatgcaggctgaagcaaaaaggagaaaacgcgcccaaatccttgaatcagaagggaagaaaactgcccaggtccttgaatctgaaggagctatgttagatctagcaaaccgtgcgaagggtgcggccgaagcaattcttgccaagtcagaagctactgctcgtggaatgagattggtttcagatgcgatgacaactgaaggcagtgccaaggctgctagcctaaaacttgcagagcaatatatcgaagcattctcaaatctagcacaaaagacaaatacaatgctgctcccaggcgacagtgccagcccagcatctttcgtggcccaggcgatgaagacgtatcagcaaatccattcccatagtcaggcattgaagtaccaccctcagatagaagggctggaggaatcaggagagaccagccctgctgctccatcttctgaggcaagcaagacaccaccatttgtcggggaagcagattctaaccataccttctcgctgcaacgcccaagaataagaagtgagcttccctcaagtgcttgaagcccttttcttgtctactgttctgcaacataggagtgtcactgataaacaccagtaggtttagttttctttagtcagagaagctgatgtgcgtcgaaggggatagacccgtaggcatttccatttggtttcgggaagctaaatgcgaccggagagagtttttgattctggtgaagtttatacgttggttccttcatatattttaaaatgaagtttgtaaaaaggcaagacgttggtgaaacaaatcgcacacgatggcaaatgcttagttcatggccactgttgctcttgttttgcgcagctcacttgggtgccgtttggttcccaaaatgtaacgtaaatggtaacg

SEQ ID NO: 39218 - DNA, 1310 bp, Zea Mays
caatggctgtagcaagctcaagaggctgcacaattcacatgcaagatcatggacccctaccttgcttcctatggtgtggaggatccaatctatgctgtcctacaacttgcacaaacaaccatgagaagtgaacttgggaagataaccttagacaagacttttgaggagagagatgcattaaatgagaaaattgtgagtgccatcaatgaagcagccacagattggggcttgaagtgtattcgctatgagatcagtgtgtcggtttttcctgtttaatcatttgagttgtaatacatggtttgtttcagatgtcaatgtttccattgtttttaaatttgacaatgcaggggacataactcctccaacagggattaggcaggctatggagatgcaggctgaagcaaaaaggagaaaacgcgcccaaatccttgaatcagaagggaagaaacaggcccaaatccttgaatcagaagggaagaaaactgcccaggtccttgaatctgaaggagctatgttagatctagcaaaccgtgcgaagggtgcggccgaagcaattcttgccaagtcagaagctactgctcgtggaatgagattggtttcagatgcgatgacaactgaaggcagtgccaaggctgctagcctaaaacttgcagagcaatatatcgaagcattctcaaatctagcacaaaagacaaatacaatgctgctcccaggcgacagtgccagcccagcatctttcgtggcccaggcgatgaagacgtatcagcaaatccattcccatagtcaggcattgaagtaccaccctcagatagaagggctggaggaatcaggagagaccagccctgctgctccatcttctgaggcaagcaagacaccaccatttgtcggggaagcagattctaaccataccttctcgctgcaacgcccaagaataagaagtgagcttccctcaagtgcttgaagcccttttcttgtctactgttctgcaacataggagtgtcactgataaacaccagtaggtttagttttctttagtcagagaagctgatgtgcgtcgaaggggatagacccgtaggcatttccatttggtttcgggaagctaaatgcgaccggagagagtttttgattctggtgaagtttatacgttggttccttcatatattttaaaatgaagtttgtaaaaaggcaagacgttggtgaaacaaatcgcacacgatggcaaatgcttagttcatggccactgttgctcttgttttgcgcagctcacttgggtgccgtttggttcccaaaatgtaacgtaaatggtaacg

SEQ ID NO: 39219 - DNA, 2395 bp, Zea Mays
cagatcctgggtactgatgacgtgactgtgtatatgcagataagtccctgatccggtccgatgatcccgagtggttcttcttcgcccccaaggaccgcaagtaccccaacggtagcaggtctaacagggccaccgaggcgggatactggaaggctactggcaaggacaggataatcaagtccaagggcgacaagcgcaagcagcataccatcggtatgaagaagaccctcgtcttccaccgcggtcgtgcccccaagggcgagcgcacggggtggattatgcacgagtaccgcaccaccgagcctgagttcgagtccggcgagcagggtggttatgttctttatcgcctcttccgtaagcaagaggagaaaactgagcgctccagcccagaggaagtggatagaagtggctactcacctactccttctcgttcttcacctgacaacctagaggcgaatgaggaagctaatacaccattaaataaggaatctccagaatctgctctgcatgaaagcccgattgagctgccaaaatctgttgaaaccaatggtggttcaatgacaaggtggctggcggacagaaatgataacttgatggttactgcaccagatgtttcccatatacctttccacggacatgctgctggtgtagctaaggttgatccttctgttggtgcttcaggccacttagttaatccccacaatggaaatgatgattataacaaatttgtgtctgatttcactcccattctaccacttgaaaatgcattcttcactgatatacaacaaggagcttttggttttgatggcatcatgaatcctcttgatccccttgatgctttcttgaatcaaacacttgttgatcctgatgaacattcatcaacaacatcaaaagttcagtatgattctgacattccaacagaatttgagaaccattggaatatgaaggttgagcctcaagatgatcaatgctggtgggcaaacataggatttgagccagacgaaccaaatcctctgcttccttgtgacaccactgaccaagacatactttctgttgactctggtgctgattccttcaatgagcttttcaatagtatggaagagactggaattattgttaggcctcaacagttggactccactgtgcaaccaaaccatgtgttcgctagccagggcaatgcagcacggaggctgcggctacaggttgagtctagggagatcataactaaagatgagagtgaagatgaagtatcatgtgttctaactccagactgtttgaacgattctgttgaggagtccactgcagagaaggatgtggcttctgatggggatgaggctgagtcaacagggattgttattagaagccatcaccctgctccaagatcaagctcagagagttcattcactcaacagggaactgctatgcaaaggctgcggctacagtcaggccttaacaaaggccagcgtcctagtactgatgattcatcaagctgcattatagacgaaccaggaagtcagcacaaagcagaaaaagcagagattgaagaggatgcgagtacaaacctcgctggaagtgctgatgatctacctggtaatatccatgatgatgagcaaaagaacatccctgaacatgaagccaaatctgttctgaggttgcggaagacttctgaggaaggcaacaaggatgtcaagcaggagagttgtctcgagccacacgtgagagcaccaatgcagaagggaggcttccaatcatacatcatctggctggttcttccggtggctctgctcctgcttctctgtgttgggacatatggatgggtatgaaatctatcctggtgcggtgcaaggcatgacattttgcgcacatgggttcctggcgtcaacctggtgtgcggtcttctgtacataacctgtggcatcctttcaacagccgtaccctgcagtaagacatcccggcattgccaaggcagctgaaaaataaataaaaaaacaagtggtagaaatgacaaggtggaaaagagcgaggtgtgttattgttggttttagtacatcgtagtcttcttttgctgttgttgtagatgtcttgctaatgttgtcgctgttgtgtagttgcaattcaagcccagggctgccagttttatttcctaatgtaatgtagcaagagcgagaccctgttagacgggtgcgctgaaattctgaacctctgtaatatctgatgttcttgtggatacctgtttcagaattttcggttcctgaacccagttactgatggcttgttgatctgttggcgtgttcgaattcgtttggacatgccacagcatggtctgaggggatacaaggactgaatgcgttggtttataattttataatgaaatactgccgttgctttgtgcacg

SEQ ID NO: 39220 - DNA, 2298 bp, Zea Mays
tgcagataagtccctgatccggtccgatgatcccgagtggttcttcttcgcccccaaggaccgcaagtaccccaacggtagcaggtctaacagggccaccgaggcgggatactggaaggctactggcaaggacaggataatcaagtccaagggcgacaagcgcaagcagcataccatcggtatgaagaagaccctcgtcttccaccgcggtcgtgcccccaagggcgagcgcacggggtggattatgcacgagtaccgcaccaccgagcctgagttcgagtccggcgagcagggtggttatgttctttatcgcctcttccgtaagcaagaggagaaaactgagcgctccagcccagaggaagtggatagaagtggctactcacctactccttctcgttcttcacctgacaacctagaggcgaatgaggaagctaatacaccattaaataaggaatctccagaatctgctctgcatgaaagcccgattgagctgccaaaatctgttgaaaccaatggtggttcaatgacaaggtggctggcggacagaaatgataacttgatggttactgcaccagatgtttcccatatacctttccacggacatgctgctggtgtagctaaggttgatccttctgttggtgcttcaggccacttagttaatccccacaatggaaatgatgattataacaaatttgtgtctgatttcactcccattctaccacttgaaaatgcattcttcactgatatacaacaaggagcttttggttttgatggcatcatgaatcctcttgatccccttgatgctttcttgaatcaaacacttgttgatcctgatgaacattcatcaacaacatcaaaagttcagtatgattctgacattccaacagaatttgagaaccattggaatatgaaggttgagcctcaagatgatcaatgctggtgggcaaacataggatttgagccagacgaaccaaatcctctgcttccttgtgacaccactgaccaagacatactttctgttgactctggtgctgattccttcaatgagcttttcaatagtatggaagagactggaattattgttaggcctcaacagttggactccactgtgcaaccaaaccatgtgttcgctagccagggcaatgcagcacggaggctgcggctacaggttgagtctagggagatcataactaaagatgagagtgaagatgaagtatcatgtgttctaactccagactgtttgaacgattctgttgaggagtccactgcagagaaggatgtggcttctgatggggatgaggctgagtcaacagggattgttattagaagccatcaccctgctccaagatcaagctcagagagttcattcactcaacagggaactgctatgcaaaggctgcggctacagtcaggccttaacaaaggccagcgtcctagtactgatgattcatcaagctgcattatagacgaaccaggaagtcagcacaaagcagaaaaagcagagattgaagaggatgcgagtacaaacctcgctggaagtgctgatgatctacctggtaatatccatgatgatgagcaaaagaacatccctgaacatggtgctgaaatgacttctccagaagccaaatctgttctgaggttgcggaagacttctgaggaaggcaacaaggatgtcaagcaggagagttgtctcgagccacacgtgagagcaccaatgcagaagggaggcttccaatcatacatcatctggctggttcttccggtggctctgctcctgcttctctgtgttgggacatatggatgggtatgaaatctatcctggtgcggtgcaaggcatgacattttgcgcacatgggttcctggcgtcaacctggtgtgcggtcttctgtacataacctgtggcatcctttcaacagccgtaccctgcagtaagacatcccggcattgccaaggcagctgaaaaataaataaaaaaacaagtggtagaaatgacaaggtggaaaagagcgagttgcaattcaagcccagggctgccagttttatttcctaatgtaatgtagcaagagcgagaccctgttagacgggtgcgctgaaattctgaacctctgtaatatctgatgttcttgtggatacctgtttcagaattttcggttcctgaacccagttactgatggcttgttgatctgttggcgtgttcgaattcgtttggacatgccacagcatggtctgaggggatacaaggactgaatgcgttggtttataattttataatgaaatactgccgttgctttgtgcacg

SEQ ID NO: 39221 - DNA, 1544 bp, Zea Mays
gaagaattcagtagaatcgattcgattcaccaaattaatagagagcaattaaaccgccatgtaattgtatcgtaagtataaccttgattgttattactcgcacatggcagagacaattcgacgcagaagaagaatttagaatccacgacatgcaagagctcgacaagacgtaccggccaccatggatcgggggcagtctaggccagccagagtgcatgatatgaagaaagaaaattaagcaaaagtacatgcatacgcgagagcagcgaggtagcagcgcaataaccagaagaagacgacgacggcgacgtacgatacgaggaccaagcaagcaaagcatgtggcagccatgccatctcatcgcggcgacggtggttcacttgatgaactcgatggcccaggcgttggcgtagatgtaggtggccttgaacccggagaagccggcgccctttgcgagctcgcggaactcgcgctcgtaccgctccttgccgccggggttgtgcgcgagcatgatcatgtcgacgtggaagacgccctgcgccttgggggtggcctccgtgttgaccggcagcacgcactcgacgacgatgaccttgccattttccggcagcgcgtcgtagcagttcttgagcagcgtggcgcagtgcgcgtcgctccagtcgtggaggatccacttcatgaggatggcgtcgccggcgggcacggacgcgaacatgtccccgcccacgtggcgcacgccggggaacggcggcgcctcggagatgacgtgcggcaggtcgaagttgaccccggagatgtgcgggtggcgggacgtgatggcgtgcagcgtggcgcccacgccgccgcccacgtccaccagcgtcgacacgccctcgaagcccgtgtagaagtccagcagcttcttggtgatgatcaccgagtggttcttcatgccctcgttgaacacgcggttgaagcgcgagtccgtgccgtggtactcgaacgccgtcatcccgtacgccttgttgaacgggatgccgccgtccagcaccgcgtccttgagatagtacctgctctccatgaggaccttgtcctggttcatgagcgcgagggcggccatggacacgccgtcctcgttgggggtgagccacttgcagacgggcgcggcggagtagcggcgctcgtaccggccgtcccggtcctccatctggcaccggacgacgtcgtaggaggcgagcaggcggagcatgcggtccaccatggccgccgcggcggcggggtcgccgggcgccgcgggcatccgcgccaccacctcctcgggcgccagcgccgccttgccgccgccggcctccttctgcagcacctccagcaggcccagctcgatggcgttcttcagcgtcatgggcaggatggacgacgacgccagctgcatcgcgtacatgcacgcctcctcgtccaccaccgcggccacgtcgccggcggtggagcccatggctattacgattagcgctgccggcctttctctgctgggctcgaggagcgcgctagctgctgatggcgtgcga

SEQ ID NO: 39222 - DNA, 2780 bp, Zea Mays
caggccacagcctctctcccctctgctcccgcggcccgcgcagcgcacagcatacagcgcaccgagctgcggccaccgcagcgaacagcaaagcacctccgactccaagtcgcgagagccttctcattcgtcttcctcctcttccacccatcctgcctgctcacttccgttccgtagtccagctagatccccgggcaaccgatccaccgagaagcttgtggttgtggcggcggcggagagggaagcgggaggtcggaggccaccgtgcgtcggaggtggacgagggagcgaggcggcgccagaccgaggttgcgtcgggctcgatttctactgggctgctgtctgctgagtttacggaagtgtttggccctagaagagttgaagataaggagtggagctaggtttaaactctggtgacttggttgttgcgtgcaacgaatcaactatgctgagtttttctgtagagtaacagaaattggatcaattcaagtagatggaggtgaattcctctggcgaggaaactgtggtaaaggtaagaaagccgtacacaataacgaagcagcgggagcggtggacagaggctgaacacaaacggttccttgaagccttgaaactttatggcagagcatggcagcgcatagaagagcatgttgggacaaagacagccgtgcagatcagaagtcacgctcaaaagttcttcactaagttggaaaaggaagctatgaacaatggtacttctccggggcaagcccatgacattgacatacctccaccacggcctaaaagaaagccaaacagtccatatcctcgaaaaagttgtctcagctccgagacacaaaccaaagaacttccaaatgacaagtcaacaaaaccaaatatgcccttgagcaatgggcatgtaaaaatggtaggcgatgcatctcttcagaattttcaaaggaaggagttgtctgaaaaaggaagtcgctcggaagttcttaatctcttccgtgatgccccatctgcatcattttcttcagttaacaaaagctcttcaaatcatggggcacccaggaggaccgaggcaagtaaaacagaaagccgagatatgtccatcatggaaaataattcttttaaccccaacacccaagaggatgtaaaggtgatcagtgatcaggaaatggaaaggcttaatggtatccagatcagatctaaatgtgaacattctcatgaggggtatttggacatctcaacgcaacaaatgaagctaatgccaaagtctgtggagacaacatatgtggatgaacaaactgcaagagcttcacacaccctagcagagagcgacgggacagctagcattccagtgactgtacctgaaggaactcatcctgatcaaacaagtgatcaagtgggaatcaatggaagcatgaacccatgcatccatccaatggtttctgctgacccaaaatttggtagtagtgccacaccacagactttccctcataattatgcggcctttgctccaatgatgcagtgcaactgtaaccaagatacgtacaggtcattcaccaacatgtcatccaccttctccagcatgcttgtttccacgttgttgtcaaaccctgccatccatgcagccgccaggctcgcagcatcatactggccagcagctgaaggtaacactcctattgatccgaatcaagaaaaccctgcagatggcgtccaaggaaggaacataggctctcctccaagcatggtttctattgtagcagctacagttgctgcagcatctgcatggtgggcaacacaaggtcttctccctttcttcgctccacccgtggcttttccatttgtaccagctcctagtgctgcctttcccacagttgatgttccacgaccttcagagaaagacagagattgcccagctgaaaatgcacagattgaatgccaagaagctcgaaaacaggtacagttcgaaggtttaagaattgctgcttcttcagagtctgatgggagtggaaaaggcgaggtgtctctccatacggagttaaagctatctcctgcccagaatgctgatgccacacctaccacaggagctggcacaaatgatgcattcaggaataagaaaaagcaggatcgctcttcatgcggttctaacacaccttcaagtagtgatgtagatgcgggcaatgttcctgaggaggacaatgctaatgagaaggcgaagcaagcctcctgcagcaactcttcagctggtgacactaaccaccgcagatttagaagcaatggaagcacaagtgattcatggaaggaagtttccgaagagggtcgtctggctttcgatgcgctgttcagtagggaaaagcttccgcaaagcttttctcccccacaagcagtagactcgaaggaggttgccaaggaggaggaagatgaagtgaccacagtggcagttgacctcaacaagaatgccacaagcattgatcatgatgacctcgacacaatggatgagcccagggcttcctttcccaatgaattgtcgcacctgaagctgaaatcgcgccgtacaggcttcaaaccatacaagagatgttctgtggaagcgaaggaaaaccgggtgccggctagcgacatggctcatgcaaaggtttatttgatcaaggtgtaggataggctgagcgagagggtgaacattatgactaatatagggcagaaaatatttgaacattgtcatgtttgctgttgctagaagattgtgtagagaaagtactcacataaatgtttcacttctattttaacttgtg

SEQ ID NO: 39223 - DNA, 3084 bp, Zea Mays
cacagcctctctcccctctgctcccgcggcccgcgcagcgcacagcatacagcgcaccgagctgcggccaccgcagcgaacagcaaagcacctccgactccaagtcgcgagagccttctcattcgtcttcctcctcttccacccatcctgcctgctcacttccgttccgtagtccagctagatccccgggcaaccgatccaccgagaagcttgtggttgtggcggcggcggagagggaagcgggaggtcggaggccaccgtgcgtcggaggtggacgagggagcgaggcggcgccagaccgaggttgcgtcgggctcgatttctactgggctgctgtctgctgagtttacggaagtgtttggccctagaagagttgaagataaggagtggagctaggtttaaactctggtgacttggttgttgcgtgcaacgaatcaactatgctgagtttttctgtagagtaacagaaattggatcaattcaagtagatggaggtgaattcctctggcgaggaaactgtggtaaaggtaagaaagccgtacacaataacgaagcagcgggagcggtggacagaggctgaacacaaacggttccttgaagccttgaaactttatggcagagcatggcagcgcatagaagagcatgttgggacaaagacagccgtgcagatcagaagtcacgctcaaaagttcttcactaagttggaaaaggaagctatgaacaatggtacttctccggggcaagcccatgacattgacatacctccaccacggcctaaaagaaagccaaacagtccatatcctcgaaaaagttgtctcagctccgagacacaaaccaaagaacttccaaatgacaagtcaacaaaaccaaatatgcccttgagcaatgggcatgtaaaaatggtaggcgatgcatctcttcagaattttcaaaggaaggagttgtctgaaaaaggaagtcgctcggaagttcttaatctcttccgtgatgccccatctgcatcattttcttcagttaacaaaagctcttcaaatcatggggcacccaggaggaccgaggcaagtaaaacagaaagccgagatatgtccatcatggaaaataattcttttaaccccaacacccaagaggatgtaaaggtgatcagtgatcaggaaatggaaaggcttaatggtatccagatcagatctaaatgtgaacattctcatgaggggtatttggacatctcaacgcaacaaatgaagctaatgccaaagtctgtggagacaacatatgtggatgaacaaactgcaagagcttcacacaccctagcagagagcgacgggacagctagcattccagtgactgtacctgaaggaactcatcctgatcaaacaagtgatcaagtgggaatcaatggaagcatgaacccatgcatccatccaatggtttctgctgacccaaaatttggtagtagtgccacaccacagactttccctcataattatgcggcctttgctccaatgatgcagtgcaactgtaaccaagatacgtacaggtcattcaccaacatgtcatccaccttctccagcatgcttgtttccacgttgttgtcaaaccctgccatccatgcagccgccaggctcgcagcatcatactggccagcagctgaaggtaacactcctattgatccgaatcaagaaaaccctgcagatggcgtccaaggaaggaacataggctctcctccaagcatggtttctattgtagcagctacagttgctgcagcatctgcatggtgggcaacacaaggtcttctccctttcttcgctccacccgtggcttttccatttgtaccagctcctagtgctgcctttcccacagttgatgttccacgaccttcagagaaagacagagattgcccagctgaaaatgcacagattgaatgccaagaagctcgaaaacaggtacagttcgaaggtttaagaattgctgcttcttcagagtctgatgggagtggaaaaggcgaggtgtctctccatacggagttaaagctatctcctgcccagaatgctgatgccacacctaccacaggagctggcacaaatgatgcattcaggaataagaaaaagcaggatcgctcttcatgcggttctaacacaccttcaagtagtgatgtagatgcgggcaatgttcctgaggaggacaatgctaatgagaaggcgaagcaagcctcctgcagcaactcttcagctggtgacactaaccaccgcagatttagaagcaatggaagcacaagtgattcatggaaggaagtttccgaagagggtcgtctggctttcgatgcgctgttcagtagggaaaagcttccgcaaagcttttctcccccacaagcagtagactcgaaggaggttgccaaggaggaggaagatgaagtgaccacagtggcagttgacctcaacaagaatgccacaagcattgatcatgatgacctcgacacaatggatgagcccagggcttcctttcccaatgaattgtcgcacctgaagctgaaatcgcgccgtacaggcttcaaaccatacaagagatgttctgtggaagcgaaggaaaaccgggtgccggctagcgacatggttggtaccaagaggattcgtcttgatagcgaagcatccacataattgatttcttcaaagttatatttacatctaagctactataggacttcagatcttgcaatgcagtgcttcattaaaactcaatctgttgtgtgctgtattttaatgcttgtcaagcagcccgctagactgctttaaaaccttatctcgtagagtctgatttaagcatcatgcaactatcaaacttttttttttggtcaaaatgtattttccttatgttttatatttttggaaaggaaaataattgaaatattatttattttgaaggctcatgcaaaggtttatttgatcaaggtgtaggataggctgagcgagagggtgaacattatgactaatatagggcagaaaatatttgaacattgtcatgtttgctgttgctagaagattgtgtagagaaagtactcacataaatgtttcacttctattttaacttgtg

SEQ ID NO: 39224 - DNA, 3305 bp, Zea Mays
ctctcccctctgctcccgcggcccgcgcagcgcacagcatacagcgcaccgagctgcggccaccgcagcgaacagcaaagcacctccgactccaagtcgcgagagccttctcattcgtcttcctcctcttccacccatcctgcctgctcacttccgttccgtagtccagctagatccccgggcaaccgatccaccgagaagcttgtggttgtggcggcggcggagagggaagcgggaggtcggaggtaggcgcggatgccactgttgtgccggcgccggcggggccggtgatgcccgcttgagctgggccaccgtgcgtcggaggtggacgagggagcgaggcggcgccagaccgaggttgcgtcgggctcgatttctactgggctgctgtctgctgagtttacggaagtgtttggccctagaagagttgaagataaggagtggagctaggtttaaactctggtgacttggttgttgcgtgcaacgaatcaactatgctgagtttttctgtagagtaacagaaattggatcaattcaagtagaggtctaggaggagatatgaggtactacttgcgtcaggtccagcgtttggttggagatatggaaggaggagctctcttgtttatagacgacctcaactccaagtgacaaagcgaacagctgttgaacgtttcccttctatttctgtttctttttgccggatttggagatggaggtgaattcctctggcgaggaaactgtggtaaaggtaagaaagccgtacacaataacgaagcagcgggagcggtggacagaggctgaacacaaacggttccttgaagccttgaaactttatggcagagcatggcagcgcatagaagagcatgttgggacaaagacagccgtgcagatcagaagtcacgctcaaaagttcttcactaagttggaaaaggaagctatgaacaatggtacttctccggggcaagcccatgacattgacatacctccaccacggcctaaaagaaagccaaacagtccatatcctcgaaaaagttgtctcagctccgagacacaaaccaaagaacttccaaatgacaagtcaacaaaaccaaatatgcccttgagcaatgggcatgtaaaaatggtaggcgatgcatctcttcagaattttcaaaggaaggagttgtctgaaaaaggaagtcgctcggaagttcttaatctcttccgtgatgccccatctgcatcattttcttcagttaacaaaagctcttcaaatcatggggcacccaggaggaccgaggcaagtaaaacagaaagccgagatatgtccatcatggaaaataattcttttaaccccaacacccaagaggatgtaaaggtgatcagtgatcaggaaatggaaaggcttaatggtatccagatcagatctaaatgtgaacattctcatgaggggtatttggacatctcaacgcaacaaatgaagctaatgccaaagtctgtggagacaacatatgtggatgaacaaactgcaagagcttcacacaccctagcagagagcgacgggacagctagcattccagtgactgtacctgaaggaactcatcctgatcaaacaagtgatcaagtgggaatcaatggaagcatgaacccatgcatccatccaatggtttctgctgacccaaaatttggtagtagtgccacaccacagactttccctcataattatgcggcctttgctccaatgatgcagtgcaactgtaaccaagatacgtacaggtcattcaccaacatgtcatccaccttctccagcatgcttgtttccacgttgttgtcaaaccctgccatccatgcagccgccaggctcgcagcatcatactggccagcagctgaaggtaacactcctattgatccgaatcaagaaaaccctgcagatggcgtccaaggaaggaacataggctctcctccaagcatggtttctattgtagcagctacagttgctgcagcatctgcatggtgggcaacacaaggtcttctccctttcttcgctccacccgtggcttttccatttgtaccagctcctagtgctgcctttcccacagttgatgttccacgaccttcagagaaagacagagattgcccagctgaaaatgcacagattgaatgccaagaagctcgaaaacaggtacagttcgaaggtttaagaattgctgcttcttcagagtctgatgggagtggaaaaggcgaggtgtctctccatacggagttaaagctatctcctgcccagaatgctgatgccacacctaccacaggagctggcacaaatgatgcattcaggaataagaaaaagcaggatcgctcttcatgcggttctaacacaccttcaagtagtgatgtagatgcgggcaatgttcctgaggaggacaatgctaatgagaaggcgaagcaagcctcctgcagcaactcttcagctggtgacactaaccaccgcagatttagaagcaatggaagcacaagtgattcatggaaggaagtttccgaagagggtcgtctggctttcgatgcgctgttcagtagggaaaagcttccgcaaagcttttctcccccacaagcagtagactcgaaggaggttgccaaggaggaggaagatgaagtgaccacagtggcagttgacctcaacaagaatgccacaagcattgatcatgatgacctcgacacaatggatgagcccagggcttcctttcccaatgaattgtcgcacctgaagctgaaatcgcgccgtacaggcttcaaaccatacaagagatgttctgtggaagcgaaggaaaaccgggtgccggctagcgacatggttggtaccaagaggattcgtcttgatagcgaagcatccacataattgatttcttcaaagttatatttacatctaagctactataggacttcagatcttgcaatgcagtgcttcattaaaactcaatctgttgtgtgctgtattttaatgcttgtcaagcagcccgctagactgctttaaaaccttatctcgtagagtctgatttaagcatcatgcaactatcaaacttttttttttggtcaaaatgtattttccttatgttttatatttttggaaaggaaaataattgaaatattatttattttgaaggctcatgcaaaggtttatttgatcaaggtgtaggataggctgagcgagagggtgaacattatgactaatatagggcagaaaatatttgaacattgtcatgtttgctgttgctagaagattgtgtagagaaagtactcacataaatgtttcacttctattttaacttgtg

SEQ ID NO: 39225 - DNA, 3087 bp, Zea Mays
agcgcaccgagctgcggccaccgcagcgaacagcaaagcacctccgactccaagtcgcgagagccttctcattcgtcttcctcctcttccacccatcctgcctgctcacttccgttccgtagtccagctagatccccgggcaaccgatccaccgagaagcttgtggttgtggcggcggcggagagggaagcgggaggtcggaggccaccgtgcgtcggaggtggacgagggagcgaggcggcgccagaccgaggttgcgtcgggctcgatttctactgggctgctgtctgctgagagtaacagaaattggatcaattcaagtagaggtctaggaggagatatgaggtactacttgcgtcaggtccagcgtttggttggagatatggaaggaggagctctcttgtttatagacgacctcaactccaagtgacaaagcgaacagctgttgaacgtttcccttctatttctgtttctttttgccggatttggagatggaggtgaattcctctggcgaggaaactgtggtaaaggtaagaaagccgtacacaataacgaagcagcgggagcggtggacagaggctgaacacaaacggttccttgaagccttgaaactttatggcagagcatggcagcgcatagaagagcatgttgggacaaagacagccgtgcagatcagaagtcacgctcaaaagttcttcactaagttggaaaaggaagctatgaacaatggtacttctccggggcaagcccatgacattgacatacctccaccacggcctaaaagaaagccaaacagtccatatcctcgaaaaagttgtctcagctccgagacacaaaccaaagaacttccaaatgacaagtcaacaaaaccaaatatgcccttgagcaatgggcatgtaaaaatggtaggcgatgcatctcttcagaattttcaaaggaaggagttgtctgaaaaaggaagtcgctcggaagttcttaatctcttccgtgatgccccatctgcatcattttcttcagttaacaaaagctcttcaaatcatggggcacccaggaggaccgaggcaagtaaaacagaaagccgagatatgtccatcatggaaaataattcttttaaccccaacacccaagaggatgtaaaggtgatcagtgatcaggaaatggaaaggcttaatggtatccagatcagatctaaatgtgaacattctcatgaggggtatttggacatctcaacgcaacaaatgaagctaatgccaaagtctgtggagacaacatatgtggatgaacaaactgcaagagcttcacacaccctagcagagagcgacgggacagctagcattccagtgactgtacctgaaggaactcatcctgatcaaacaagtgatcaagtgggaatcaatggaagcatgaacccatgcatccatccaatggtttctgctgacccaaaatttggtagtagtgccacaccacagactttccctcataattatgcggcctttgctccaatgatgcagtgcaactgtaaccaagatacgtacaggtcattcaccaacatgtcatccaccttctccagcatgcttgtttccacgttgttgtcaaaccctgccatccatgcagccgccaggctcgcagcatcatactggccagcagctgaaggtaacactcctattgatccgaatcaagaaaaccctgcagatggcgtccaaggaaggaacataggctctcctccaagcatggtttctattgtagcagctacagttgctgcagcatctgcatggtgggcaacacaaggtcttctccctttcttcgctccacccgtggcttttccatttgtaccagctcctagtgctgcctttcccacagttgatgttccacgaccttcagagaaagacagagattgcccagctgaaaatgcacagattgaatgccaagaagctcgaaaacaggtacagttcgaaggtttaagaattgctgcttcttcagagtctgatgggagtggaaaaggcgaggtgtctctccatacggagttaaagctatctcctgcccagaatgctgatgccacacctaccacaggagctggcacaaatgatgcattcaggaataagaaaaagcaggatcgctcttcatgcggttctaacacaccttcaagtagtgatgtagatgcgggcaatgttcctgaggaggacaatgctaatgagaaggcgaagcaagcctcctgcagcaactcttcagctggtgacactaaccaccgcagatttagaagcaatggaagcacaagtgattcatggaaggaagtttccgaagagggtcgtctggctttcgatgcgctgttcagtagggaaaagcttccgcaaagcttttctcccccacaagcagtagactcgaaggaggttgccaaggaggaggaagatgaagtgaccacagtggcagttgacctcaacaagaatgccacaagcattgatcatgatgacctcgacacaatggatgagcccagggcttcctttcccaatgaattgtcgcacctgaagctgaaatcgcgccgtacaggcttcaaaccatacaagagatgttctgtggaagcgaaggaaaaccgggtgccggctagcgacatggttggtaccaagaggattcgtcttgatagcgaagcatccacataattgatttcttcaaagttatatttacatctaagctactataggacttcagatcttgcaatgcagtgcttcattaaaactcaatctgttgtgtgctgtattttaatgcttgtcaagcagcccgctagactgctttaaaaccttatctcgtagagtctgatttaagcatcatgcaactatcaaacttttttttttggtcaaaatgtattttccttatgttttatatttttggaaaggaaaataattgaaatattatttattttgaaggctcatgcaaaggtttatttgatcaaggtgtaggataggctgagcgagagggtgaacattatgactaatatagggcagaaaatatttgaacattgtcatgtttgctgttgctagaagattgtgtagagaaagtactcacataaatgtttcacttctattttaacttgtg

SEQ ID NO: 39226 - DNA, 3096 bp, Zea Mays
agcgcaccgagctgcggccaccgcagcgaacagcaaagcacctccgactccaagtcgcgagagccttctcattcgtcttcctcctcttccacccatcctgcctgctcacttccgttccgtagtccagctagatccccgggcaaccgatccaccgagaagcttgtggttgtggcggcggcggagagggaagcgggaggtcggaggtaggcgcggatgccactgttgtgccggcgccggcggggccggtgatgcccgcttgagctgggccaccgtgcgtcggaggtggacgagggagcgaggcggcgccagaccgaggttgcgtcgggctcgatttctactgggctgctgtctgctgagtttacggaagtgtttggccctagaagagttgaagataaggagtggagctaggtttaaactctggtgacttggttgttgcgtgcaacgaatcaactatgctgagtttttctgtagagtaacagaaattggatcaattcaagtagaggtctaggaggagatatgagatggaggtgaattcctctggcgaggaaactgtggtaaaggtaagaaagccgtacacaataacgaagcagcgggagcggtggacagaggctgaacacaaacggttccttgaagccttgaaactttatggcagagcatggcagcgcatagaagagcatgttgggacaaagacagccgtgcagatcagaagtcacgctcaaaagttcttcactaagttggaaaaggaagctatgaacaatggtacttctccggggcaagcccatgacattgacatacctccaccacggcctaaaagaaagccaaacagtccatatcctcgaaaaagttgtctcagctccgagacacaaaccaaagaacttccaaatgacaagtcaacaaaaccaaatatgcccttgagcaatgggcatgtaaaaatgaattttcaaaggaaggagttgtctgaaaaaggaagtcgctcggaagttcttaatctcttccgtgatgccccatctgcatcattttcttcagttaacaaaagctcttcaaatcatggggcacccaggaggaccgaggcaagtaaaacagaaagccgagatatgtccatcatggaaaataattcttttaaccccaacacccaagaggatgtaaaggtgatcagtgatcaggaaatggaaaggcttaatggtatccagatcagatctaaatgtgaacattctcatgaggggtatttggacatctcaacgcaacaaatgaagctaatgccaaagtctgtggagacaacatatgtggatgaacaaactgcaagagcttcacacaccctagcagagagcgacgggacagctagcattccagtgactgtacctgaaggaactcatcctgatcaaacaagtgatcaagtgggaatcaatggaagcatgaacccatgcatccatccaatggtttctgctgacccaaaatttggtagtagtgccacaccacagactttccctcataattatgcggcctttgctccaatgatgcagtgcaactgtaaccaagatacgtacaggtcattcaccaacatgtcatccaccttctccagcatgcttgtttccacgttgttgtcaaaccctgccatccatgcagccgccaggctcgcagcatcatactggccagcagctgaaggtaacactcctattgatccgaatcaagaaaaccctgcagatggcgtccaaggaaggaacataggctctcctccaagcatggtttctattgtagcagctacagttgctgcagcatctgcatggtgggcaacacaaggtcttctccctttcttcgctccacccgtggcttttccatttgtaccagctcctagtgctgcctttcccacagttgatgttccacgaccttcagagaaagacagagattgcccagctgaaaatgcacagattgaatgccaagaagctcgaaaacaggtacagttcgaaggtttaagaattgctgcttcttcagagtctgatgggagtggaaaaggcgaggtgtctctccatacggagttaaagctatctcctgcccagaatgctgatgccacacctaccacaggagctggcacaaatgatgcattcaggaataagaaaaagcaggatcgctcttcatgcggttctaacacaccttcaagtagtgatgtagatgcgggcaatgttcctgaggaggacaatgctaatgagaaggcgaagcaagcctcctgcagcaactcttcagctggtgacactaaccaccgcagatttagaagcaatggaagcacaagtgattcatggaaggaagtttccgaagagggtcgtctggctttcgatgcgctgttcagtagggaaaagcttccgcaaagcttttctcccccacaagcagtagactcgaaggaggttgccaaggaggaggaagatgaagtgaccacagtggcagttgacctcaacaagaatgccacaagcattgatcatgatgacctcgacacaatggatgagcccagggcttcctttcccaatgaattgtcgcacctgaagctgaaatcgcgccgtacaggcttcaaaccatacaagagatgttctgtggaagcgaaggaaaaccgggtgccggctagcgacatggttggtaccaagaggattcgtcttgatagcgaagcatccacataattgatttcttcaaagttatatttacatctaagctactataggacttcagatcttgcaatgcagtgcttcattaaaactcaatctgttgtgtgctgtattttaatgcttgtcaagcagcccgctagactgctttaaaaccttatctcgtagagtctgatttaagcatcatgcaactatcaaacttttttttttggtcaaaatgtattttccttatgttttatatttttggaaaggaaaataattgaaatattatttattttgaaggctcatgcaaaggtttatttgatcaaggtgtaggataggctgagcgagagggtgaacattatgactaatatagggcagaaaatatttgaacattgtcatgtttgctgttgctagaagattgtgtagagaaagtactcacataaatgtttcacttctattttaacttgtg

SEQ ID NO: 39227 - DNA, 2756 bp, Zea Mays
gcgcaccgagctgcggccaccgcagcgaacagcaaagcacctccgactccaagtcgcgagagccttctcattcgtcttcctcctcttccacccatcctgcctgctcacttccgttccgtagtccagctagatccccgggcaaccgatccaccgagaagcttgtggttgtggcggcggcggagagggaagcgggaggtcggaggccaccgtgcgtcggaggtggacgagggagcgaggcggcgccagaccgaggttgcgtcgggctcgatttctactgggctgctgtctgctgagagtaacagaaattggatcaattcaagtagaggtctaggaggagatatgaggtactacttgcgtcaggtccagcgtttggttggagatatggaaggaggagctctcttgtttatagacgacctcaactccaagtgacaaagcgaacagctgttgaacgtttcccttctatttctgtttctttttgccggatttggagatggaggtgaattcctctggcgaggaaactgtggtaaaggtaagaaagccgtacacaataacgaagcagcgggagcggtggacagaggctgaacacaaacggttccttgaagccttgaaactttatggcagagcatggcagcgcatagaagagcatgttgggacaaagacagccgtgcagatcagaagtcacgctcaaaagttcttcactaagttggaaaaggaagctatgaacaatggtacttctccggggcaagcccatgacattgacatacctccaccacggcctaaaagaaagccaaacagtccatatcctcgaaaaagttgtctcagctccgagacacaaaccaaagaacttccaaatgacaagtcaacaaaaccaaatatgcccttgagcaatgggcatgtaaaaatgaattttcaaaggaaggagttgtctgaaaaaggaagtcgctcggaagttcttaatctcttccgtgatgccccatctgcatcattttcttcagttaacaaaagctcttcaaatcatggggcacccaggaggaccgaggcaagtaaaacagaaagccgagatatgtccatcatggaaaataattcttttaaccccaacacccaagaggatgtaaaggtgatcagtgatcaggaaatggaaaggcttaatggtatccagatcagatctaaatgtgaacattctcatgaggggtatttggacatctcaacgcaacaaatgaagctaatgccaaagtctgtggagacaacatatgtggatgaacaaactgcaagagcttcacacaccctagcagagagcgacgggacagctagcattccagtgactgtacctgaaggaactcatcctgatcaaacaagtgatcaagtgggaatcaatggaagcatgaacccatgcatccatccaatggtttctgctgacccaaaatttggtagtagtgccacaccacagactttccctcataattatgcggcctttgctccaatgatgcagtgcaactgtaaccaagatacgtacaggtcattcaccaacatgtcatccaccttctccagcatgcttgtttccacgttgttgtcaaaccctgccatccatgcagccgccaggctcgcagcatcatactggccagcagctgaaggtaacactcctattgatccgaatcaagaaaaccctgcagatggcgtccaaggaaggaacataggctctcctccaagcatggtttctattgtagcagctacagttgctgcagcatctgcatggtgggcaacacaaggtcttctccctttcttcgctccacccgtggcttttccatttgtaccagctcctagtgctgcctttcccacagttgatgttccacgaccttcagagaaagacagagattgcccagctgaaaatgcacagattgaatgccaagaagctcgaaaacaggtacagttcgaaggtttaagaattgctgcttcttcagagtctgatgggagtggaaaaggcgaggtgtctctccatacggagttaaagctatctcctgcccagaatgctgatgccacacctaccacaggagctggcacaaatgatgcattcaggaataagaaaaagcaggatcgctcttcatgcggttctaacacaccttcaagtagtgatgtagatgcgggcaatgttcctgaggaggacaatgctaatgagaaggcgaagcaagcctcctgcagcaactcttcagctggtgacactaaccaccgcagatttagaagcaatggaagcacaagtgattcatggaaggaagtttccgaagagggtcgtctggctttcgatgcgctgttcagtagggaaaagcttccgcaaagcttttctcccccacaagcagtagactcgaaggaggttgccaaggaggaggaagatgaagtgaccacagtggcagttgacctcaacaagaatgccacaagcattgatcatgatgacctcgacacaatggatgagcccagggcttcctttcccaatgaattgtcgcacctgaagctgaaatcgcgccgtacaggcttcaaaccatacaagagatgttctgtggaagcgaaggaaaaccgggtgccggctagcgacatggctcatgcaaaggtttatttgatcaaggtgtaggataggctgagcgagagggtgaacattatgactaatatagggcagaaaatatttgaacattgtcatgtttgctgttgctagaagattgtgtagagaaagtactcacataaatgtttcacttctattttaacttgtg

SEQ ID NO: 39228 - DNA, 2916 bp, Zea Mays
caccgagctgcggccaccgcagcgaacagcaaagcacctccgactccaagtcgcgagagccttctcattcgtcttcctcctcttccacccatcctgcctgctcacttccgttccgtagtccagctagatccccgggcaaccgatccaccgagaagcttgtggttgtggcggcggcggagagggaagcgggaggtcggaggccaccgtgcgtcggaggtggacgagggagcgaggcggcgccagaccgaggttgcgtcgggctcgatttctactgggctgctgtctgctgagagtaacagaaattggatcaattcaagtagatggaggtgaattcctctggcgaggaaactgtggtaaaggtaagaaagccgtacacaataacgaagcagcgggagcggtggacagaggctgaacacaaacggttccttgaagccttgaaactttatggcagagcatggcagcgcatagaagagcatgttgggacaaagacagccgtgcagatcagaagtcacgctcaaaagttcttcactaagttggaaaaggaagctatgaacaatggtacttctccggggcaagcccatgacattgacatacctccaccacggcctaaaagaaagccaaacagtccatatcctcgaaaaagttgtctcagctccgagacacaaaccaaagaacttccaaatgacaagtcaacaaaaccaaatatgcccttgagcaatgggcatgtaaaaatggtaggcgatgcatctcttcagaattttcaaaggaaggagttgtctgaaaaaggaagtcgctcggaagttcttaatctcttccgtgatgccccatctgcatcattttcttcagttaacaaaagctcttcaaatcatggggcacccaggaggaccgaggcaagtaaaacagaaagccgagatatgtccatcatggaaaataattcttttaaccccaacacccaagaggatgtaaaggtgatcagtgatcaggaaatggaaaggcttaatggtatccagatcagatctaaatgtgaacattctcatgaggggtatttggacatctcaacgcaacaaatgaagctaatgccaaagtctgtggagacaacatatgtggatgaacaaactgcaagagcttcacacaccctagcagagagcgacgggacagctagcattccagtgactgtacctgaaggaactcatcctgatcaaacaagtgatcaagtgggaatcaatggaagcatgaacccatgcatccatccaatggtttctgctgacccaaaatttggtagtagtgccacaccacagactttccctcataattatgcggcctttgctccaatgatgcagtgcaactgtaaccaagatacgtacaggtcattcaccaacatgtcatccaccttctccagcatgcttgtttccacgttgttgtcaaaccctgccatccatgcagccgccaggctcgcagcatcatactggccagcagctgaaggtaacactcctattgatccgaatcaagaaaaccctgcagatggcgtccaaggaaggaacataggctctcctccaagcatggtttctattgtagcagctacagttgctgcagcatctgcatggtgggcaacacaaggtcttctccctttcttcgctccacccgtggcttttccatttgtaccagctcctagtgctgcctttcccacagttgatgttccacgaccttcagagaaagacagagattgcccagctgaaaatgcacagattgaatgccaagaagctcgaaaacaggtacagttcgaaggtttaagaattgctgcttcttcagagtctgatgggagtggaaaaggcgaggtgtctctccatacggagttaaagctatctcctgcccagaatgctgatgccacacctaccacaggagctggcacaaatgatgcattcaggaataagaaaaagcaggatcgctcttcatgcggttctaacacaccttcaagtagtgatgtagatgcgggcaatgttcctgaggaggacaatgctaatgagaaggcgaagcaagcctcctgcagcaactcttcagctggtgacactaaccaccgcagatttagaagcaatggaagcacaagtgattcatggaaggaagtttccgaagagggtcgtctggctttcgatgcgctgttcagtagggaaaagcttccgcaaagcttttctcccccacaagcagtagactcgaaggaggttgccaaggaggaggaagatgaagtgaccacagtggcagttgacctcaacaagaatgccacaagcattgatcatgatgacctcgacacaatggatgagcccagggcttcctttcccaatgaattgtcgcacctgaagctgaaatcgcgccgtacaggcttcaaaccatacaagagatgttctgtggaagcgaaggaaaaccgggtgccggctagcgacatggttggtaccaagaggattcgtcttgatagcgaagcatccacataattgatttcttcaaagttatatttacatctaagctactataggacttcagatcttgcaatgcagtgcttcattaaaactcaatctgttgtgtgctgtattttaatgcttgtcaagcagcccgctagactgctttaaaaccttatctcgtagagtctgatttaagcatcatgcaactatcaaacttttttttttggtcaaaatgtattttccttatgttttatatttttggaaaggaaaataattgaaatattatttattttgaaggctcatgcaaaggtttatttgatcaaggtgtaggataggctgagcgagagggtgaacattatgactaatatagggcagaaaatatttgaacattgtcatgtttgctgttgctagaagattgtgtagagaaagtactcacataaatgtttcacttctattttaacttgtg

SEQ ID NO: 39229 - DNA, 3070 bp, Zea Mays
caccgagctgcggccaccgcagcgaacagcaaagcacctccgactccaagtcgcgagagccttctcattcgtcttcctcctcttccacccatcctgcctgctcacttccgttccgtagtccagctagatccccgggcaaccgatccaccgagaagcttgtggttgtggcggcggcggagagggaagcgggaggtcggaggccaccgtgcgtcggaggtggacgagggagcgaggcggcgccagaccgaggttgcgtcgggctcgatttctactgggctgctgtctgctgagtttacggaagtgtttggccctagaagagttgaagataaggagtggagctaggtttaaactctggtgacttggttgttgcgtgcaacgaatcaactatgctgagtttttctgtagagtaacagaaattggatcaattcaagtagaggtctaggaggagatatgaggtactacttgcgtcaggtccagcgtttggttggagatatggaaggaggagctctcttgtttatagacgacctcaactccaagtgacaaagcgaacagctgttgaacgtttcccttctatttctgtttctttttgccggatttggagatggaggtgaattcctctggcgaggaaactgtggtaaaggtaagaaagccgtacacaataacgaagcagcgggagcggtggacagaggctgaacacaaacggttccttgaagccttgaaactttatggcagagcatggcagcgcatagaagagcatgttgggacaaagacagccgtgcagatcagaagtcacgctcaaaagttcttcactaagttggaaaaggaagctatgaacaatggtacttctccggggcaagcccatgacattgacatacctccaccacggcctaaaagaaagccaaacagtccatatcctcgaaaaagttgtctcagctccgagacacaaaccaaagaacttccaaatgacaagtcaacaaaaccaaatatgcccttgagcaatgggcatgtaaaaatggtaggcgatgcatctcttcagaattttcaaaggaaggagttgtctgaaaaaggaagtcgctcggaagttcttaatctcttccgtgatgccccatctgcatcattttcttcagttaacaaaagctcttcaaatcatggggcacccaggaggaccgaggcaagtaaaacagaaagccgagatatgtccatcatggaaaataattcttttaaccccaacacccaagaggatgtaaaggtgatcagtgatcaggaaatggaaaggcttaatggtatccagatcagatctaaatgtgaacattctcatgaggggtatttggacatctcaacgcaacaaatgaagctaatgccaaagtctgtggagacaacatatgtggatgaacaaactgcaagagcttcacacaccctagcagagagcgacgggacagctagcattccagtgactgtacctgaaggaactcatcctgatcaaacaagtgatcaagtgggaatcaatggaagcatgaacccatgcatccatccaatggtttctgctgacccaaaatttggtagtagtgccacaccacagactttccctcataattatgcggcctttgctccaatgatgcagtgcaactgtaaccaagatacgtacaggtcattcaccaacatgtcatccaccttctccagcatgcttgtttccacgttgttgtcaaaccctgccatccatgcagccgccaggctcgcagcatcatactggccagcagctgaaggtaacactcctattgatccgaatcaagaaaaccctgcagatggcgtccaaggaaggaacataggctctcctccaagcatggtttctattgtagcagctacagttgctgcagcatctgcatggtgggcaacacaaggtcttctccctttcttcgctccacccgtggcttttccatttgtaccagctcctagtgctgcctttcccacagttgatgttccacgaccttcagagaaagacagagattgcccagctgaaaatgcacagattgaatgccaagaagctcgaaaacaggagctggcacaaatgatgcattcaggaataagaaaaagcaggatcgctcttcatgcggttctaacacaccttcaagtagtgatgtagatgcgggcaatgttcctgaggaggacaatgctaatgagaaggcgaagcaagcctcctgcagcaactcttcagctggtgacactaaccaccgcagatttagaagcaatggaagcacaagtgattcatggaaggaagtttccgaagagggtcgtctggctttcgatgcgctgttcagtagggaaaagcttccgcaaagcttttctcccccacaagcagtagactcgaaggaggttgccaaggaggaggaagatgaagtgaccacagtggcagttgacctcaacaagaatgccacaagcattgatcatgatgacctcgacacaatggatgagcccagggcttcctttcccaatgaattgtcgcacctgaagctgaaatcgcgccgtacaggcttcaaaccatacaagagatgttctgtggaagcgaaggaaaaccgggtgccggctagcgacatggttggtaccaagaggattcgtcttgatagcgaagcatccacataattgatttcttcaaagttatatttacatctaagctactataggacttcagatcttgcaatgcagtgcttcattaaaactcaatctgttgtgtgctgtattttaatgcttgtcaagcagcccgctagactgctttaaaaccttatctcgtagagtctgatttaagcatcatgcaactatcaaacttttttttttggtcaaaatgtattttccttatgttttatatttttggaaaggaaaataattgaaatattatttattttgaaggctcatgcaaaggtttatttgatcaaggtgtaggataggctgagcgagagggtgaacattatgactaatatagggcagaaaatatttgaacattgtcatgtttgctgttgctagaagattgtgtagagaaagtactcacataaatgtttcacttctattttaacttgtg

SEQ ID NO: 39230 - DNA, 3141 bp, Zea Mays
ccgagctgcggccaccgcagcgaacagcaaagcacctccgactccaagtcgcgagagccttctcattcgtcttcctcctcttccacccatcctgcctgctcacttccgttccgtagtccagctagatccccgggcaaccgatccaccgagaagcttgtggttgtggcggcggcggagagggaagcgggaggtcggaggtaggcgcggatgccactgttgtgccggcgccggcggggccggtgatgcccgcttgagctgggccaccgtgcgtcggaggtggacgagggagcgaggcggcgccagaccgaggttgcgtcgggctcgatttctactgggctgctgtctgctgagagtaacagaaattggatcaattcaagtaggtctaggaggagatatgaggtactacttgcgtcaggtccagcgtttggttggagatatggaaggaggagctctcttgtttatagacgacctcaactccaagtgacaaagcgaacagctgttgaacgtttcccttctatttctgtttctttttgccggatttggagatggaggtgaattcctctggcgaggaaactgtggtaaaggtaagaaagccgtacacaataacgaagcagcgggagcggtggacagaggctgaacacaaacggttccttgaagccttgaaactttatggcagagcatggcagcgcatagaagagcatgttgggacaaagacagccgtgcagatcagaagtcacgctcaaaagttcttcactaagttggaaaaggaagctatgaacaatggtacttctccggggcaagcccatgacattgacatacctccaccacggcctaaaagaaagccaaacagtccatatcctcgaaaaagttgtctcagctccgagacacaaaccaaagaacttccaaatgacaagtcaacaaaaccaaatatgcccttgagcaatgggcatgtaaaaatggtaggcgatgcatctcttcagaattttcaaaggaaggagttgtctgaaaaaggaagtcgctcggaagttcttaatctcttccgtgatgccccatctgcatcattttcttcagttaacaaaagctcttcaaatcatggggcacccaggaggaccgaggcaagtaaaacagaaagccgagatatgtccatcatggaaaataattcttttaaccccaacacccaagaggatgtaaaggtgatcagtgatcaggaaatggaaaggcttaatggtatccagatcagatctaaatgtgaacattctcatgaggggtatttggacatctcaacgcaacaaatgaagctaatgccaaagtctgtggagacaacatatgtggatgaacaaactgcaagagcttcacacaccctagcagagagcgacgggacagctagcattccagtgactgtacctgaaggaactcatcctgatcaaacaagtgatcaagtgggaatcaatggaagcatgaacccatgcatccatccaatggtttctgctgacccaaaatttggtagtagtgccacaccacagactttccctcataattatgcggcctttgctccaatgatgcagtgcaactgtaaccaagatacgtacaggtcattcaccaacatgtcatccaccttctccagcatgcttgtttccacgttgttgtcaaaccctgccatccatgcagccgccaggctcgcagcatcatactggccagcagctgaaggtaacactcctattgatccgaatcaagaaaaccctgcagatggcgtccaaggaaggaacataggctctcctccaagcatggtttctattgtagcagctacagttgctgcagcatctgcatggtgggcaacacaaggtcttctccctttcttcgctccacccgtggcttttccatttgtaccagctcctagtgctgcctttcccacagttgatgttccacgaccttcagagaaagacagagattgcccagctgaaaatgcacagattgaatgccaagaagctcgaaaacaggtacagttcgaaggtttaagaattgctgcttcttcagagtctgatgggagtggaaaaggcgaggtgtctctccatacggagttaaagctatctcctgcccagaatgctgatgccacacctaccacaggagctggcacaaatgatgcattcaggaataagaaaaagcaggatcgctcttcatgcggttctaacacaccttcaagtagtgatgtagatgcgggcaatgttcctgaggaggacaatgctaatgagaaggcgaagcaagcctcctgcagcaactcttcagctggtgacactaaccaccgcagatttagaagcaatggaagcacaagtgattcatggaaggaagtttccgaagagggtcgtctggctttcgatgcgctgttcagtagggaaaagcttccgcaaagcttttctcccccacaagcagtagactcgaaggaggttgccaaggaggaggaagatgaagtgaccacagtggcagttgacctcaacaagaatgccacaagcattgatcatgatgacctcgacacaatggatgagcccagggcttcctttcccaatgaattgtcgcacctgaagctgaaatcgcgccgtacaggcttcaaaccatacaagagatgttctgtggaagcgaaggaaaaccgggtgccggctagcgacatggttggtaccaagaggattcgtcttgatagcgaagcatccacataattgatttcttcaaagttatatttacatctaagctactataggacttcagatcttgcaatgcagtgcttcattaaaactcaatctgttgtgtgctgtattttaatgcttgtcaagcagcccgctagactgctttaaaaccttatctcgtagagtctgatttaagcatcatgcaactatcaaacttttttttttggtcaaaatgtattttccttatgttttatatttttggaaaggaaaataattgaaatattatttattttgaaggctcatgcaaaggtttatttgatcaaggtgtaggataggctgagcgagagggtgaacattatgactaatatagggcagaaaatatttgaacattgtcatgtttgctgttgctagaagattgtgtagagaaagtactcacataaatgtttcacttctattttaacttgtg

SEQ ID NO: 39231 - DNA, 2923 bp, Zea Mays
agcaaagcacctccgactccaagtcgcgagagccttctcattcgtcttcctcctcttccacccatcctgcctgctcacttccgttccgtagtccagctagatccccgggcaaccgatccaccgagaagcttgtggttgtggcggcggcggagagggaagcgggaggtcggaggtaggcgcggatgccactgttgtgccggcgccggcggggccggtgatgcccgcttgagctgggccaccgtgcgtcggaggtggacgagggagcgaggcggcgccagaccgaggttgcgtcgggctcgatttctactgggctgctgtctgctgagtttacggaagtgtttggccctagaagagttgaagataaggagtggagctaggtttaaactctggtgacttggttgttgcgtgcaacgaatcaactatgctgagtttttctgtagagtaacagaaattggatcaattcaagtagaggtctaggaggagatatgaggtactacttgcgtcaggtccagcgtttggttggagatatggaaggaggagctctcttgtttatagacgacctcaactccaagtgacaaagcgaacagctgttgaacgtttcccttctatttctgtttctttttgccggatttggagatggaggtgaattcctctggcgaggaaactgtggtaaaggtaagaaagccgtacacaataacgaagcagcgggagcggtggacagaggctgaacacaaacggttccttgaagccttgaaactttatggcagagcatggcagcgcatagaagagcatgttgggacaaagacagccgtgcagatcagaagtcacgctcaaaagttcttcactaagttggaaaaggaagctatgaacaatggtacttctccggggcaagcccatgacattgacatacctccaccacggcctaaaagaaagccaaacagtccatatcctcgaaaaagttgtctcagctccgagacacaaaccaaagaacttccaaatgacaagtcaacaaaaccaaatatgcccttgagcaatgggcatgtaaaaatggtaggcgatgcatctcttcagaattttcaaaggaaggagttgtctgaaaaaggaagtcgctcggaagttcttaatctcttccgtgatgccccatctgcatcattttcttcagttaacaaaagctcttcaaatcatggggcacccaggaggaccgaggcaagtaaaacagaaagccgagatatgtccatcatggaaaataattcttttaaccccaacacccaagaggatgtaaaggtgatcagtgatcaggaaatggaaaggcttaatggtatccagatcagatctaaatgtgaacattctcatgaggggtatttggacatctcaacgcaacaaatgaagctaatgccaaagtctgtggagacaacatatgtggatgaacaaactgcaagagcttcacacaccctagcagagagcgacgggacagctagcattccagtgactgtacctgaaggaactcatcctgatcaaacaagtgatcaagtgggaatcaatggaagcatgaacccatgcatccatccaatggtttctgctgacccaaaatttggtagtagtgccacaccacagactttccctcataattatgcggcctttgctccaatgatgcagtgcaactgtaaccaagatacgtacaggtcattcaccaacatgtcatccaccttctccagcatgcttgtttccacgttgttgtcaaaccctgccatccatgcagccgccaggctcgcagcatcatactggccagcagctgaaggtaacactcctattgatccgaatcaagaaaaccctgcagatggcgtccaaggaaggaacataggctctcctccaagcatggtttctattgtagcagctacagttgctgcagcatctgcatggtgggcaacacaaggtcttctccctttcttcgctccacccgtggcttttccatttgtaccagctcctagtgctgcctttcccacagttgatgttccacgaccttcagagaaagacagagattgcccagctgaaaatgcacagattgaatgccaagaagctcgaaaacaggtacagttcgaaggtttaagaattgctgcttcttcagagtctgatgggagtggaaaaggcgaggtgtctctccatacggagttaaagctatctcctgcccagaatgctgatgccacacctaccacaggagctggcacaaatgatgcattcaggaataagaaaaagcaggatcgctcttcatgcggttctaacacaccttcaagtagtgatgtagatgcgggcaatgttcctgaggaggacaatgctaatgagaaggcgaagcaagcctcctgcagcaactcttcagctggtgacactaaccaccgcagatttagaagcaatggaagcacaagtgattcatggaaggaagtttccgaagagggtcgtctggctttcgatgcgctgttcagtagggaaaagcttccgcaaagcttttctcccccacaagcagtagactcgaaggaggttgccaaggaggaggaagatgaagtgaccacagtggcagttgacctcaacaagaatgccacaagcattgatcatgatgacctcgacacaatggatgagcccagggcttcctttcccaatgaattgtcgcacctgaagctgaaatcgcgccgtacaggcttcaaaccatacaagagatgttctgtggaagcgaaggaaaaccgggtgccggctagcgacatggctcatgcaaaggtttatttgatcaaggtgtaggataggctgagcgagagggtgaacattatgactaatatagggcagaaaatatttgaacattgtcatgtttgctgttgctagaagattgtgtagagaaagtactcacataaatgtttcacttctattttaacttgtg

SEQ ID NO: 39232 - DNA, 2809 bp, Zea Mays
tacgtgcatcacccctcccatgcacctctccctgatccctcgcgggccaatgtttacggaagtgtttggccctagaagagttgaagataaggagtggagctaggtttaaactctggtgacttggttgttgcgtgcaacgaatcaactatgctgagtttttctgtagagtaacagaaattggatcaattcaagtaggtgagtgtaattgatccttttgaagattctgatcccagattaattcacgactagagttgtgaactctataggttttcttgtgtaaatttaacactaatttggctgctctttgggtctgggggcacaaatttgaaatattgggagtgctggtgtgatatagaggtctaggaggagatatgaggtactacttgcgtcaggtccagcgtttggttggagatatggaaggaggagctctcttgtttatagacgacctcaactccaagtgacaaagcgaacagctgttgaacgtttcccttctatttctgtttctttttgccggatttggagatggaggtgaattcctctggcgaggaaactgtggtaaaggtaagaaagccgtacacaataacgaagcagcgggagcggtggacagaggctgaacacaaacggttccttgaagccttgaaactttatggcagagcatggcagcgcatagaagagcatgttgggacaaagacagccgtgcagatcagaagtcacgctcaaaagttcttcactaagttggaaaaggaagctatgaacaatggtacttctccggggcaagcccatgacattgacatacctccaccacggcctaaaagaaagccaaacagtccatatcctcgaaaaagttgtctcagctccgagacacaaaccaaagaacttccaaatgacaagtcaacaaaaccaaatatgcccttgagcaatgggcatgtaaaaatggtaggcgatgcatctcttcagaattttcaaaggaaggagttgtctgaaaaaggaagtcgctcggaagttcttaatctcttccgtgatgccccatctgcatcattttcttcagttaacaaaagctcttcaaatcatggggcacccaggaggaccgaggcaagtaaaacagaaagccgagatatgtccatcatggaaaataattcttttaaccccaacacccaagaggatgtaaaggtgatcagtgatcaggaaatggaaaggcttaatggtatccagatcagatctaaatgtgaacattctcatgaggggtatttggacatctcaacgcaacaaatgaagctaatgccaaagtctgtggagacaacatatgtggatgaacaaactgcaagagcttcacacaccctagcagagagcgacgggacagctagcattccagtgactgtacctgaaggaactcatcctgatcaaacaagtgatcaagtgggaatcaatggaagcatgaacccatgcatccatccaatggtttctgctgacccaaaatttggtagtagtgccacaccacagactttccctcataattatgcggcctttgctccaatgatgcagtgcaactgtaaccaagatacgtacaggtcattcaccaacatgtcatccaccttctccagcatgcttgtttccacgttgttgtcaaaccctgccatccatgcagccgccaggctcgcagcatcatactggccagcagctgaaggtaacactcctattgatccgaatcaagaaaaccctgcagatggcgtccaaggaaggaacataggctctcctccaagcatggtttctattgtagcagctacagttgctgcagcatctgcatggtgggcaacacaaggtcttctccctttcttcgctccacccgtggcttttccatttgtaccagctcctagtgctgcctttcccacagttgatgttccacgaccttcagagaaagacagagattgcccagctgaaaatgcacagattgaatgccaagaagctcgaaaacaggtacagttcgaaggtttaagaattgctgcttcttcagagtctgatgggagtggaaaaggcgaggtgtctctccatacggagttaaagctatctcctgcccagaatgctgatgccacacctaccacaggagctggcacaaatgatgcattcaggaataagaaaaagcaggatcgctcttcatgcggttctaacacaccttcaagtagtgatgtagatgcgggcaatgttcctgaggaggacaatgctaatgagaaggcgaagcaagcctcctgcagcaactcttcagctggtgacactaaccaccgcagatttagaagcaatggaagcacaagtgattcatggaaggaagtttccgaagagggtcgtctggctttcgatgcgctgttcagtagggaaaagcttccgcaaagcttttctcccccacaagcagtagactcgaaggaggttgccaaggaggaggaagatgaagtgaccacagtggcagttgacctcaacaagaatgccacaagcattgatcatgatgacctcgacacaatggatgagcccagggcttcctttcccaatgaattgtcgcacctgaagctgaaatcgcgccgtacaggcttcaaaccatacaagagatgttctgtggaagcgaaggaaaaccgggtgccggctagcgacatggctcatgcaaaggtttatttgatcaaggtgtaggataggctgagcgagagggtgaacattatgactaatatagggcagaaaatatttgaacattgtcatgtttgctgttgctagaagattgtgtagagaaagtactcacataaatgtttcacttctattttaacttgtg

SEQ ID NO: 39233 - DNA, 2656 bp, Zea Mays
cacgactagagttgtgaactctataggttttcttgtgtaaatttaacactaatttggctgctctttgggtctgggggcacaaatttgaaatattgggagtgctggtgtgatatagaggtctaggaggagatatgaggtactacttgcgtcaggtccagcgtttggttggagatatggaaggaggagctctcttgtttatagacgacctcaactccaagtgacaaagcgaacagctgttgaacgtttcccttctatttctgtttctttttgccggatttggagatggaggtgaattcctctggcgaggaaactgtggtaaaggtaagaaagccgtacacaataacgaagcagcgggagcggtggacagaggctgaacacaaacggttccttgaagccttgaaactttatggcagagcatggcagcgcatagaagagcatgttgggacaaagacagccgtgcagatcagaagtcacgctcaaaagttcttcactaagaattttcaaaggaaggagttgtctgaaaaaggaagtcgctcggaagttcttaatctcttccgtgatgccccatctgcatcattttcttcagttaacaaaagctcttcaaatcatggggcacccaggaggaccgaggcaagtaaaacagaaagccgagatatgtccatcatggaaaataattcttttaaccccaacacccaagaggatgtaaaggtgatcagtgatcaggaaatggaaaggcttaatggtatccagatcagatctaaatgtgaacattctcatgaggggtatttggacatctcaacgcaacaaatgaagctaatgccaaagtctgtggagacaacatatgtggatgaacaaactgcaagagcttcacacaccctagcagagagcgacgggacagctagcattccagtgactgtacctgaaggaactcatcctgatcaaacaagtgatcaagtgggaatcaatggaagcatgaacccatgcatccatccaatggtttctgctgacccaaaatttggtagtagtgccacaccacagactttccctcataattatgcggcctttgctccaatgatgcagtgcaactgtaaccaagatacgtacaggtcattcaccaacatgtcatccaccttctccagcatgcttgtttccacgttgttgtcaaaccctgccatccatgcagccgccaggctcgcagcatcatactggccagcagctgaaggtaacactcctattgatccgaatcaagaaaaccctgcagatggcgtccaaggaaggaacataggctctcctccaagcatggtttctattgtagcagctacagttgctgcagcatctgcatggtgggcaacacaaggtcttctccctttcttcgctccacccgtggcttttccatttgtaccagctcctagtgctgcctttcccacagttgatgttccacgaccttcagagaaagacagagattgcccagctgaaaatgcacagattgaatgccaagaagctcgaaaacaggtacagttcgaaggtttaagaattgctgcttcttcagagtctgatgggagtggaaaaggcgaggtgtctctccatacggagttaaagctatctcctgcccagaatgctgatgccacacctaccacaggagctggcacaaatgatgcattcaggaataagaaaaagcaggatcgctcttcatgcggttctaacacaccttcaagtagtgatgtagatgcgggcaatgttcctgaggaggacaatgctaatgagaaggcgaagcaagcctcctgcagcaactcttcagctggtgacactaaccaccgcagatttagaagcaatggaagcacaagtgattcatggaaggaagtttccgaagagggtcgtctggctttcgatgcgctgttcagtagggaaaagcttccgcaaagcttttctcccccacaagcagtagactcgaaggaggttgccaaggaggaggaagatgaagtgaccacagtggcagttgacctcaacaagaatgccacaagcattgatcatgatgacctcgacacaatggatgagcccagggcttcctttcccaatgaattgtcgcacctgaagctgaaatcgcgccgtacaggcttcaaaccatacaagagatgttctgtggaagcgaaggaaaaccgggtgccggctagcgacatggttggtaccaagaggattcgtcttgatagcgaagcatccacataattgatttcttcaaagttatatttacatctaagctactataggacttcagatcttgcaatgcagtgcttcattaaaactcaatctgttgtgtgctgtattttaatgcttgtcaagcagcccgctagactgctttaaaaccttatctcgtagagtctgatttaagcatcatgcaactatcaaacttttttttttggtcaaaatgtattttccttatgttttatatttttggaaaggaaaataattgaaatattatttattttgaaggctcatgcaaaggtttatttgatcaaggtgtaggataggctgagcgagagggtgaacattatgactaatatagggcagaaaatatttgaacattgtcatgtttgctgttgctagaagattgtgtagagaaagtactcacataaatgtttcacttctattttaacttgtg

SEQ ID NO: 39234 - DNA, 1427 bp, Zea Mays
gggagggtgcaatgaagcagtggtggctgattcagtgatccagtgttgaaattggcaatctaaagaagaatcttcagaccctgctgaactctgcatatgtgattaagttggcatatgaataagtgttagtagggatgtattagagatgggcttgggagtttctggcagagtggaaccaaatgaagatgtctaagttaagaagggattcaaagctatgtatggtgaagcttttttatccgtttggttcctgctcacttcattggatcaagttcaatgtactgctgtgttttatcgtgaagagtggagatatggatgaagtatagagtttaggtgctgaaggcctctcactactgaaaaatatcaagttttggttccattaatgcctgcacgctttggttctctgggaaaaatctcattttccttatcctcaagcagccgatggacatctccgcatgccacctgcacacctgctccaccacgtgcctccctctccttgatcttatagcagccgctgctcttggacgatctcactccccataggtcacctccttcctctcccttaccccttccacgcctgactctccaaacgtgatctcaaaatccaggagctgagctcctcccgtgcgtctccttccgaccccgtccttcattcaagctgctgaagccgtctcgcatccgagcccctcttccatggtcgtcgtcctctgctttccttgctcggcctccaccccgtcagttcgtctcgtcatcaccttgctactgcatccggtgtggagcgatttgtgtgtgtcgataaagcaagcgaagtcccgcaacgtccgccaggtgttcgacaaaaataaaaaaatgagccaggtgttgtcgccgcgttcacggatttctaattgacttgagtacgttagtgatcacgtgatgcggaggacgagagccgagtcgacctcaaggtgatgcaaagggtggattactccgagagatgatgtcaacggaccaagttcgagatggatggatatatcgagtacccagatgagagatgaccgacaagcaaatctcgtctaacaaacactgacttaatagtgtttaatcccaggcaagccccggtgcatttgccccttccttgtgttttaaatgctttatcaccttaaatgatgcattaggtgataggagttgtgtgatgaacaattgacgcattaccattccttgggatttgaatactaaaccttgatccctgatttataaaaaaagaactgataatgcttaaccctgcttagaaactgaaaaatcatttgttttcaaaaagaatgattgtggaacattggttatgggctttttattcaaaaatcaaagcaaactaaggtgatgactccacttcggccggagtgggctcgtcattggaaaagagtacccctgtcgggtgccaaaaatgggga

SEQ ID NO: 39235 - DNA, 1898 bp, Zea Mays
gggagggtgcaatgaagcagtggtggctgattcagtgatccagtgttgaaattggcaatctaaagaagaatcttcagaccctgctgaactctgcatatgtgattaagttggcatatgaataagtgttagtagggatgtattagagatgggcttgggagtttctggcagagtggaaccaaatgaagatgtctaagttaagaagggattcaaagctatgtatggtgaagcttttttatccgtttggttcctgctcacttcattggatcaagttcaatgtactgctgtgttttatcgtgaagagtggagatatggatgaagtatagagtttaggtgctgaaggcctctcactactgaaaaatatcaagttttggttccattaatgcctgcacgctttggttctctgggaaaaatctcattttccttatcctcaagcagccgatggacatctccgcatgccacctgcacacctgctccaccacgtgcctccctctccttgatcttatagcagccgctgctcttggacgatctcactccccataggtcacctccttcctctcccttaccccttccacgcctgactctccaaacgtgatctcaaaatccaggagctgagctcctcccgtgcgtctccttccgaccccgtccttcattcaagctgctgaagccgtctcgcatccgagcccctcttccatggtcgtcgtcctctgctttccttgctcggcctccaccccgtcaggtttgtgccagacgtgccgctcctccatctccccaagcagccatgccttcccagcccatctcactgctcatccccaagtgcacttcggccatcatcctccggcgggcgccgccatgggctcgcctcacccagctccttgctcgtcgtgttggccgcctagtcgttgccatcgctgctttggccttcctctggtgctcggcttccctatctgcacacaacaccgcgcccagcacgcccacttggcaaattcctgttcgcctcttctccaaactcatcggccatgctctttcctcgccgtggcgctctggtggtccgcaccacctagctctgtgtcatctgtcgttgtctccatcctcgctgtgccaccagcgcctactcggagcttcagcttgtcccctgcacaggccatgcccctactctgctacagctttgcgtgatcgagcagcacgccctaaaacctgcatagccctgttcgtctcgtcatcaccttgctactgcatccggtgtggagcgatttgtgtgtgtcgataaagcaagcgaagtcccgcaacgtccgccaggtgttcgacaaaaataaaaaaatgagccaggtgttgtcgccgcgttcacggatttctaattgacttgagtacgttagtgatcacgtgatgcggaggacgagagccgagtcgacctcaaggtgatgcaaagggtggattactccgagagatgatgtcaacggaccaagttcgagatggatggatatatcgagtacccagatgagagatgaccgacaagcaaatctcgtctaacaaacactgacttaatagtgtttaatcccaggcaagccccggtgcatttgccccttccttgtgttttaaatgctttatcaccttaaatgatgcattaggtgataggagttgtgtgatgaacaattgacgcattaccattccttgggatttgaatactaaaccttgatccctgatttataaaaaaagaactgataatgcttaaccctgcttagaaactgaaaaatcatttgttttcaaaaagaatgattgtggaacattggttatgggctttttattcaaaaatcaaagcaaactaaggtgatgactccacttcggccggagtgggctcgtcattggaaaagagtacccctgtcgggtgccaaaaatgggga

SEQ ID NO: 39236 - DNA, 1252 bp, Zea Mays
aatgaagatgtctaagttaagaagggattcaaagctatgtatggtgaagcttttttatccgtttggttcctgctcacttcattggatcaagttcaatgtactgctgtgttttatcgtgaagagtggagatatggatgaagtatagagtttaggtgctgaaggcctctcactactgaaaaatatcaagttttggttccattaatgcctgcacgctttggttctctgggaaaaatctcattttccttatcctcaagcagccgatggacatctccgcatgccacctgcacacctgctccaccacgtgcctccctctccttgatcttatagcagccgctgctcttggacgatctcactccccataggtcacctccttcctctcccttaccccttccacgcctgactctccaaacgtgatctcaaaatccaggagctgagctcctcccgtgcgtctccttccgaccccgtccttcattcaagctgctgaagccgtctcgcatccgagcccctcttccatggtcgtcgtcctctgctttccttgctcggcctccaccccgtcagttcgtctcgtcatcaccttgctactgcatccggtgtggagcgatttgtgtgtgtcgataaagcaagcgaagtcccgcaacgtccgccaggtgttcgacaaaaataaaaaaatgagccaggtgttgtcgccgcgttcacggatttctaattgacttggtaagtacgttagtgatcacgtgatgcggaggacgagagccgagtcgacctcaaggtgatgcaaagggtggattactccgagagatgatgtcaacggaccaagttcgagatggatggatatatcgagtacccagatgagagatgaccgacaagcaaatctcgtctaacaaacactgacttaatagtgtttaatcccaggcaagccccggtgcatttgccccttccttgtgttttaaatgctttatcaccttaaatgatgcattaggtgataggagttgtgtgatgaacaattgacgcattaccattccttgggatttgaatactaaaccttgatccctgatttataaaaaaagaactgataatgcttaaccctgcttagaaactgaaaaatcatttgttttcaaaaagaatgattgtggaacattggttatgggctttttattcaaaaatcaaagcaaactaaggtgatgactccacttcggccggagtgggctcgtcattggaaaagagtacccctgtcgggtgccaaaaatgggga

SEQ ID NO: 39237 - DNA, 2949 bp, Zea Mays
attcatccaaacctcgacgaaaaagccaggcagaatcacgaggtatcgtgaaattcccatcgccctcctgctcctcgccaaatcgacgagacgccgacgagagatccgactacctcgcgctccgacacgccaacgcgtagatctggtagaataggtggcggtgggctcggacgtgcagtggtagtctcttctgcagtggcagcggcggaggagacgggggagcgagcagtcgccgcggcgtgggtctgttgtgtgctgggactcgggttccgtgaaaccctagacgccgcgggatggcgtcgtataggccgtacgcgccgccgccgcagcatccgccgccgccgccgccaccaccgcagggcggctatccgccgcagatgaattcgtacgcgccgccgccgcagcaggcgccgtacagcaggatgccggcgccgacataccacgcggggcctccgccaccaccgccaccggggccgccgccacctcaccaaccgcagttcaatttcggtcccgggcctccgcagcagctcccgcccccgcccccaccgcagatgtactaccagccgccgccaccgccctacggcgggaacagtaatccgcctcctccaccttcggcgccacccccgcctccgtccccaccccctgcggcatcgcccccgcccctccgcctccggcacagccaccgtctgcccatgccctgctgcccccaaaggggccacagcctaaggcaacgctgctgagagcggagacggaagaggagcgtcgtgcgcggaagaagcgcgagtttgagaagcagcgggtggacgaccgcaagcagcaccagatgatgcgccagacacaagccaccattctgcagaagacacagcaggttcgcactgctcagcagcagccgcagagccgccaccaccaccaccaccctccgggtggctctcgggcaggggcaactgggtctcgcccagcaacagcggttaatgctgagaggtttgagaaccggctaaaaaaaccaacaacgttcctctgcaagcacaaatttaggaatgaactcccggatccaagtgctcagctgaaatggctgcccctgaataaggataaggaccgatataccaaatacaggataacttcattggagaaaaactatattcctaaaatgattgtccctgaggatattgggatacctcttgacctacttgacatgagtgtatacaaccccccggatgttcagccgcccatggctcctgaagatgaagaactattgcgtgatgatcaggtcctcacccctattaaacaagaaggtacaaggaaaagggagaggcccactgacaaaggtgtttcttggttggtcaaaacacaatacatatctccactaagtgctgatgcagccaaaacgtcccttactgagaagcaagcaaaggaaaggcgggaatcaagggggggtcgcaatgctttcctagacaatcttaatgatagagagaaacagatcaaagccattgaagaatcctttagagcagccaagtcaaggcctgttcaccagactaaacgtgggatgcaagctgagtgggttatgcctttgctacctgattttgataggtacgaggagccgtttgttatggtgaattttgatggcgatccaactgctgattctgagcagtacaacaaacttgagagacccgtacgtgatgaatgtgaatctcgggccgtgatgaaaagttttagtgtaagtggttcagacccttcaaaacaagagaagtttttggcatacatggccccagcaccccatgagcttaccagagacttggatgatgaaaacgatgacatccagtattcctggctaagagaatatcactgggaagtaagaggagatgataaagacgatcctacaacataccttgtcacatttgataagaaggatggtgcaaaatatttggtaattagtgatgtgcattctgtattatagcacctccagttcctgggttcgatccccatcgaggacgaatttctggcttggttaaaaaaaatctcctcgctgtgccccgcccgctcccaggttacgtccttctcgcgaccctctggctgggccgttgcagagtgggcggtgacggcccgctagtgatgggggctagggttcagggattttctcggccgggaccatgtttcggtctcttcttaatataataccaggaggacggtctttccctcttcggacgagtattacatttggtttctgtgaatggttcatttcacattagtgtaacatatgtcatgatctttatttcagcctcttcctaccaagctagttttgcagaagaaaaaggcaaaggaggggaggtctggagatgaaatcgaacattttccagtaccttcccgtatcactgtgagtaaaacagctcatggtggtaccatggagcgcggagaatcttctggcatgcatgcgaattcaaagccacgaagatctcatgttgatgatgatcttgatgagcatccaaagcgtactcgggtagaagatattgaccaatatagtgaagaatattctgagtgatgaactgataaatcataattatcttgcaccaacgaatttgatcagtacatgtgaagccgtcaaggcataagtggttttatggtgcatggtgatgcagtgaaagagaatacctggcagtgggaggacatcatggcttggccagtttcttaagggcagagtatgtgaagcaaagctgagtgtaaccagacttcaagactttgatctctgtagtgatcatagaaagtatcacattgttgtaaagaagttttgcctttaaagtcttggagcggttctcaactgtttgttttgataatatatagaccccccattttgcaaatttcttcccgcttttctttcccaatcgactgtgcaagtacagaaatttgtttacattattaggatgggcaggtcatattatgctagacacatctttt

SEQ ID NO: 39238 - DNA, 1962 bp, Zea Mays
attcatccaaacctcgacgaaaaagccaggcagaatcacgagatttaggaatgaactcccggatccaagtgctcagctgaaatggctgcccctgaataaggataaggaccgatataccaaatacaggataacttcattggagaaaaactatattcctaaaatgattgtccctgaggatattgggatacctcttgacctacttgacatgagtgtatacaaccccccggatgttcagccgcccatggctcctgaagatgaagaactattgcgtgatgatcaggtcctcacccctattaaacaagaaggtacaaggaaaagggagaggcccactgacaaaggtgtttcttggttggtcaaaacacaatacatatctccactaagtgctgatgcagccaaaacgtcccttactgagaagcaagcaaaggaaaggcgggaatcaagggggggtcgcaatgctttcctagacaatcttaatgatagagagaaacagatcaaagccattgaagaatcctttagagcagccaagtcaaggcctgttcaccagactaaacgtgggatgcaagctgagtgggttatgcctttgctacctgattttgataggtacgaggagccgtttgttatggtgaattttgatggcgatccaactgctgattctgagcagtacaacaaacttgagagacccgtacgtgatgaatgtgaatctcgggccgtgatgaaaagttttagtgtaagtggttcagacccttcaaaacaagagaagtttttggcatacatggccccagcaccccatgagcttaccagagacttggatgatgaaaacgatgacatccagtattcctggctaagagaatatcactgggaagtaagaggagatgataaagacgatcctacaacataccttgtcacatttgataagaaggatggtgcaaaatatttggtaattagtgatgtgcattctgtattatagcacctccagttcctgggttcgatccccatcgaggacgaatttctggcttggttaaaaaaaatctcctcgctgtgccccgcccgctcccaggttacgtccttctcgcgaccctctggctgggccgttgcagagtgggcggtgacggcccgctagtgatgggggctagggttcagggattttctcggccgggaccatgtttcggtctcttcttaatataataccaggaggacggtctttccctcttcggacgagtattacatttggtttctgtgaatggttcatttcacattagtgtaacatatgtcatgatctttatttcagcctcttcctaccaagctagttttgcagaagaaaaaggcaaaggaggggaggtctggagatgaaatcgaacattttccagtaccttcccgtatcactgtgagtaaaacagctcatggtggtaccatggagcgcggagaatcttctggcatgcatgcgaattcaaagccacgaagatctcatgttgatgatgatcttgatgagcatccaaagcgtactcgggtagaagatattgaccaatatagtgaagaatattctgagtgatgaactgataaatcataattatcttgcaccaacgaatttgatcagtacatgtgaagccgtcaaggcataagtggttttatggtgcatggtgatgcagtgaaagagaatacctggcagtgggaggacatcatggcttggccagtttcttaagggcagagtatgtgaagcaaagctgagtgtaaccagacttcaagactttgatctctgtagtgatcatagaaagtatcacattgttgtaaagaagttttgcctttaaagtcttggagcggttctcaactgtttgttttgataatatatagaccccccattttgcaaatttcttcccgcttttctttcccaatcgactgtgcaagtacagaaatttgtttacattattaggatgggcaggtcatattatgctagacacatctttt

SEQ ID NO: 39239 - DNA, 2626 bp, Zea Mays
attcatccaaacctcgacgaaaaagccaggcagaatcacgaggtatcgtgaaattcccatcgccctcctgctcctcgccaaatcgacgagacgccgacgagagatccgactacctcgcgctccgacacgccaacgcgtagatctggtagaataggtggcggtgggctcggacgtgcagtggtagtctcttctgcagtggcagcggcggaggagacgggggagcgagcagtcgccgcggcgtgggtctgttgtgtgctgggactcgggttccgtgaaaccctagacgccgcgggatggcgtcgtataggccgtacgcgccgccgccgcagcatccgccgccgccgccgccaccaccgcagggcggctatccgccgcagatgaattcgtacgcgccgccgccgcagcaggcgccgtacagcaggatgccggcgccgacataccacgcggggcctccgccaccaccgccaccggggccgccgccacctcaccaaccgcagttcaatttcggtcccgggcctccgcagcagctcccgcccccgcccccaccgcagatgtactaccagccgccgccaccgccctacggcgggaacagtaatccgcctcctccaccttcggcgccacccccgcctccgtccccaccccctgcggcatcgcccccgcccctccgcctccggcacagccaccgtctgcccatgccctgctgcccccaaaggggccacagcctaaggcaacgctgctgagagcggagacggaagaggagcgtcgtgcgcggaagaagcgcgagtttgagaagcagcgggtggacgaccgcaagcagcaccagatgatgcgccagacacaagccaccattctgcagaagacacagcaggttcgcactgctcagcagcagccgcagagccgccaccaccaccaccaccctccgggtggctctcgggcaggggcaactgggtctcgcccagcaacagcggttaatgctgagaggtttgagaaccggctaaaaaaaccaacaacgttcctctgcaagcacaaatttaggaatgaactcccggatccaagtgctcagctgaaatggctgcccctgaataaggataaggaccgatataccaaatacaggataacttcattggagaaaaactatattcctaaaatgattgtccctgaggatattgggatacctcttgacctacttgacatgagtgtatacaaccccccggatgttcagccgcccatggctcctgaagatgaagaactattgcgtgatgatcaggtcctcacccctattaaacaagaaggtacaaggaaaagggagaggcccactgacaaaggtgtttcttggttggtcaaaacacaatacatatctccactaagtgctgatgcagccaaaacgactgaataaaagttgtctggctttccagtcccttactgagaagcaagcaaaggaaaggcgggaatcaagggggggtcgcaatgctttcctagacaatcttaatgatagagagaaacagatcaaagccattgaagaatcctttagagcagccaagtcaaggcctgttcaccagactaaacgtgggatgcaagctgagtgggttatgcctttgctacctgattttgataggtacgaggagccgtttgttatggtgaattttgatggcgatccaactgctgattctgagcagtacaacaaacttgagagacccgtacgtgatgaatgtgaatctcgggccgtgatgaaaagttttagtgtaagtggttcagacccttcaaaacaagagaagtttttggcatacatggccccagcaccccatgagcttaccagagacttggatgatgaaaacgatgacatccagtattcctggctaagagaatatcactgggaagtaagaggagatgataaagacgatcctacaacataccttgtcacatttgataagaaggatggtgcaaaatatttgcctcttcctaccaagctagttttgcagaagaaaaaggcaaaggaggggaggtctggagatgaaatcgaacattttccagtaccttcccgtatcactgtgagtaaaacagctcatggtggtaccatggagcgcggagaatcttctggcatgcatgcgaattcaaagccacgaagatctcatgttgatgatgatcttgatgagcatccaaagcgtactcgggtagaagatattgaccaatatagtgaagaatattctgagtgatgaactgataaatcataattatcttgcaccaacgaatttgatcagtacatgtgaagccgtcaaggcataagtggttttatggtgcatggtgatgcagtgaaagagaatacctggcagtgggaggacatcatggcttggccagtttcttaagggcagagtatgtgaagcaaagctgagtgtaaccagacttcaagactttgatctctgtagtgatcatagaaagtatcacattgttgtaaagaagttttgcctttaaagtcttggagcggttctcaactgtttgttttgataatatatagaccccccattttgcaaatttcttcccgcttttctttcccaatcgactgtgcaagtacagaaatttgtttacattattaggatgggcaggtcatattatgctagacacatctttt

SEQ ID NO: 39240 - DNA, 3327 bp, Zea Mays
attcatccaaacctcgacgaaaaagccaggcagaatcacgaggtatcgtgaaattcccatcgccctcctgctcctcgccaaatcgacgagacgccgacgagagatccgactacctcgcgctccgacacgccaacgcgtagatctggtagaataggtggcggtgggctcggacgtgcagtggtagtctcttctgcagtggcagcggcggaggagacgggggagcgagcagtcgccgcggcgtgggtctgttgtgtgctgggactcgggttccgtgaaaccctagacgccgcgggatggcgtcgtataggccgtacgcgccgccgccgcagcatccgccgccgccgccgccaccaccgcagggcggctatccgccgcagatgaattcgtacgcgccgccgccgcagcaggcgccgtacagcaggatgccggcgccgacataccacgcggggcctccgccaccaccgccaccggggccgccgccacctcaccaaccgcagttcaatttcggtcccgggcctccgcagcagctcccgcccccgcccccaccgcagatgtactaccagccgccgccaccgccctacggcgggaacagtaatccgcctcctccaccttcggcgccacccccgcctccgtccccaccccctgcggcatcgcccccgcccctccgcctccggcacagccaccgtctgcccatgccctgctgcccccaaaggggccacagcctaaggcaacgctgctgagagcggagacggaagaggagcgtcgtgcgcggaagaagcgcgagtttgagaagcagcgggtggacgaccgcaagcagcaccagatgatgcgccagacacaagccaccattctgcagaagacacagcaggttcgcactgctcagcagcagccgcagagccgccaccaccaccaccaccctccgggtggctctcgggcaggggcaactgggtctcgcccagcaacagcggttaatgctgagaggtttgagaaccggctaaaaaaaccaacaacgttcctctgcaagcacaaatttaggaatgaactcccggatccaagtgctcagctgaaatggctgcccctgaataaggataaggaccgatataccaaatacaggataacttcattggagaaaaactatattcctaaaatgattgtccctgaggatattgggatacctcttgacctacttgacatgagtgtatacaaccccccggatgttcagccgcccatggctcctgaagatgaagaactattgcgtgatgatcaggtcctcacccctattaaacaagaaggtacaaggaaaagggagaggcccactgacaaaggtgtttcttggttggtcaaaacacaatacatatctccactaagtgctgatgcagccaaaacgtcccttactgagaagcaagcaaaggaaaggcgggaatcaagggggggtcgcaatgctttcctagacaatcttaatgatagagagaaacagatcaaagccattgaagaatcctttagagcagccaagtcaaggcctgttcaccagactaaacgtgggatgcaagctgagtgggttatgcctttgctacctgattttgataggtacgaggagccgtttgttatggtgaattttgatggcgatccaactgctgattctgagcagtacaacaaacttgagagacccgtacgtgatgaatgtgaatctcgggccgtgatgaaaagttttagtgtaagtggttcagacccttcaaaacaagagaagtttttggcatacatggccccagcaccccatgagcttaccagagacttggatgatgaaaacgatgacatccagtattcctggctaagagaatatcactgggaagtaagaggagatgataaagacgatcctacaacataccttgtcacatttgataagaaggatggtgcaaaatatttgcctcttcctaccaagctagttttgcagaagaaaaaggcaaaggaggggaggtctggagatgaaatcgaacattttccagtaccttcccgtatcactgtgagtaaaacagctcatggtggtaccatggagcgcggagaatcttctggcatgcatgcgaattcaaagccacgaagatctcatgttgatgatgatcttgatgagcatccaaagcgtactcgggtagaagatattgaccaatatagtgaagaatattctgagtgatgaactgataaatcataattatcttgcaccaacgaatttgatcagtacatgtgaagccgtcaaggcataagtggttttatggtgcatggtgatgcagtgaaagagaatacctggcagtgggaggacatcatggcttggccagtttcttaagggcagagtatgtgaagcaaagctgagtgtaaccagacttcaagactttgatctctgtagtgatcatagaaagtatcacattgttgtaaagaagttttgcctttaaagtcttggagcggttctcaactgtttgttttgataatatatagaccccccattttgcaaatttcttcccgcttttctttcccaatcgactgtgcaagtacagaaatttgtttacattattaggatgggcaggtcatattatgctagacacatcttttttggcagccctgagggcctgctaatcgaaggtcatatgtttatgcacttgaacatccagtgaaaattagggtagcatgacgaggagtaaattgcagctggtggacacgttccaggatagtcaatggttgcctgatagcctctggaattatattcattttcaacattaattgttttattattaacattactttttgtctaaaatattgcagaagtatatgagatgataggagggtaaccatgaaacagtttgtggtccctacgtttcaattttattccagcacaaagtggcaatgatatgatggctgcattggtctggtattattaattcatgacaatattttagtagcagtaataacagcaaaatttcttcaggcttaggctgacatgcaggagatgatattttgtttccattgctgtgtgctgtatttgccttagctttggcacttaaatattgcatagttactgttgtcatcttaagtagtctggaggaccatttctttgctggcacccaggtattcttttatccataatccatttcctaatgtttcgtctagtagtttttatgtttgataattttcatctgatgttaggtttggtcgagttttatggatgctaagatatggttcctctcgaatgacagcataattgtgcaatcatttggggcttcatgtctgatgtgtgttgtttacatcataactcctggactgttgcatggaataatattgtag

SEQ ID NO: 39241 - DNA, 957 bp, Zea Mays
gcatcatgtatgcctggatccatccatgtcatatttatcagccagggctcaggccgtgatgaaaagttttagtgtaagtggttcagacccttcaaaacaagagaagtttttggcatacatggccccagcaccccatgagcttaccagagacttggatgatgaaaacgatgacatccagtattcctggctaagagaatatcactgggaagtaagaggagatgataaagacgatcctacaacataccttgtcacatttgataagaaggatggtgcaaaatatttgcctcttcctaccaagctagttttgcagaagaaaaaggcaaaggaggggaggtctggagatgaaatcgaacattttccagtaccttcccgtatcactgtgagtaaaacagctcatggtggtaccatggagcgcggagaatcttctggcatgcatgcgaattcaaagccacgaagatctcatgttgatgatgatcttgatgagcatccaaagcgtactcgggtagaagatattgaccaatatagtgaagaatattctgagtgatgaactgataaatcataattatcttgcaccaacgaatttgatcagtacatgtgaagccgtcaaggcataagtggttttatggtgcatggtgatgcagtgaaagagaatacctggcagtgggaggacatcatggcttggccagtttcttaagggcagagtatgtgaagcaaagctgagtgtaaccagacttcaagactttgatctctgtagtgatcatagaaagtatcacattgttgtaaagaagttttgcctttaaagtcttggagcggttctcaactgtttgttttgataatatatagaccccccattttgcaaatttcttcccgcttttctttcccaatcgactgtgcaagtacagaaatttgtttacattattaggatgggcaggtcatattatgctagacacatctttt

SEQ ID NO: 39242 - DNA, 1281 bp, Zea Mays
gtcatatttatcagccagggctcaggccgtgatgaaaagttttagtgtaagtggttcagacccttcaaaacaagagaagtttttggcatacatggccccagcaccccatgagcttaccagagacttggatgatgaaaacgatgacatccagtattcctggctaagagaatatcactgggaagtaagaggagatgataaagacgatcctacaacataccttgtcacatttgataagaaggatggtgcaaaatatttggtaattagtgatgtgcattctgtattatagcacctccagttcctgggttcgatccccatcgaggacgaatttctggcttggttaaaaaaaatctcctcgctgtgccccgcccgctcccaggttacgtccttctcgcgaccctctggctgggccgttgcagagtgggcggtgacggcccgctagtgatgggggctagggttcagggattttctcggccgggaccatgtttcggtctcttcttaatataataccaggaggacggtctttccctcttcggacgagtattacatttggtttctgtgaatggttcatttcacattagtgtaacatatgtcatgatctttatttcagcctcttcctaccaagctagttttgcagaagaaaaaggcaaaggaggggaggtctggagatgaaatcgaacattttccagtaccttcccgtatcactgtgagtaaaacagctcatggtggtaccatggagcgcggagaatcttctggcatgcatgcgaattcaaagccacgaagatctcatgttgatgatgatcttgatgagcatccaaagcgtactcgggtagaagatattgaccaatatagtgaagaatattctgagtgatgaactgataaatcataattatcttgcaccaacgaatttgatcagtacatgtgaagccgtcaaggcataagtggttttatggtgcatggtgatgcagtgaaagagaatacctggcagtgggaggacatcatggcttggccagtttcttaagggcagagtatgtgaagcaaagctgagtgtaaccagacttcaagactttgatctctgtagtgatcatagaaagtatcacattgttgtaaagaagttttgcctttaaagtcttggagcggttctcaactgtttgttttgataatatatagaccccccattttgcaaatttcttcccgcttttctttcccaatcgactgtgcaagtacagaaatttgtttacattattaggatgggcaggtcatattatgctagacacatctttt

SEQ ID NO: 39243 - DNA, 1252 bp, Zea Mays
gtttgattgcacgctggcaccaaatgagtgattgcacgggatatatcaccacttatgtaatgtaacagtgcaagtttgcatccaaattctttatgataatgttgacaatatttggtgataggtgtatttatgccctacatatttgctgtcatgatacaggttcatcttgcatcgactgagccagacatttccgaatatgccgattttcgcattagtggattggaacccagcagggcttgctatactgtgcacttacaaatacggaagcatatcaatgggcctagagtcatacagatatgcttgcaacgtgaaatggctcggggtgagaggaggtgatctgcatcttatccccgaggacgcgtttcaagagctgaagccacgtgatctgcagattgccaaaagcttgatgtcgtcaaagttcctgcaggagagtcacagagctgagctggcgctgatggtggagaggggcaagcgtgcagacatcgaagccctctactcccacgggttcgatttcttggggaagtacatcgcgagaaagatcgtgcagggcgattacatctgacgattggccgctggaatgttagcatggttgcacggaacaatgagctgcatggactgtagtacagtagctatgtccaactgcctgtagactgaaacgatggtctgtatgggaatgtacataaatacaacaagagtagtctaatatcgatcatcatcggccaccgaatcacatgggttttgactctcttgagttctgatgttcagtggcggtgcccggtgtatggtccggcactccggccgatgcagcctgtggatggcaggaccgggaatggatgcagggtgtagggtgtcagtatactacgcaccttgccggcgatcacctccgccatgcctaacctttgccctggcttcatcttcgccgttgcagcctgcttgaggtttgagaggtttcactgcaagtgcagccgtgcaggtacacctgagcgaagatcttgggcactcagcactctggtgtgccccatcggggcaatgtgcgtgagcttcctcaagaacccccgcccaggcggcgaagaaggcaggcacgactggatactgtcttctggccggggtcacgatctgtcatgcagatggtgtacacgactacccaactacaagtggcgttatttgttcaatcaacaggcacaggcaccggcaccctagggatagcgaccagcagcagctcagagcgtgggggcatggtgatcccagccgc

SEQ ID NO: 39244 - DNA, 1126 bp, Zea Mays
tttgcatccaaattctttatgataatgttgacaatatttggtgataggtgtatttatgccctacatatttgctgtcatgatacaggttcatcttgcatcgactgagccagacatttccgaatatgccgattttcgcattagtggattggaacccagcagggcttgctatactgtgcacttacaaatacggaagcatatcaatgggcctagagtcatacagatatgcttgcaacgtgaaatggctcggggtgagaggaggtgatctgcatcttatccccgaggacgcgtttcaagagctgaagccacgtgatctgcagattgccaaaagcttgatgtcgtcaaagttcctgcaggagagtcacagagctgagctggcgctgatggtggagaggggcaagcgtgcagacatcgaagccctctactcccacgggttcgatttcttggggaagtacatcgcgagaaagatcgtgcagggcgattacatctgacgattggccgctggaatgttagcatggttgcacggaacaatgagctgcatggactgtagtacagtagctatgtccaactgcctgtagactgaaacgatggtctgtatgggaatgtacataaatacaacaagagtagtctaatatcgatcatcatcggccaccgaatcacatgggttttgactctcttgagttctgatgttcagtggcggtgcccggtgtatggtccggcactccggccgatgcagcctgtggatggcaggaccgggaatggatgcagggtgtagggtgtcagtatactacgcaccttgccggcgatcacctccgccatgcctaacctttgccctggcttcatcttcgccgttgcagcctgcttgaggtttgagaggtttcactgcaagtgcagccgtgcaggtacacctgagcgaagatcttgggcactcagcactctggtgtgccccatcggggcaatgtgcgtgagcttcctcaagaacccccgcccaggcggcgaagaaggcaggcacgactggatactgtcttctggccggggtcacgatctgtcatgcaggcacaggcaccggcaccctagggatagcgaccagcagcagctcagagcgtgggggcatggtgatcccagccgc

SEQ ID NO: 39245 - DNA, 1182 bp, Zea Mays
tttgcatccaaattctttatgataatgttgacaatatttggtgataggtgtatttatgccctacatatttgctgtcatgatacaggttcatcttgcatcgactgagccagacatttccgaatatgccgattttcgcattagtggattggaacccagcagggcttgctatactgtgcacttacaaatacggaagcatatcaatgggcctagagtcatacagatatgcttgcaacgtgaaatggctcggggtgagaggaggtgatctgcatcttatccccgaggacgcgtttcaagagctgaagccacgtgatctgcagattgccaaaagcttgatgtcgtcaaagttcctgcaggagagtcacagagctgagctggcgctgatggtggagaggggcaagcgtgcagacatcgaagccctctactcccacgggttcgatttcttggggaagtacatcgcgagaaagatcgtgcagggcgattacatctgacgattggccgctggaatgttagcatggttgcacggaacaatgagctgcatggactgtagtacagtagctatgtccaactgcctgtagactgaaacgatggtctgtatgggaatgtacataaatacaacaagagtagtctaatatcgatcatcatcggccaccgaatcacatgggttttgactctcttgagttctgatgttcagtggcggtgcccggtgtatggtccggcactccggccgatgcagcctgtggatggcaggaccgggaatggatgcagggtgtagggtgtcagtatactacgcaccttgccggcgatcacctccgccatgcctaacctttgccctggcttcatcttcgccgttgcagcctgcttgagttaggtttgagaggtttcactgcaagtgcagccgtgcaggtacacctgagcgaagatcttgggcactcagcactctggtgtgccccatcggggcaatgtgcgtgagcttcctcaagaacccccgcccaggcggcgaagaaggcaggcacgactggatactgtcttctggccggggtcacgatctgtcatgcagatggtgtacacgactacccaactacaagtggcgttatttgttcaatcaacaggcacaggcaccggcaccctagggatagcgaccagcagcagctcagagcgtgggggcatggtgatcccagccgc

SEQ ID NO: 39246 - DNA, 1151 bp, Zea Mays
tttgcatccaaattctttatgataatgttgacaatatttggtgataggtgtatttatgccctacatatttgctgtcatgatacaggttcatcttgcatcgactgagccagacatttccgaatatgccgattttcgcattagtggattggaacccagcagggcttgctatactgtgcacttacaaatacggaagcatatcaatgggcctagagtcatacagatatgcttgcaacgtgaaatggctcggggtgagaggaggtgatctgcatcttatccccgaggacgcgtttcaagagctgaagccacgtgatctgcagattgccaaaagcttgatgtcgtcaaagttcctgcaggagagtcacagagctgagctggcgctgatggtggagaggggcaagcgtgcagacatcgaagccctctactcccacgggttcgatttcttggggaagtacatcgcgagaaagatcgtgcagggcgattacatctgacgattggccgctggaatgttagcatggttgcacggaacaatgagctgcatggactgtagtacagtagctatgtccaactgcctgtagactgaaacgatggtctgtatgggaatgtacataaatacaacaagagtagtctaatatcgatcatcatcggccaccgaatcacatgggttttgactctcttgagttctgatgttcagtggcggtgcccggtgtatggtccggcactccggccgatgcagcctgtggatggcaggaccgggaatggatgcagggtgtagggtgtcagtatactacgcaccttgccggcgatcacctccgccatgcctaacctttgccctggcttcatcttcgccgttgcagcctgcttgagccgtgcaggtacacctgagcgaagatcttgggcactcagcactctggtgtgccccatcggggcaatgtgcgtgagcttcctcaagaacccccgcccaggcggcgaagaaggcaggcacgactggatactgtcttctggccggggtcacgatctgtcatgcagatggtgtacacgactacccaactacaagtggcgttatttgttcaatcaacaggcacaggcaccggcaccctagggatagcgaccagcagcagctcagagcgtgggggcatggtgatcccagccgc

SEQ ID NO: 39247 - DNA, 1143 bp, Zea Mays
tttgcatccaaattctttatgataatgttgacaatatttggtgataggtgtatttatgccctacatatttgctgtcatgatacaggttcatcttgcatcgactgagccagacatttccgaatatgccgattttcgcattagtggattggaacccagcagggcttgctatactgtgcacttacaaatacggaagcatatcaatgggcctagagtcatacagatatgcttgcaacgtgaaatggctcggggtgagaggaggtgatctgcatcttatccccgaggacgcgtttcaagagctgaagccacgtgatctgcagattgccaaaagcttgatgtcgtcaaagttcctgcaggagagtcacagagctgagctggcgctgatggtggagaggggcaagcgtgcagacatcgaagccctctactcccacgggttcgatttcttggggaagtacatcgcgagaaagatcgtgcagggcgattacatctgacgattggccgctggaatgttagcatggttgcacggaacaatgagctgcatggactgtagtacagtagctatgtccaactgcctgtagactgaaacgatggtctgtatgggaatgtacataaatacaacaagagtagtctaatatcgatcatcatcggccaccgaatcacatgggttttgactctcttgagttctgatgttcagtggcggtgcccggtgtatggtccggcactccggccgatgcagcctgtggatggcaggaccgggaatggatgcagggtgtagggtgtcagtatactacgcaccttgccggcgatcacctccgccatgcctaacctttgccctggcttcatcttcgccgttgcagcctgcttgaggtacacctgagcgaagatcttgggcactcagcactctggtgtgccccatcggggcaatgtgcgtgagcttcctcaagaacccccgcccaggcggcgaagaaggcaggcacgactggatactgtcttctggccggggtcacgatctgtcatgcagatggtgtacacgactacccaactacaagtggcgttatttgttcaatcaacaggcacaggcaccggcaccctagggatagcgaccagcagcagctcagagcgtgggggcatggtgatcccagccgc

SEQ ID NO: 39248 - DNA, 983 bp, Zea Mays
tacaggttcatcttgcatcgactgagccagacatttccgaatatgccgattttcgcattagtggattggaacccagcagggcttgctatactgtgcacttacaaatacggaagcatatcaatgggcctagagtcatacagatatgcttgcaacgtgaaatggctcggggtgagaggaggtgatctgcatcttatccccgaggacgcgtttcaagagctgaagccacgtgatctgcagattgccaaaagcttgatgtcgtcaaagttcctgcagagctgagctggcgctgatggtggagaggggcaagcgtgcagacatcgaagccctctactcccacgggttcgatttcttggggaagtacatcgcgagaaagatcgtgcagggcgattacatctgacgattggccgctggaatgttagcatggttgcacggaacaatgagctgcatggactgtagtacagtagctatgtccaactgcctgtagactgaaacgatgtggcggtgcccggtgtatggtccggcactccggccgatgcagcctgtggatggcaggaccgggaatggatgcagggtgtagggtgtcagtatactacgcaccttgccggcgatcacctccgccatgcctaacctttgccctggcttcatcttcgccgttgcagcctgcttgaggtttgagaggtttcactgcaagtgcagccgtgcaggtacacctgagcgaagatcttgggcactcagcactctggtgtgccccatcggggcaatgtgcgtgagcttcctcaagaacccccgcccaggcggcgaagaaggcaggcacgactggatactgtcttctggccggggtcacgatctgtcatgcagatggtgtacacgactacccaactacaagtggcgttatttgttcaatcaacaggcacaggcaccggcaccctagggatagcgaccagcagcagctcagagcgtgggggcatggtgatcccagccgc

SEQ ID NO: 39249 - DNA, 1155 bp, Zea Mays
aagtagggagagaacggatatctgccattacgaagccaaccctggaaaaccagggccattaatactactcccacccgtcgtctatctcctcctcaaccaccgccccgagatctccccttctctctcctcgcgccgttttcctctctacctctttgatccggcaatggccgcgcccgcccctgccaccaccggcgacctcctacgcgtcgaccccctcgagctacgcttccccttcgagttgaagaagcagatctcgtgctccatgcagctgtcgaatcacaccgacgactacatcgccttcaaggtgaaaactacaagtccaaagaagtattcggtgcgacccaacactggggttgtcttgccacggtctacctgtgatgttgttgttacgatgcaagcacagcgggaagccccgcctgacatgcagtgcaaggataagttcctagtccaaagcgtcgttgcccctgctggtataactgtgaaggatgtcactggggatatgtttacgaaggagtctgggtataagatggaagaggtcaaattgcgagtgacctatgttgctcctccacagccaccctctccagttccagaggaatctgaagaaggttctccacctagggcttctgaatcagaaaacggagatggaccttctggaggattcaccagagcactaagagagcgcattgagcctcaagacaaatctacagaggctggagctttggtttccaagttgactgaagagaagaattccgcgattcaacagaatcatagacttagacaggaacttgacttggtgaggcaggagatcagcaagaggcgtggagggggcttctccttcatcgtcgtcataattgttgctctgatcggcgccatcctcggctacctgatgaagtcgtaattctttcaggctgtcctctgctggccataccagaggcagtcgtgcaagttgtgtttgggaagaactcgaaaaaaaaactgttgaaaccagatgtcctgagatcatccttcatattttgtcgatataggagtgggtacgtgaggaatgctgggccagtgtttaagcttttcttttccttgttgtttctccgttggatgggcattgcggacgctgtaacttgaaagttgcatcaattgcttctgtttcataaaaaaaat

SEQ ID NO: 39250 - DNA, 1756 bp, Zea Mays
atgtcgcgtgtgcgccacatcttcttggctgggtgcctgggttggagattttgcaaggggcggatttacgaccagggctgcctaggctgcagccccggtcgtggcccaataacgcgagaaggtattcatccgcagcctagcttcgctagtcgctacggggtacatcgcgctaccctagtccagtgtccagccgccgccgagcacatccagacgccacacgccagagccgctcaggctcagccgcagacctgcagcgcagcgcagttggcagttgccgtcttgccgacttgccggccgccgcacgccgccaccgcccaggccgccagcgccaggcgcgtcttccgcgcggtcttctggcgagctgagcaggccgccaccgcccaggcccgaccgacgactgctggcgagctgagcaggctgcaggcgagccgcgagcaggcagagcagagcagagcggtgagcactaagcagcgattagcagagcatagcagcgagcagccggaataagatggataaatttctcatcaagaaccagaagaaagatgattctatttctaaaacaattaggacaaatgagagccgtgtagaacaaaagagaccacatattgagctagatatgaacaaaagtggcaactgcaactgttgagagagttttttctgctatgaacattatcaagactgaaagaagaaataaaatgggtgatgaatggatgaataacagcatgctatgctatattgagcgggatatgtttgtagaaattgaagatgaaaagattttgaagcattttcaaggcttaagaactcggaagataaattaacctcgcagcatcaactcatgaacgtgactgctcctaggatcggaaacacaggcgagacgagggggggcgctgcatgccctgcatgccctgggtgatcgaggtctgtcgtctgcaatcgccgtcgatggcgggcgaactaaagcaaacgagagccctgggcccctgcccaacgaggcttttacattgccgaccggctgcgtttgcctggcgacggaacgcacgaacctagtaaagcaaaggaggaaagcgaggagcaggagagagactacggatcggatgcgtcagccgcgcaccggtggtcctttcctgcctgcccggcccctttcctttccgagagtggcggttgctcgatccccccgaacccgcccgcccgttttccatccacgagcagcccatgctttcagaggccgccggcccatgcgtgcatgatggacgtgggccgtaaaaacgggcatgctagcctttggtccagaccaagccaactgaactgcatgcactctcacacaacacaatgctagactgctagttgttgttggtacgagcaaatggttctggcttgttcttggtattgactaacacatgtacgtctagatacacaacagagaccatttatctattacaagactttgaatggcttagagcttggaaacgagtgtagctctacagtaatcttgatttattcattgatttaattagtttgggacgagggtaactttaccgtaatcttttcttattattatttcttaatccacatctcaagcaactcgtagtagtagtacatggtaaatcgaggaaacccactgcgagaaataactacatatactgtaagcagcgcaagcatacatatatacagacactcctatacaggtaaaaaaatactgtacgtaacgtaacgtaacgtaacgtaactaactaattcgcagcatgcatccaccgtc

SEQ ID NO: 39251 - DNA, 1752 bp, Zea Mays
atgtcgcgtgtgcgccacatcttcttggctgggtgcctgggttggagattttgcaaggggcggatttacgaccagggctgcctaggctgcagccccggtcgtggcccaataacgcgagaaggtattcatccgcagcctagcttcgctagtcgctacggggtacatcgcgctaccctagtccagtgtccagccgccgccgagcacatccagacgccacacgccagagccgctcaggctcagccgcagacctgcagcgcagcgcagttggcagttgccgtcttgccgacttgccggccgccgcacgccgccaccgcccaggccgccagcgccaggcgcgtcttccgcgcggtcttctggcgagctgagcaggccgccaccgcccaggcccgaccgacgactgctggcgagctgagcaggctgcaggcgagccgcgagcaggcagagcagagcagagcggtgagcactaagcagcgattagcagagcatagcagcgagcagccggaataagatggataaatttctcatcaagaaccagaagaaagatgattctatttctaaaacaattaggacaaatgagagccgtgtagaacaaaagagaccacatattgagctagatatgaacaaaagtggcaactgcaactgttgagagagttttttctgctatgaacattatcaagactgaaagaagaaataaaatgggtgatgaatggatgaataacagcatgctatgctatattgagcgggatatgtttgtagaaattgaagatgaaaagattttgaagcattttcaaggcttaagaactcggaagataaattaacctcgcagcatcaactcatgaacgtgactgctcctaggatcggaaacacaggcgagacgagggggggcgctgcatgccctgcatgccctgggtgatcgaggtcgtctgcaatcgccgtcgatggcgggcgaactaaagcaaacgagagccctgggcccctgcccaacgaggcttttacattgccgaccggctgcgtttgcctggcgacggaacgcacgaacctagtaaagcaaaggaggaaagcgaggagcaggagagagactacggatcggatgcgtcagccgcgcaccggtggtcctttcctgcctgcccggcccctttcctttccgagagtggcggttgctcgatccccccgaacccgcccgcccgttttccatccacgagcagcccatgctttcagaggccgccggcccatgcgtgcatgatggacgtgggccgtaaaaacgggcatgctagcctttggtccagaccaagccaactgaactgcatgcactctcacacaacacaatgctagactgctagttgttgttggtacgagcaaatggttctggcttgttcttggtattgactaacacatgtacgtctagatacacaacagagaccatttatctattacaagactttgaatggcttagagcttggaaacgagtgtagctctacagtaatcttgatttattcattgatttaattagtttgggacgagggtaactttaccgtaatcttttcttattattatttcttaatccacatctcaagcaactcgtagtagtagtacatggtaaatcgaggaaacccactgcgagaaataactacatatactgtaagcagcgcaagcatacatatatacagacactcctatacaggtaaaaaaatactgtacgtaacgtaacgtaacgtaacgtaactaactaattcgcagcatgcatccaccgtc

SEQ ID NO: 39252 - DNA, 1132 bp, Zea Mays
atgtcgcgtgtgcgccacatcttcttggctgggtgcctgggttggagattttgcaaggggcggatttacgaccagggctgcctaggctgcagccccggtcgtggcccaataacgcgagaaggtattcatccgcagcctagcttcgctagtcgctacggggtacatcgcgctaccctagtccagtgtccagccgccgccgagcacatccagacgccacacgccagagccgctcaggctcagccgcagacctgcagcgcagcgcagttggcagttgccgtcttgccgacttgccggccgccgcacgccgccaccgcccaggccgccagcgccaggcgcgtcttccgcgcggtcttctggcgagctgagcaggccgccaccgcccaggcccgaccgacgactgctggcgagctgagcaggctgcaggcgagccgcgagcaggcagagcagagcagagcggtgagcactaagcagcgattagcagagcatagcagcgagcagccggaataagatggataaatttctcatcaagaaccagaagaaagatgattctatttctaaaacaattaggacaaatgagagccgtgtagaacaaaagagaccacatattgagctagatatgaacaaaagtggcaactgcaactgttgagagagttttttctgctatgaacattatcaagactgaaagaagaaataaaatgggtgatgaatggatgaataacagcatgctatgctatattgagcgggatatgtttgtagaaattgaagatgaaaagattttgaagcattttcaaggcttaagaactcggaagataaattaacctcgcagcatcaactcatgaacgacacgtgagaggaggagcggagaggctgagaccgtgataaacttattgtgcaaaactgcaactcttgtcaaaaaagaaaagaacccttattgtgcaagggtcaacggtgagttcaaggccatgccggcaaaaaatatgaggccatgtacgaaactattgaataaagggtttcgaattttttgcgggatttgttagctaaacctgtgggagaaccgacttgtaactgtcacacccgattttataaggcaaatcgaatacgaaccatgtacgtgccaggatcaacaatttac

SEQ ID NO: 39253 - DNA, 471 bp, Zea Mays
cagcatttcagtcatggagatgctctcgagaccctaccgaagagacaaatggagtccagtcgtgcaagcccatataggcccacatcgtagttattaaagtggaggagcgccagtgctaacccgccgccgccgaagaaagtgtataccttccgcctagatcacactcctaggtgctagggttttgcagagtctggtgatgcgaagacgaaccggcggcgtatacgggaccggcggcgtatacgggaccggcggcggtacctgtactccaagagcctcgaggcctcccattgggtgctgttggagaaggagcgccgtatccgggcggcgctagaggagggaaagcccattcctaccgagctccgcaacgaggagcacgacctgcggaagcagatcgacctaggagcgtggagatctccaactcaggcttgagcttggcacatatgcaccaagggagactgctgtagaggcaag

SEQ ID NO: 39254 - DNA, 697 bp, Zea Mays
gtccagtcgtgcaagcccatataggcccacatcgtagttattaaagtggaggagcgccagtgctaacccgccgccgccgaagaaagtgtataccttccgcctagatcacactcctaggtgctagggttttgcagagtctggtgatgcgaagacgaaccggcggcgtatacgggaccggcggcgtatacgggaccggcggcggtacctgtactccaagagcctcgaggcctcccattgggtgctgttggagaaggagcgccgtatccgggcggcgctagaggagggaaagcccattcctaccgagctccgcaacgaggagcacgacctgcggaagcagatcgacctaggagcgtggagtgttggatgttgcagcgatgtctttctcgctaacctgcaagattcttttcatcaaagcacttgatcaattcatggctcggactgagaatcggcactatcatttgtatttgatatgttttgcatttacttctgttttcttgtcttcctgctagtttgacttggatcatgtacaaaataaactattattttgagtatatatagtgtttttttagagttttagggaattgacccaaatcttagcacagcctagaaccgcgggtattggggtccgggaaacggtttcccaatggttttttaatccctttcaaaatttggaaaaaatgaaaaaaactatagaaac

SEQ ID NO: 39255 - DNA, 2036 bp, Zea Mays
caaatttgcttatttaggtcctgacactgggtctgcctttttaattgttgttgtgggatgaaaacgggatggacattttctaatatctgtccgcctcgaaagggtcaaaactcaaaaccctacatggatagttcatatttgaacctgaacatttaatatccatactatatctgaatccaaatgctgaaaatcagatttttgatatgcatatgagattgatattaatagctggcatgatggtctgtgatctgaggaaaaatatgggatagaacacatgatcattaatatccatctgtatccgattctgtttcattcctactcgcatggaagccatgcccgttaggaggataataaagatggagtcattaggaactggaggttgctgtgatgatagctttttcaagaacttatgctagcattttcatgaactcactctttctttctttctctctctctctctgtgtgtatatatatatatcgatccattcctcctcctctccttcccattaacagcttcttgttaagcatacattgctagtatgatgatgatattcatttgaataataagctgctgtgatgatagctttttcaagaacttatgctagcattttcaagaactctctctctctctctctctcgctcactcactcactctgagtttgtgtgtttccatccattcctcctcttttccccattaacaagttcttgttaagcatgcattgctagtatgatgatgatattcatttgaataataagctgctgagcgcctccagttccataatctgctgctgctactgcgttgttctctctttttttgtatctgctgctgtttccaagtaacgttcttttgtgcttgtctatgttgtacactggttaatttagggtctgtttggctgagatagcctagggatagtactagttgggctaaagtttagcccagtttggcttggtagatggctaagtagttggaaatttggctaaaaaaatagctcatctattggcccctcttgtttggatgcaccagggccaatttttagctagcttctaatcagctcttgtatccaaaccattccttaataatagttccatttcaaatattttgctggttacatcaatatcatgttaactttgcccaagtgcaagaatgtgttcacattacagtttgtagtttgcttactgctttttgtggctgccatgatggacttctcgttaacctgagacatactatgaggatagcatctatccattcaaaaaccataactgagcagcattgtttgtctgaagatataacaagttgagggcgttacaatcttttgtgccctgcatcccagtttgtgcatgcctattttacaattttttgggttgcaatgatggctttctcgttaacctgatacatctttattccatgaaagacgcctaaattcaatcataactcaaggctgagaacctccaatctcactagtttgctatgttttgcttttcttgttctatctatgttttctggcgtctccaagtttgctatgtttctcttctcttgttctatctatgttttttggtgtctccatttggttctgtcaatctctattcaaattaaacagagctgcatgtgaatattaatatttccaccgaactcctaggttatgatgatatttgtttcattgacctgtgacgtgcttgctatttgttcttgcttcagtgttggatgttgcagcgatgtctttctcgctaacctgcaagattcttttcatcaaagcacttgatcaattcatggctcggactgagaatcggcactatcatttgtatttgatatgttttgcatttacttctgttttcttgtcttcctgctagtttgacttggatcatgtacaaaataaactattattttgagtatatatagtgtttttttagagttttagggaattgacccaaatcttagcacagcctagaaccgcgggtattggggtccgggaaacggtttcccaatggttttttaatccctttcaaaatttggaaaaaatgaaaaaaactatagaaac

SEQ ID NO: 39256 - DNA, 2106 bp, Zea Mays
atcaatctctgttcaaaggttgcatgtgaatgtgaattatagtatttccacaaaagttatggctttccgtagcaaggtaaacaaatacatacttacgatgaaaattctgaagtgtgggctggttatggtggcgtggtggtggcaatgtttaccatgacattttttgttcatcttgttgcttacttgcatgtactgggtcactaggtcacgggtttcaagcagtctctccgcatttgtgggggaaggcttccctattccttccctagatcccactcgtatgggagccttccggcactaggtttgcccttttttgttgttgcttactcacatgtagggatgaaattttttagacacccgtccttcccgaaaggatcataaccctacatggatgcatttgaatctgaacatttaatatatgtaacatattcgaatccaaatgctcaaattcagatttctgatatgcatatgagattgatatcaaaatctgatatgatggtgctgatattcgaggaaacatattggatagaacacattagcattaatatccatctgtatctgattctgtttcattcctactcgcatggaagccatgcctattaggaggataataaagttggggagtcattaggaactggaggctgctgtgatgatagctttttcaagaacttatgctagcattttcaagaactctctctctctctctctctcgctcactcactcactctgagtttgtgtgtttccatccattcctcctcttttccccattaacaagttcttgttaagcatgcattgctagtatgatgatgatattcatttgaataataagctgctgagcgcctccagttccataatctgctgctgctactgcgttgttctctctttttttgtatctgctgctgtttccaagtaacgttcttttgtgcttgtctatgttgtacactggttaatttagggtctgtttggctgagatagcctagggatagtactagttgggctaaagtttagcccagtttggcttggtagatggctaagtagttggaaatttggctaaaaaaatagctcatctattggcccctcttgtttggatgcaccagggccaatttttagctagcttctaatcagctcttgtatccaaaccattccttaataatagttccatttcaaatattttgctggttacatcaatatcatgttaactttgcccaagtgcaagaatgtgttcacattacagtttgtagtttgcttactgctttttgtggctgccatgatggacttctcgttaacctgagacatactatgaggatagcatctatccattcaaaaaccataactgagcagcattgtttgtctgaagatataacaagttgagggcgttacaatcttttgtgccctgcatcccagtttgtgcatgcctattttacaattttttgggttgcaatgatggctttctcgttaacctgatacatctttattccatgaaagacgcctaaattcaatcataactcaaggctgagaacctccaatctcactagtttgctatgttttgcttttcttgttctatctatgttttctggcgtctccaagtttgctatgtttctcttctcttgttctatctatgttttttggtgtctccatttggttctgtcaatctctattcaaattaaacagagctgcatgtgaatattaatatttccaccgaactcctaggttatgatgatatttgtttcattgacctgtgacgtgcttgctatttgttcttgcttcagtgttggatgttgcagcgatgtctttctcgctaacctgcaagattcttttcatcaaagcacttgatcaattcatggctcggactgagaatcggcactatcatttgtatttgatatgttttgcatttacttctgttttcttgtcttcctgctagtttgacttggatcatgtacaaaataaactattattttgagtatatatagtgtttttttagagttttagggaattgacccaaatcttagcacagcctagaaccgcgggtattggggtccgggaaacggtttcccaatggttttttaatccctttcaaaatttggaaaaaatgaaaaaaactatagaaac

SEQ ID NO: 39257 - DNA, 1630 bp, Zea Mays
cttctcccccctctgcagtcttcagtcttcacttccattccaccggctccgatcccaactgccatggcgctctccatctacacgcccacctcctcctccctcgtcccgccctccattcagaggtcgtcactgagctcgacgcggtcgccggcttcagcgagatcgtgccggacaccgtcgtgttcgatgatttcgagaggttcgcacccacggcggccacagtgagctcgtcgctgctgcttgggatcactgggctcccagacactaagttcaagagtgcgatagatactgcactggcagatggtgagtgcaacgcactggagaaggctgaggacaggatgtcctgttacctcaccaaggctcttgcaaatgttggcgctgaactggctcatcaagtccctgggagagtttcgacggaaatagatgctcggttagcttatgacacccagggcataatccacagggtacatgaactgttgaatctatacaaccaacatgatgtctcaactgaccgcctgttattcaaaattcctgctacatggcaaggcatagaggcctcaaggttgcttgaatctgaaggaattcaaacgcatctaacatttgtttacagtttcgcacaagcggcagcggcagcacaagctggtgcatctgtagtacaaatgtttgtgggccgattgcgggactgggcaaggcatcactctggtgacccagagatagatgaagctttgaagaatggagaagatgctgggctttctttggcgaagaaagtatatgcctatattcacaggaatgggtacaaaacaaagctgatggccgctgccatacggaacaagcaggacgtatttagccttctggggatcgattacatcattgcaccactgaagatattgcagtctctggaagaatctgtcaccgatcccgatgtgaagtacggctatgtcccgaagttgactcctgctattggcaagacgtacaacttcactgaagaggagcttgtgaagtgggaccagctgagcctgtcagctgccatgggaccagctgcagaagaactgcttgcttcagggctagaggggtacgtgaaccaagcacgccgcgttgaggagctctttgggaagatctggccacctcccaatgtttaacaacggcgttgagagcaatagcaatgtgatttgcctggcaggctcacaatgctgcgcggaagacgatttgcttctttttggataatacacgaagcactcccgtgtttacgttgacttgacttgcagtgtgcatgtattctgtttttgtttgtaattcagatgatttgctggatccatgagaacctgtcgcctgatattccctgcaactgcaatcgtcctcgtacgtacggctggcaacggcttcttggaacatcaccacctgagctgcagttacatgattccatttatacacacacgtatctgcctgctatcagaagtcatttctacgctggttagccaagttcatgttttgaggatacaatcgcccacctagcgtcaagatctcccttgtgaagcgtcatgctgaatgtatgaatttaccatatgcttttgttacttggcctgattttattatttgtgtgcaagtaatgttggatatgtcctcggacata

SEQ ID NO: 39258 - DNA, 1253 bp, Zea Mays
ctgcaagttgcaagttcttcatttggttggctcctaataatcgttgttggacttcaaatcatttggccaagcgtacatctcggggtggtacatgaactgttgaatctatacaaccaacatgatgtctcaactgaccgcctgttattcaaaattcctgctacatggcaaggcatagaggcctcaaggttgcttgaatctgaaggaattcaaacgcatctaacatttgtttacagtttcgcacaagcggcagcggcagcacaagctggtgcatctgtagtacaaatgtttgtgggccgattgcgggactgggcaaggcatcactctggtgacccagagatagatgaagctttgaagaatggagaagatgctgggctttctttggcgaagaaagtatatgcctatattcacaggaatgggtacaaaacaaagctgatggccgctgccatacggaacaagcaggacgtatttagccttctggggatcgattacatcattgcaccactgaagatattgcagtctctggaagaatctgtcaccgatcccgatgtgaagtacggctatgtcccgaagttgactcctgctattggcaagacgtacaacttcactgaagaggagcttgtgaagtgggaccagctgagcctgtcagctgccatgggaccagctgcagaagaactgcttgcttcagggctagaggggtacgtgaaccaagcacgccgcgttgaggagctctttgggaagatctggccacctcccaatgtttaacaacggcgttgagagcaatagcaatgtgatttgcctggcaggctcacaatgctgcgcggaagacgatttgcttctttttggataatacacgaagcactcccgtgtttacgttgacttgacttgcagtgtgcatgtattctgtttttgtttgtaattcagatgatttgctggatccatgagaacctgtcgcctgatattccctgcaactgcaatcgtcctcgtacgtacggctggcaacggcttcttggaacatcaccacctgagctgcagttacatgattccatttatacacacacgtatctgcctgctatcagaagtcatttctacgctggttagccaagttcatgttttgaggatacaatcgcccacctagcgtcaagatctcccttgtgaagcgtcatgctgaatgtatgaatttaccatatgcttttgttacttggcctgattttattatttgtgtgcaagtaatgttggatatgtcctcggacata

SEQ ID NO: 39259 - DNA, 1630 bp, Zea Mays
gcttttcgttggtttgccttttctgatctctatttctctatataaactccaattgatccgccggagtaggaggtagccaattaagatagatcgccagccgggcagtagctctgagacagataggagagagagagatcgatctgtatcgtcgtcgaagctagcggaagggtacgttacgtacgcagcggccggcccctcgctgatcgcgcgcgatggagcggcggagcggcggcgcggggagctgcctggggctgctggcggtggccgcggtgtcgacgagcatcatcctcgtctcctaccgcctccaccgccggctggaggcggacctcagggccatgatcctcggcgaaggtgacgacgacggagcagcggaccacgaccggcgccggccgcgtggcacgacgacgacgagaaggaagaagaaggtgcgcttcgcggccgacgtggcggagccgtcgtccaacagcgaggagtaccggcggcggcgggcgcgtccgtcgacaacagccaccagcgcaagaagatagcacgccgccgctgcgcgtcagcccggcgccgcctgctcaccgcggcacgcgtgagccgtacccgtaccgtacgtcgtggacccgtggtggctgtgtatcttgcatgacgtgacgtggcgtcgtggcatgcacgttcaggcaggctttgagctgccgtaggtaacgtaagcctttgcggttgctttggtgtaataaactccatcaccgagctgtcatcatcatcatgttcattggctaagcttattaactcctcctggatggatctatacgtgtgagagctgcgagaggtacggtggtgtcagagaatgattgattgattgatagagcacaagatgcatagaggaggctggattcttggggactctcctcttgtgatggactccgttgttgcgctggctggcctctgcaaggccacgcctggtgctgcaaactcgtaccacccctccacttgtcgtgctgaataatgaatcctcacccgtccaatccaatccacaaagataatcgcgctgcaataaaacctttctcaattttcttttgtttttctctactatataaaacggtcgtcgccttgtactagactaagataaaattttgcatcaacaaaggtgttcaaatcttggttgttggcttcatatttacacacatctaatcaacagaacacgtatagatatatagaaatcgtacgagtatctgactgtttaaggaatccatgagaagtacaaacgcgttcaagtagcttcaagtggtgtgtggatgctcgtggtttgttgcgcctgcagaaagtttatgttacgtatagtaatacatatatgtaggaactaaaatgaacagttggcgcccatggcctaatggataaggcgtctgacttctaatcaggcgattgtgggttcgagtcccactgggcgtgttgttgtttttttaatctatatgtgatttttaatcatatctattttaccctttattttcattcgctgtgttcgcgttgtttatactctttttttaatatatccttttacccctttttgtgttgcttgtgcttattttttatttccttggttcactatgtttgcaggcacaatggacccgtgctttacgaaaaccat

SEQ ID NO: 39260 - DNA, 374 bp, Zea Mays
aagacgctgcagatgcagtcgtcgagctaacaagcagccggacaaggtgaaatgttcccgttaacatcccttgaggcctacactaggcagcacaccaaatggggcgaccgccctgccgccggggagcattcaatcgtcggcggcacaccatcccccattcttcccgttccccaacgtgaagtggcaccatggtcgccactcgccacgcgctcgccgcaggagcaggagcagcgactgcgggccagccagcctccggttgggtagctgttctgcgcaacagcccgagggcgcggatggaggagggaccaaacaggagcggaggggaaggcaggcggtacaactgatgagcggcacaatgccataatggattcaat

SEQ ID NO: 39261 - DNA, 1124 bp, Zea Mays
caaaattgaagagatacactggacaatgagagacatccgatcagatatgatggttttaatcatggaggtgtcaccgacaatacgtgaggtacctgttctacgatagcggtcgcttcagacacgaaagatgttcttgcgagggacatgctgatcatcgccttcgagtaagatgctccaaccatgaggagcataggcacaactagcagggagagcaggccgacctcccaacagcacgcgaaggcaacaatgatagcaactaagaacgtggagaagtttgacatgaagtgacccatctggagaaagcaatgataagccaaacttttaagatctctgttatcatcgagcagttttttttttttgtttttttgggggtacttcttctctttggttagttagtgactcttgcaagtgacatgttatgaggaggccggacgaggaaaatcaattaccttttcaccaattgcgtcttgtatgacactcatgtggttggttgccccagccatgatacttgcagtggttaagtcggtgtcgaaggctccgatatcttggctgagcactgatctcagatatgctatccgcatgcgtgtcatctgcctctggcttgtatacatccagcttgcggtttctgaaatgcatggtgataatctagagcttctctatgaaatcggtcaagctagcataagatgttttgaacttgaccccactcaccaatcatcccaccaggaagggtaacaactgctaacatccacatatacggaatcaactgcaaattaacaggaacatttgcactgtcgtacgttagtggaacaacaacaacactgaaaccaatcaacagaaccggatgtcatctaatctaacagggtagttcgaaaaaagaaagaaagaaccttagtgagttcatggaccgtggcctcgttgtcgcccatgttgctcccgacaacgtcgagagtcttccccagtatgtagtacgacatggaaggccccatgccatgcacgaaggagcccacggtccccgacaccatgagcagccagtccagcgcgtccgcgtagcgaagcaggccgaagaaggggaacgatccgccgtcctcggccgctgccgctgccgcgctttgcttgccatctgc

SEQ ID NO: 39262 - DNA, 1964 bp, Zea Mays
ctcgtagtagccttcacaaaccaaatcaccaggacacaagtcaccaacctacctcctcccctcccaccgcgggctcccgtgcgtctgccacggtgccacccgctcccgcgacatctatagacagagcagccgttctagaaagcatagtaggagagagatgagcgaggaggagaggaaaggagggggcggaggaggggacgacggagcggcggcggccgcgcgagcggcggagcaggcgcgggagctgcaggacgcggcggcggcgctgctgacgcgcacgcgggcggaggaggaggcgctgcgccggcgcgccgccgcgctgcagggggagctaaggcggctacgcgaggccgccgcggcgcacgcggacagcgaaaaggttgaggaggacttggatcgagcaacgtgcctcattaccgaaggagacgttgcgtcgctgctcccgagcaagacgcaaggcacttttctgaggatgttcttgggaccagtaaatctgcgggcaccaaggaaggaggtgcagctcaaggtgaaggaggagtacaatagctacagggacagaactgccttgctgtttcttggttttccagtgattttgttgttccttcgacaatggttatggaatagatgctttccagcattgccagttcagctgtaccaggcttggttgttattcctgtatactagtttagctttgcgtgagaacatactgcgagttaatggaagcgatattcgtccttggtaaggatcactgatggtctggcatataatcatatctgaagaaaataatggtgttgtggcctgcggatagaggtggtaatggatcacgatacaaatgttccttcataataagttaataaggcccttaataaatttgagttaaaaaatgaataggaatagagcccgatcctaatccgattcgatccttaaattttatagtgtacaatttagagcccattaccacccctacctgtggattaaaagcttttaaactaatgcatgtgggatagcttctatttttcaagacctagttatctgcttccatctgcccttttttctgttctcactgttttctcccttaaggtggatacttcatcactactctgccatgctgatgtctgttataagtctcacatgggagataaaggggcaacctaattgtgcacgcaagcagagaggcgtggaactttttctgtgctgggccataatgcaaggatttgtcatgatgttgcagaatagatatcagcgtcaaagattatatactaggattgctttggggaaggctaaaaggatggatgttgtatggggagagactgctggtgttgaaggtcaattgttgctgttgtgccctctcctttttctattgcaggtggtggtctgtgggatcctgctgatttccatggcaattggcaacttcgcaaacacattggatacattgatggccaagtctcggttcaaagcgaagatgaagaaatcaaagggcaaacgggatcttgacacgtgcccctcaccaacaggttcgtcgccgacagattcagcaaccagagcatgaaaaggtcaagagggccagttgcttaccctatgaccattgcccgtgtttaaccagggctggtcaccattgtaaatcattagtgttttctggccatcagcccctaatccttactgtctctgtcagagctcatactcatgtaagcatcaggcaactaggttgctgatggtcctaggctgaaaaaggatactgagaataaacttctggtgtttgtttatacctatatcctgaacatggagtggagtagatgagctttaggactgcaagtcttagcaaaattttcccagtatagttgtgaagctgtgagacatttgtcacaatgcgaagctgtatacaggttgaggcactatattgcttattattctgccctcggtgtatgattgatgaaatggagagtgcagaacagcgctgacactca

SEQ ID NO: 39263 - DNA, 2004 bp, Zea Mays
caggacacaagtcaccaacctacctcctcccctcccaccgcgggctcccgtgcgtctgccacggtgccacccgctcccgcgacatctatagacagagcagccgttctagaaagcatagtaggagagagatgagcgaggaggagaggaaaggagggggcggaggaggggacgacggagcggcggcggccgcgcgagcggcggagcaggcgcgggagctgcaggacgcggcggcggcgctgctgacgcgcacgcgggcggaggaggaggcgctgcgccggcgcgccgccgcgctgcagggggagctaaggcggctacgcgaggccgccgcggcgcacgcggacagcgaaaaggttgaggaggacttggatcgagcaacgtgcctcattaccgaaggagacgttgcgtcgctgctcccgagcaagacgcaaggcacttttctgaggatgttcttgggaccagtaaatctgcgggcaccaaggaaggaggtgcagctcaaggtgaaggaggagtacaatagctacagggacagaactgccttgctgtttcttggttttccagtgattttgttgttccttcgacaatggttatggaatagatgctttccagcattgccagttcagctgtaccaggcttggttgttattcctgtatactagtttagctttgcgtgagaacatactgcgagttaatggaagcgatattcgtccttggtaaggatcactgatggtctggcatataatcatatctgaagaaaataatggtgttgtggcctgcggatagaggtggtaatggatcacgatacaaatgttccttcataataagttaataaggcccttaataaatttgagttaaaaaatgaataggaatagagcccgatcctaatccgattcgatccttaaattttatagtgtacaatttagagcccattaccacccctacctgtggattaaaagcttttaaactaatgcatgtgggatagcttctatttttcaagacctagttatctgcttccatctgcccttttttctgttctcactgttttctcccttaaggtggatacttcatcactactctgccatgctgatgtctgttataagtctcacatgggagataaaggggcaacctaattgtgcacgcaagcagagaggcgtggaactttttctgtgctgggccataatgcaaggatttgtcatgatgttgcagaatagatatcagcgtcaaagattatatactaggattgctttggggaaggctaaaaggatggatgttgtatggggagagactgctggtgttgaaggtcaattgttgctgttgtgccctctcctttttctattgcagggatttgagggttatgttgggtttttacttcttcgcacagctcatactggtgtcgtccctgagtggcaggtggtggtctgtgggatcctgctgatttccatggcaattggcaacttcgcaaacacattggatacattgatggccaagtctcggttcaaagcgaagatgaagaaatcaaagggcaaacgggatcttgacacgtgcccctcaccaacaggttcgtcgccgacagattcagcaaccagagcatgaaaaggtcaagagggccagttgcttaccctatgaccattgcccgtgtttaaccagggctggtcaccattgtaaatcattagtgttttctggccatcagcccctaatccttactgtctctgtcagagctcatactcatgtaagcatcaggcaactaggttgctgatggtcctaggctgaaaaaggatactgagaataaacttctggtgtttgtttatacctatatcctgaacatggagtggagtagatgagctttaggactgcaagtcttagcaaaattttcccagtatagttgtgaagctgtgagacatttgtcacaatgcgaagctgtatacaggttgaggcactatattgcttattattctgccctcggtgtatgattgatgaaatggagagtgcagaacagcgctgacactca

SEQ ID NO: 39264 - DNA, 1629 bp, Zea Mays
cccctcccaccgcgggctcccgtgcgtctgccacggtgccacccgctcccgcgacatctatagacagagcagccgttctagaaagcatagtaggagagagatgagcgaggaggagaggaaaggagggggcggaggaggggacgacggagcggcggcggccgcgcgagcggcggagcaggcgcgggagctgcaggacgcggcggcggcgctgctgacgcgcacgcgggcggaggaggaggcgctgcgccggcgcgccgccgcgctgcagggggagctaaggcggctacgcgaggccgccgcggcgcacgcggacagcgaaaaggttgaggaggacttggatcgagcaacgtgcctcattaccgaaggagacgttgcgtcgctgctcccgagcaagacgcaaggcacttttctgaggatgttcttgggaccagtaaatctgcgggcaccaaggaaggaggtgcagctcaaggtgaaggaggagtacaatagctacaggaactgccttgctgtttcttggttttccagtgattttgttgttccttcgacaatggttatggaatagatgctttccagcattgccagttcagctgtaccaggcttggttgttattcctgtatactagtttagctttgcgtgagaacatactgcgagttaatggaagcgatattcgtccttggtggatacttcatcactactctgccatgctgatgtctgttataagtctcacatgggagataaaggggcaacctaattgtgcacgcaagcagagaggcgtggaactttttctgtgctgggccataatgcaaggatttgtcatgatgttgcagaatagatatcagcgtcaaagattatatactaggattgctttggggaaggctaaaaggatggatgttgtatggggagagactgctggtgttgaaggtcaattgttgctgttgtgccctctcctttttctattgcagggatttgagggttatgttgggtttttacttcttcgcacagctcatactggtgtcgtccctgagtggcaggtggtggtctgtgggatcctgctgatttccatggcaattggcaacttcgcaaacacattggatacattgatggccaagtctcggttcaaagcgaagatgaagaaatcaaagggcaaacgggatcttgacacgtgcccctcaccaacaggttcgtcgccgacagattcagcaaccagagcatgaaaaggtcaagagggccagttgcttaccctatgaccattgcccgtgtttaaccagggctggtcaccattgtaaatcattagtgttttctggccatcagcccctaatccttactgtctctgtcagagctcatactcatgtaagcatcaggcaactaggttgctgatggtcctaggctgaaaaaggatactgagaataaacttctggtgtttgtttatacctatatcctgaacatggagtggagtagatgagctttaggactgcaagtcttagcaaaattttcccagtatagttgtgaagctgtgagacatttgtcacaatgcgaagctgtatacaggttgaggcactatattgcttattattctgccctcggtgtatgattgatgaaatggagagtgcagaacagcgctgacactca

SEQ ID NO: 39265 - DNA, 840 bp, Zea Mays
gtgatattctgacaagaaaggaggatctcatccttattgtcttgatagaatttactccatcgaatcacatatataaattaatctaggctaaaaggatggatgttgtatggggagagactgctggtgttgaaggtcaattgttgctgttgtgccctctcctttttctattgcagggatttgagggttatgttgggtttttacttcttcgcacagctcatactggtgtcgtccctgagtggcaggtggtggtctgtgggatcctgctgatttccatggcaattggcaacttcgcaaacacattggatacattgatggccaagtctcggttcaaagcgaagatgaagaaatcaaagggcaaacgggatcttgacacgtgcccctcaccaacaggttcgtcgccgacagattcagcaaccagagcatgaaaaggtcaagagggccagttgcttaccctatgaccattgcccgtgtttaaccagggctggtcaccattgtaaatcattagtgttttctggccatcagcccctaatccttactgtctctgtcagagctcatactcatgtaagcatcaggcaactaggttgctgatggtcctaggctgaaaaaggatactgagaataaacttctggtgtttgtttatacctatatcctgaacatggagtggagtagatgagctttaggactgcaagtcttagcaaaattttcccagtatagttgtgaagctgtgagacatttgtcacaatgcgaagctgtatacaggttgaggcactatattgcttattattctgccctcggtgtatgattgatgaaatggagagtgcagaacagcgctgacactca

SEQ ID NO: 39266 - DNA, 1304 bp, Zea Mays
caaccacggcccgatccgcagcaaaaccttgccgcctccgcgggccgcggcactccaaagccgccatcttctcacgcacacggcacaccgcgcatcccctgctctcggcagtctccgcgggctccctcctccgccgccgcttccatggactccacgccggcacccgaggcagcccccggcgcgtcctcttcctctcccgccgctgccgcggccgccgagggtcttgcggggggcgtggcggcgatgaccctggatgagcggttcgaaatgctgcggggcatcggggaggagtgcatccaggaggacgagctcaggcgactgcttgagaacaagcccgtacccatctgctacgacggcttcgagccctctggacgcatgcacatcgctcagggcgttgtgaagaccatcaacgtgaacaagatggtcaacgccgggtgcaaggtgaaaatttggatcgccgactggttcgcgcagctcaacaacaagatgggaggcgacctgaagaagatccagacggtagggcgctacatgatcgagatttggaaagcggctgggatgaaccttgacggggtggagttcctgtggtcctccgaggagatcaacaagcgcgcacacgagtactggccaattgtgatggacattgcccggaaaaacaacgtcaaaaggataatgagatgctgccagattatgggcagaagtgatcaggacgacttgactgctgcccagattttttacccttgcatgcaatgtgctgatatatttttcttaaaggctgacatatgccagttggggatggaccaaaggaaggtcaacgtgctagctagggagtactgcgatgacatcaaacggaagaacaaaccaattattctttcgcatcatatgctccctggttttaaagaaggccaggagaaaatgtcaaagagtgatccatcctcagctatctttatggaagatgatgaggcccaagttaatgtgaagataaagcaagccttttgccctcccaaaattgttgaggggaatccttgtttggagtatattaaatacattgttttcccttggtttggaagatttgaggtcatccgtaaggaaagcaatggtggtaacaagacatttacatgcatgaatgaactaatttctgattacgagactggtgctttgcatcctgccgatgtcaaacctgcactggcaaaagcaataaatgaaattttgcagcctgttcgtgatcatttcaacaacaacaacgaagccaaagttcttcttaacactgtcaaggaggcatactatgcaaattccatcagagaggg

SEQ ID NO: 39267 - DNA, 1574 bp, Zea Mays
caaccacggcccgatccgcagcaaaaccttgccgcctccgcgggccgcggcactccaaagccgccatcttctcacgcacacggcacaccgcgcatcccctgctctcggcagtctccgcgggctccctcctccgccgccgcttccatggactccacgccggcacccgaggcagcccccggcgcgtcctcttcctctcccgccgctgccgcggccgccgagggtcttgcggggggcgtggcggcgatgaccctggatgagcggttcgaaatgctgcggggcatcggggaggagtgcatccaggaggacgagctcaggcgactgcttgagaacaagcccgtacccatctgctacgacggcttcgagccctctggacgcatgcacatcgctcagggcgttgtgaagaccatcaacgtgaacaagatggtcaacgccgggtgcaaggtgaaaatttggatcgccgactggttcgcgcagctcaacaacaagatgggaggcgacctgaagaagatccagacggtagggcgctacatgatcgagatttggaaagcggctgggatgaaccttgacggggtggagttcctgtggtcctccgaggagatcaacaagcgcgcacacgagtactggccaattgtgatggacattgcccggaaaaacaacgtcaaaaggataatgagatgctgccagattatgggcagaagtgatcaggacgacttgactgctgcccagattttttacccttgcatgcaatgtgctgatatatttttcttaaaggctgacatatgccagttggggatggaccaaaggaaggtcaacgtgctagctagggagtactgcgatgacatcaaacggaagaacaaaccaattattctttcgcatcatatgctccctggttttaaagaaggccaggagaaaatgtcaaagagtgatccatcctcagctatctttatggaagatgatgaggcccaagttaatgtgaagataaagcaagccttttgccctcccaaaattgttgaggggaatccttgtttggagtatattaaatacattgttttcccttggtttggaagatttgaggtcatccgtaaggaaagcaatggtggtaacaagacatttacatgcatgaatgaactaatttctgattacgagactggtgctttgcatcctgccgatgtcaaacctgcactggcaaaagcaataaatgaaattttgcagcctgttcgtgatcatttcaacaacaacaacgaagccaaagttcttcttaacactgtcaaggtacagagtaaccaattgaggagtggaagctgtccatctttagggcatgtttacattagggtggatatcgccgtttgaaattcttgtatgctattctgttactagttgcataggtagctcaaaagtttcatgtttctagatatataaaaagaatactttacttgttgactacttgatgtgcatcatagggctcaacctaaacagtgttgcactgtaagtattcgataaaagataaacaaagccaatatccaggagagacatgagatggcatgtagatttaaaaatgtcttttggccatgtcc

SEQ ID NO: 39268 - DNA, 1789 bp, Zea Mays
caaccacggcccgatccgcagcaaaaccttgccgcctccgcgggccgcggcactccaaagccgccatcttctcacgcacacggcacaccgcgcatcccctgctctcggcagtctccgcgggctccctcctccgccgccgcttccatggactccacgccggcacccgaggcagcccccggcgcgtcctcttcctctcccgccgctgccgcggccgccgagggtcttgcggggggcgtggcggcgatgaccctggatgagcggttcgaaatgctgcggggcatcggggaggagtgcatccaggaggacgagctcaggcgactgcttgagaacaagcccgtacccatctgctacgacggcttcgagccctctggacgcatgcacatcgctcagggcgttgtgaagaccatcaacgtgaacaagatggtcaacgccgggtgcaaggtgaaaatttggatcgccgactggttcgcgcagctcaacaacaagatgggaggcgacctgaagaagatccagacggtagggcgctacatgatcgagatttggaaagcggctgggatgaaccttgacggggtggagttcctgtggtcctccgaggagatcaacaagcgcgcacacgagtactggccaattgtgatggacattgcccggaaaaacaacgtcaaaaggataatgagatgctgccagattatgggcagaagtgatcaggacgacttgactgctgcccagattttttacccttgcatgcaatgtgctgatatatttttcttaaaggctgacatatgccagttggggatggaccaaaggaaggtcaacgtgctagctagggagtactgcgatgacatcaaacggaagaacaaaccaattattctttcgcatcatatgctccctggttttaaagaaggccaggagaaaatgtcaaagagtgatccatcctcagctatctttatggaagatgatgaggcccaagttaatgtgaagataaagcaagccttttgccctcccaaaattgttgaggggaatccttgtttggagtatattaaatacattgttttcccttggtttggaagatttgaggtcatccgtaaggaaagcaatggtggtaacaagtaatatttttatttctcatctgctaaaattatttgttttccgacaataatgtggtggaaccagggagatataaagttctgtgccatcattatttatatttggctgacacctgtggtcatgcaattaattatgcagaaattaggttattgaatttccaacataacatgatttattatctctgagggacttctaaggcggttgctttcaaacaggacatttacatgcatgaatgaactaatttctgattacgagactggtgctttgcatcctgccgatgtcaaacctgcactggcaaaagcaataaatgaaattttgcagcctgttcgtgatcatttcaacaacaacaacgaagccaaagttcttcttaacactgtcaagaagtacagagtaaccaattgaggagtggaagctgtccatctttagggcatgtttacattagggtggatatcgccgtttgaaattcttgtatgctattctgttactagttgcataggtagctcaaaagtttcatgtttctagatatataaaaagaatactttacttgttgactacttgatgtgcatcatagggctcaacctaaacagtgttgcactgtaagtattcgataaaagataaacaaagccaatatccaggagagacatgagatggcatgtagatttaaaaatgtcttttggccatgtcc

SEQ ID NO: 39269 - DNA, 1023 bp, Zea Mays
ggcaatggcggtccccccctcttctgttccctggactgaagaagagcataggacatttcttgctggtcttgaaaagctagggaagggagactggaggggcatagcaaaaaattttgttaccaccagaacaccaactcaagttgcaagtcatgctcagaaatattttcttaggcaaactaatccaaacaagaagaagcgcagatctagtctttttgacatgatgccaagagagctgtcaccagcaccaaattgccccatattaccaccatcgatggcaaaagtacacgatgtggtagctatgacgaaacaacttcagaatagcaacttggaaggaacctcctcttcaaatgcagcatctcaagttggaagagatctccccccagttccatcttttaaggcaacaaatatggatccaagtttcagcaaatttagccacatggcaatttcgccgctacagggtgtctatgtggtatcagaaagttctcttactaagacaaaatatggagcgcgtctggagaactccctacccattcggaccagttcccagagcccctgaagggacgccttcaccaactcctgctgctgctgctgctgctgctgctgcggctgccaatgcagctgttccggtctctcaagctaacctgacgactgcctgtactagtaacacattcttgagccagccaaagccaagtgatactccgtcactgcctccgaagggaggtcctccatcagaggaggacggtttggaactgactgttgccccaccctcccaacagaacatgacgaacatgtcttcccagaatgcggtaggcgtgatccaagtcatctaagctaatatattttattttattttatttctctctctctctctctttctctctagaagttactgtggctgttgacagttattgaccgaataaatattaacattgtattagcaatactacatgaataagaagagcatgaggtataagcccatcatttgcctgtaatttggtatatgctcccatcatcatgtgccga

SEQ ID NO: 39270 - DNA, 1129 bp, Zea Mays
ataccccggtcctgaagtggtagaacaatcatctcccagaccgcgcgatggccttatcctcctcgcgagcgccgctgctgccattgttatgcttgctactaacagttgtagctgccgccaaacacccgaagcaggagaagcctactccggcggcgttggcgcccgtcgtcacacttgaaggctgccccgacaagtgcggcaacgtcagcatcccctaccctttcggcaccaaggacggatgcttccgcccaggcttcttcgtcgtgtgcaacgacaccttcgatccccctcgccccttcatcaactccagcctcgcgctcggcaccgacgacacgaggacgcagatcgtcgtcgaggacctgtactacctgaccgccgaggacggcatgccggagacgacaccgacaaggtccgcgtggccgatcgagctcgccggcgtgtctctctcggacgcgaaagcgcggctgctgggcgccttcagctacgagtgcaggctgaacgagacgcaccactcggtgcggcggcagaggatcaacttcggcgtctaccgctcgcccttcctcctgtcggacgccgacaacgtgctcatgggaatcggcagcaacgtcgtcgccgagcagaccaccggtccgctgtgccagtcctacctcaacctgatatccttgtcggacggccccgtcaacgggtcgtgctctgggcagggctgctgccaagccaacctaccccccgtccgctctgacagcacggtgaccatccagaagggcaccatgtacgaggacggtggctacggcggcggcggcggcggccgcgtcgactgctcctacgccatgatcgtggagaaggcgtggtacaacttctcgtcggtggacctcgacagcgacgcgttcctgcggaggaacgccgccggggtcgtccccgttgtcgcggacttcaccatagacggaggtggatgtcccgacgccggcgagccgacgcccaaggacttcgcctgcataagcgacaacagcaagtgcgtggaccggctggtctacgacaattccagggggcactactgcagttgctccgttgggtaccaagggaatccatacatccatggaggatgccaagcgtactgttgacgccttttcgg

SEQ ID NO: 39271 - DNA, 2409 bp, Zea Mays
ataccccggtcctgaagtggtagaacaatcatctcccagaccgcgcgatggccttatcctcctcgcgagcgccgctgctgccattgttatgcttgctactaacagttgtagctgccgccaaacacccgaagcaggagaagcctactccggcggcgttggcgcccgtcgtcacacttgaaggctgccccgacaagtgcggcaacgtcagcatcccctaccctttcggcaccaaggacggatgcttccgcccaggcttcttcgtcgtgtgcaacgacaccttcgatccccctcgccccttcatcaactccagcctcgcgctcggcaccgacgacacgaggacgcagatcgtcgtcgaggacctgtactacctgaccgccgaggacggcatgccggagacgacaccgacaaggtccgcgtggccgatcgagctcgccggcgtgtctctctcggacgcgaaagcgcggctgctgggcgccttcagctacgagtgcaggctgaacgagacgcaccactcggtgcggcggcagaggatcaacttcggcgtctaccgctcgcccttcctcctgtcggacgccgacaacgtgctcatgggaatcggcagcaacgtcgtcgccgagcagaccaccggtccgctgtgccagtcctacctcaacctgatatccttgtcggacggccccgtcaacgggtcgtgctctgggcagggctgctgccaagccaacctaccccccgtccgctctgacagcacggtgaccatccagaagggcaccatgtacgaggacggtggctacggcggcggcggcggcggccgcgtcgactgctcctacgccatgatcgtggagaaggcgtggtacaacttctcgtcggtggacctcgacagcgacgcgttcctgcggaggaacgccgccggggtcgtccccgttgtcgcggacttcaccatagacggaggtggatgtcccgacgccggcgagccgacgcccaaggacttcgcctgcataagcgacaacagcaagtgcgtggaccggctggtctacgacaattccagggggcactactgcagttgctccgttgggtaccaagggaatccatacatccatggaggatgccaagacattgatgagtgcgctcggccagacctgtatccctgccacgggaaatgcaagaacacgccaggtgattacgaatgtagctgtccagccggaaagagaggaaatgcaaaacaagcgccgtgcaccgacttgttttctctgcctgccaagatttccgtaggtgtggtaggtggccttttcatagcagcgctactggtgttcatcatcctaatccgcaacgagaagaggaagatggccgaatttttcgagaaaaacggaggccctacattagagaaggcgaagaacataaagatctacaagaaggaggagctgaagccaatcctgaggcgaagcaatttcatcggaagaggtgccttcggtgaagtttacaagggagacctcgacggccaatcagttgcagtaaagaagccagttgatgacagtgacggcgtgcacaatgaccagttcgccaacgaagtcatcatccagtcacgggtgaaccacaagaacatcgtgaggctgataggctgttgcctagaagtcgacaagccaatgctcgtgtatgagttcctctccaaaggcagcctcgacgatgttcttcatggaagcagacgtgatccactgaacttgaaatgccgtctggacattgctgcagagtccgcagaaggcctagcctatctgcattcgaaaacaacaaacgtcatcttacacggcgatgtgaaaccagctaatatacttttggatgaggactggacaccgaagatctctgactttggtatatcgaggctgattgtgaaagataaacagcacacggattttgtcattggcgacaggagttacatggatccagtgtatctacgagacgggctactcactgatagaagcgatgtctatagtttcggagttgtgatcttggagctcataagcaggaagaaggccacctattctggcaataatagtctggtaagggaatttctcgatgctcacaaaggtaaaatggaagcgaccaagttatttgatgaggaaattgccaagccagaagtttcagatcttcttaatagtctctatgagattgcagtgcgttgtctgaatcttgatgtggatgaaaggccaagcatgacagaagtagcagagagtattctgatgctgaagagatcctggagcaatacattgacaaaaacgtcgtcagccagttgataaagattgatatatgttatagcgtgcatgtgactgtactgtctttgtggaatctggtaacaagtaactactagttagtatgccagatgattaatatatgttatagtgtaattcatgtttgtggaac

SEQ ID NO: 39272 - DNA, 480 bp, Zea Mays
atggatggcttggcgcatctgcgatggcattggggaatttgggaatcggcagcgggtggaagaatggggagcgccgctcaaatgtgtctgcgccgtggctcgaccgctcgggatgagttcgacgcggggaagcggaggggagaggcgaccacgactgaagggctggaatactggagcagtcaactgaactctagaatgttcgtgagctcccgagtcgtcgctggatgggggatccgaggggtggggtggagggggctgagggaagaggatgctgtcgtggtggcgctgtggctgtgctgctgcgcggccggcggcgaccggaggatgggggaggccgtggcttccgcgctcgaggcggtggggaagctgctggtggtgatgcaaggggactgcgcctcgaccacttcgcggatggccggagagctgctgcgagcggtgcggatggagcgtctccctgcagtttcactcatctggacctga

SEQ ID NO: 39273 - DNA, 2781 bp, Zea Mays
gggctggcgcgaggttcgttggaccaggaaaccgcggtcggcggagctctcgctctcgctctcgcttcgttgaaggctcccctcttcctccaagtataaaggagcctcctttccctttgccgtgctgtgccgcgcctgccattctcctcccgagccttctcttccttcacgcctctttgccgcagcgcgggtgggtcgtcgtttgctgtttgttccgagatcaccggagccagccagccagccagaggcagagatgaggtggtcggcgttcctgtgggaggccgcgtccggccgccgcccgggggtttccaacctcctcctcgtcgtcgcagccgccagtagcggaggtctcgtcgcgtacgccgactccggatcagatgctgctgtcgagcagccgcagcttcctccgaggaagaaggtcgtggtgcttgggactggttggggcggcacgacgttcctgaggaacctcgatagcagactgtatgatgtgcaggttatatctcctcggaactacttcgcgttcacgccgctgctcccgagtgtcacttctggaacagttgagcctaggagcattgtggagccgatccgtagggttttggagaagaaaggtggagaaatcaaattttgggaagcagagtgtttcaagattgatccacaaagcaagaaaatccattgtcgctcgaatgttgggacaagccttgaggggaatggcgagttcttggttgactatgactatctcgtggtagcagttggggctaggacaaatacattcaatactcctggtgtggtagagaattgccacttcttgaaggaagtagaggatgctcaaaagatcagacggagtgtgatggactgctttgagagagcaagcctcccctttcttaatgaagaagagaggaagaagaatcttcattttgttgttgtgggtggtggacctactggagtggaatttgcagcatctttgcatgattttgttaccgaagatttatccaagctttacccctcgattcagcaccttgtcaagatatcgttgattgaagctgcagatcatatactgaccatgtttgacaagaggataactaattttgctgaggataagtttggaagggatggtattgatgtgaaaactggatataaagttgtgaaggtttctaaggatgatattaccatgcaaaatcctgccaccggggatatttcagtcccttatgggatggctgtctggtcgactggtattggaactcgtccattcgttgtggaatttatgaaacaaattggccaggctaatcgccgtgtcttggctactgatgaatggctaagggtccgtgaatgtgatggtgtctatgcaataggtgactgtgctacaataaaccagaggaaagtaatggtatgtaatgaaagcttattacttgtccgtttggatttggcctgaattcttattagtcccttcaggaaaatttcagtaacggtatctcagcaatgcaatcttttgcactgacctatatatggaaatttcagtactaaattcataggctttgtctattggttcataagaagtgaaatgcatgaaaaaatattccctcaaaagaaattcataagccaatgtttcttaataggagttcccatggaggccactggttcacttcagatatggttggtacttcatagggaacttgaatgtattattggcaatccagtggtccagtgttgattatctgtaatacacgatttgagctaactagtagtatatgttttgctaaactgtcgtctgccttcacgtatttatgatcttgatgtgtaattgttgcaggaggacatttcagaaatattcagagtcgcagataaagataagtctggaaccttgactgtgaaagaaattcaagatatccttgatgatatctacgtgaggtacccgcaagtacagctctaccttaagagcaagcagatgaacggcatcgctgatctagtgaggagcgccaaaggagacgctgagaaggaatccgtggaactgaacatcgaggaattcaagaaggctctttcgctcgtggattcacaagtcaaattcttacctgcgaccgctcaggtcgcatcgcagcagggccaatatcttgctaggtgctttaacaagatgaaggatgctgaagaaaaccctgaaggcccaatccgcatcaggggagaaggccgccatcgcttccgccccttcaggtaccggcatctgggccaattcgccccactaggaggggagcaaactgctgcacagcttcccggggactggatctccattggccacagctcccagtggctctggtactccgtgtacgcaaccaaacaaatcagctggcgcacgaggatgctggtggtatcagactggacacgccgattcatcttcggaagagactcgagttgcatatgatcaagagggaaaagattttgctgtgacatatattcagatgaacgaggccagtacagcctcttcccactttttttttagtctgatttcacataaatgttccccttttgttgttagggaagaatctgacttcccctgcactttgtatagtgcaccacgaagaaattcctttgtacctaccttttctttttgagagagttgcactgcacttttgcggtctgagtaagctcagaattcttttaatagctattttttctaccactaatatgtgatatggagaagggtcagtttggacctgattttgttgtgtgaaatcctgttttggctactcattgtgtgctgaactagtggttcagttggttacatgaattttc

SEQ ID NO: 39274 - DNA, 2976 bp, Zea Mays
gggctggcgcgaggttcgttggaccaggaaaccgcggtcggcggagctctcgctctcgctctcgcttcgttgaaggctcccctcttcctccaagtataaaggagcctcctttccctttgccgtgctgtgccgcgcctgccattctcctcccgagccttctcttccttcacgcctctttgccgcagcgcgggtgggtcgtcgtttgctgtttgttccgagatcaccggagccagccagccagccagaggcagagatgaggtggtcggcgttcctgtgggaggccgcgtccggccgccgcccgggggtttccaacctcctcctcgtcgtcgcagccgccagtagcggaggtctcgtcgcgtacgccgactccggatcagatgctgctgtcgagcagccgcagcttcctccgaggaagaaggtcgtggtgcttgggactggttggggcggcacgacgttcctgaggaacctcgatagcagactgtatgatgtgcaggttatatctcctcggaactacttcgcgttcacgccgctgctcccgagtgtcacttctggaacagttgagcctaggagcattgtggagccgatccgtagggttttggagaaggtatgctgttctgcagagtttattgtgggttccttctcactgctaataggttctagcatttacgtcatcccgcgtgcttctctcattcttatttcaaaagagtcattggccatttttagatcattagattagatgccgttcttctgccttaacataggatttagttgtgaaccagagcagctgacaattgtcagtttgcagtgaaggtaccagtgcatcagtgctgtggacattgtatgacttgaatgtttatgtatagtggtagtttgattattgttttgtctagcagcagcttcagttctctgtctaaactcattgaatactgtttactgaaaacattagggcgttttgtttcctctgatgaaccattgaagttcggcatctttctgaccttgcatcttgcacctcggcaagttgggtcccacacatacaatcagtggatgattcttttcatttgggaacaaccatgtttcgttttccccttttctaaacatgcagcaaacactattcgtgtttgaatcactccaaaatattaaacactagcatgctaactcaatcagatgattacatttgttgccagtggactgatattcatttgttgcctcttatgcctaacagaaaggtggagaaatcaaattttgggaagcagagtgtttcaagattgatccacaaagcaagaaaatccattgtcgctcgaatgttgggacaagccttgaggggaatggcgagttcttggttgactatgactatctcgtggtagcagttggggctaggacaaatacattcaatactcctggtgtggtagagaattgccacttcttgaaggaagtagaggatgctcaaaagatcagacggagtgtgatggactgctttgagagagcaagcctcccctttcttaatgaagaagagaggaagaagaatcttcattttgttgttgtgggtggtggacctactggagtggaatttgcagcatctttgcatgattttgttaccgaagatttatccaagctttacccctcgattcagcaccttgtcaagatatcgttgattgaagctgcagatcatatactgaccatgtttgacaagaggataactaattttgctgaggataagtttggaagggatggtattgatgtgaaaactggatataaagttgtgaaggtttctaaggatgatattaccatgcaaaatcctgccaccggggatatttcagtcccttatgggatggctgtctggtcgactggtattggaactcgtccattcgttgtggaatttatgaaacaaattggccaggctaatcgccgtgtcttggctactgatgaatggctaagggtccgtgaatgtgatggtgtctatgcaataggtgactgtgctacaataaaccagaggaaagtaatggaggacatttcagaaatattcagagtcgcagataaagataagtctggaaccttgactgtgaaagaaattcaagatatccttgatgatatctacgtgaggtacccgcaagtacagctctaccttaagagcaagcagatgaacggcatcgctgatctagtgaggagcgccaaaggagacgctgagaaggaatccgtggaactgaacatcgaggaattcaagaaggctctttcgctcgtggattcacaagtcaaattcttacctgcgaccgctcaggtcgcatcgcagcagggccaatatcttgctaggtgctttaacaagatgaaggatgctgaagaaaaccctgaaggcccaatccgcatcaggggagaaggccgccatcgcttccgccccttcaggtaccggcatctgggccaattcgccccactaggaggggagcaaactgctgcacagcttcccggggactggatctccattggccacagctcccagtggctctggtactccgtgtacgcaaccaaacaaatcagctggcgcacgaggatgctggtggtatcagactggacacgccgattcatcttcggaagagactcgagttgcatatgatcaagagggaaaagattttgctgtgacatatattcagatgaacgaggccagtacagcctcttcccactttttttttagtctgatttcacataaatgttccccttttgttgttagggaagaatctgacttcccctgcactttgtatagtgcaccacgaagaaattcctttgtacctaccttttctttttgagagagttgcactgcacttttgcggtctgagtaagctcagaattcttttaatagctattttttctaccactaatatgtgatatggagaagggtcagtttggacctgattttgttgtgtgaaatcctgttttggctactcattgtgtgctgaactagtggttcagttggttacatgaattttc

SEQ ID NO: 39275 - DNA, 3554 bp, Zea Mays
atgggatctggccgcgccgtcatgctctgtgggacccttgccctggtgcctaaagatcttgcgctgccaccctgccggagcacgagagggtggggatcatcgggcggacaaggcttggtcggcggacaccacagcggcggggagcgaccacagttttggctaccccgcgggaagaagatgaaggaggaccgttggatgcgcgatgaagaattgagcaggcagaggaaacctgagcgcaatggcagtgtatttacacctatagctgcaatgtattccagtggtcatgcactccctgttgcaaataggagccacggtttggtatttggcagtctgagcaaggactgggacgacattcgccagcgcaaggatcagttggtcaacttccttgctagtcttgaacgagcctctggagattctgcggcagctggcaaaatcgaagatagcaaattggccagtcctgtggagccaactgaacaaaaagagaaggctgccataatcgttcttgattcagacgatgaggacggaaatggttcaggaaacagtaagttggcatctgagactaacaaagaactcggaacatctggattgattaataatatcgcagaaaggatgacgtttaatgggagccaagcatttggaaccgtgcatacttatggagataagaacacacagattgttccgtatggtcaatgttctgctttagtgaatcagtttcctttgcaaaccagttggcaaccatctattcagtttgagagagtcgtgctgcagaaaaggcctgaggagcagcgaatgcaagatcttgtggctgctagcatagccgagaagagagcagaaacacaagtgttcctttcacttcccacagagaaaaagcgaaggagatcagaccccagtctgcatgccagtgacgatactgctactgtccctaaacaaagaaaaagtaaaggtgccacagttgtagcagcagctaatttgtcattggtttcacaacaaactgctacatcaccagaacctgacatggttatagaggaagaggagaaacataaaaatgaaagtgatggtcttgacgattattggaaagattttgcattggctgttgaaagcacaaagcttgacgaagttgatgaggcggcaattgaaaaggaagataatggaaagatggaggacatcgattgcaatcatgacatccggattcatgaagatttgggtcatgtatgccgtgtgtgtggtatgattgtgagaagagctgattcaataattgattatcagtggaaaaaggcttcaaggagaagaacgaatggctatggaggacattcaaaagatgctgatgagatagattgtggtactgttaaactgtctgaagatttcatagtcgcagatattgctattcatcctagacatgctcggataatgaaaccacatcagttggaaggtttcaactttttggttaagaatttgattggagacaagcctggaggttgcattctagctcatgccccaggtacagggaaaacatttatgcttataagcttcattcagagcttcatggcaaggtatccatctgcaaggcctcttgttgtgctgcccaaagggattctaggtatatggaagacagaaattaaacgatggcaagtgcaggatataccagtgtacgatttttactctgtcaaggctgaaaaaagagtagaacagttgcaaatcctcaaatcttgggaagacaagatgagtatactatttcttggatacaagcagttctccacaatcgtcactgatgatgggggcagcaatgtcacagctgcatgtcgagacaggctgcttaaggttcccaaccttctgatacttgacgaaggacatacacctagaaatcgggagactaatgtactcgaatcactaaatagagtggaaacaccacgcaaagtggttctttcgggtacacttttccagaatcatgttgaagaagtgtttaatatcttgaatctcgttcgcccaaagtttctcaggatggaatcatcccgtcctactgccagacgtataatgagtcaagttgaaatagttggtagaagttcgaaagggcttgctgatggcgcattcactaaggcagttgaagaaaccttattgaatgatgagaacttcaagagaaaagctcatgttattagaggtcttagagaactaacaaaggatgttcttcactattataagggtgatatcttagatgaactacctggcttagtagacttcagtgtgtttttgaagctcacacccaaacagaaagacattatttataagttggaagcacatgatcggttcaaaagaaatgcagtagggagtgcactgtacattcatccatgtctttcagaactttcagaggttaatgctgagcatagggctaacacctttagagatgatttagttgatagtctggtagattctatcactgtgagagatggcgtgaaggccaattttttcatgaatatcctgtcacttgctaattctgcaggagagaaagtgctagctttcagtcaatatatatctcccatgattttctttgaaaggctgctggtgaagaagaaaggctggcatgtggggaaagagatctttatgatctctggtgatactagccaagaagacagagaattggcaacggaccattttaacaactctgctgacgcaaaaattatgtttggttctatcaaggcatgtggggagggtatctccctcgttggtgcgtcgagagttgtcattctggacgtacacctgaacccatctgtcacccgtcaagcgattgggcgtgcattcaggcccggacagcagaagaaggtgtttgtgtacaggcttgtagctgccgattctgacgaggtaaaggtccatgagacagcattcaagaaagaagtcataccgaagctgtggttcgaatggagcgagcactgtactacggaagacttcaaacttggtcaaattgatattgatgactctggtgacgaactgttggatactaaagcaatccgcaaggatatcaaagcgctgtatagaaggtaggtaacaagctttgtggccactggacaccatgtacatattgcagtgctgaccgtcgagctgatccttaaactgaagaaagagggtgttgcggtggctacattgcgcggtcattcccagctatatccgtggaatggcggcttcttttgttcgtagtatgtgccaacttggggcagcagtcagctgatccccagacacatttctagactcttttttaggctcaagtttctgagaattaacctgctatggcgtttagccttaagtaaatatttcgttcgcaacaataataacccagtaaacctaatttgttcttgtgcgtttgtggtggtggttcttgaaatttacctggcgccttcttcctgggctagatgctatgcaggtgtcacaggttggtttgttggcatgtagaatcgggaaatgctaatctcgaaagctcgtagtttccttttcccccccgggtgacatgtttattcacctcttactagttaccacgtccatttccaactataagatatgatactttg

SEQ ID NO: 39276 - DNA, 4117 bp, Zea Mays
atgggatctggccgcgccgtcatgctctgtgggacccttgccctggtgcctaaagatcttgcgctgccaccctgccggagcacgagagggtggggatcatcgggcggacaaggcttggtcggcggacaccacagcggcggggagcgaccacagttttggctaccccgcgggaagaagatgaaggaggaccgttggatgcgcgatgaagaattgagcaggcagaggaaacctgagcgcaatggcagtgtatttacacctatagctgcaatgtattccagtggtcatgcactccctgttgcaaataggagccacggtttggtatttggcagtctgagcaaggactgggacgacattcgccagcgcaaggatcagttggtcaacttccttgctagtcttgaacgagcctctggagattctgcggcagctggcaaaatcgaagatagcaaattggccagtcctgtggagccaactgaacaaaaagagaaggctgccataatcgttcttgattcagacgatgaggacggaaatggttcaggaaacagtaagttggcatctgagactaacaaagaactcggaacatctggattgattaataatatcgcagaaaggatgacgtttaatgggagccaagcatttggaaccgtgcatacttatggagataagaacacacagattgttccgtatggtcaatgttctgctttagtgaatcagtttcctttgcaaaccagttggcaaccatctattcagtttgagagagtcgtgctgcagaaaaggcctgaggagcagcgaatgcaagatcttgtggctgctagcatagccgagaagagagcagaaacacaagtgttcctttcacttcccacagagaaaaagcgaaggagatcagaccccagtctgcatgccagtgacgatactgctactgtccctaaacaaagaaaaagtaaaggtgccacagttgtagcagcagctaatttgtcattggtttcacaacaaactgctacatcaccagaacctgacatggttatagaggaagaggagaaacataaaaatgaaagtgatggtcttgacgattattggaaagattttgcattggctgttgaaagcacaaagggaggagagagttacatgcttgctggcggtgggctctgtccagtagaggttcagtggctgatatgtacaaccgtagtggtaggtatcggagttcatgttgttgagtacgacatagttggtaaacagtgcacgcttgccgcttgcggggccctggatttagtaggaacagggcatgccctcctggggcttggggctggtatgagccgggcccactgcgggttttcttctgctgacaggatctcagaagtcgtattgctaatatccggggtatgcctttccctggtcgctcatggtattaaattttgcctgcttgttggcaagaaatacactcaaatttttgatgtaaggtcaagtcaaccatgtgagattgcaagtcaacaaaagattccaagaactttgtggctgttggagtgttggtattgtggaaattttcatgcacaaccataacaacgactacacctttattacaattgtgagttgtattgtgaaatgcttgacgaagttgatgaggcggcaattgaaaaggaagataatggaaagatggaggacatcgattgcaatcatgacatccggattcatgaagatttgggtcatgtatgccgtgtgtgtggtatgattgtgagaagagctgattcaataattgattatcagtggaaaaaggcttcaaggagaagaacgaatggctatggaggacattcaaaagatgctgatgagatagattgtggtactgttaaactgtctgaagatttcatagtcgcagatattgctattcatcctagacatgctcggataatgaaaccacatcagttggaaggtttcaactttttggttaagaatttgattggagacaagcctggaggttgcattctagctcatgccccaggtacagggaaaacatttatgcttataagcttcattcagagcttcatggcaaggtatccatctgcaaggcctcttgttgtgctgcccaaagggattctaggtatatggaagacagaaattaaacgatggcaagtgcaggatataccagtgtacgatttttactctgtcaaggctgaaaaaagagtagaacagttgcaaatcctcaaatcttgggaagacaagatgagtatactatttcttggatacaagcagttctccacaatcgtcactgatgatgggggcagcaatgtcacagctgcatgtcgagacaggctgcttaaggttcccaaccttctgatacttgacgaaggacatacacctagaaatcgggagactaatgtactcgaatcactaaatagagtggaaacaccacgcaaagtggttctttcgggtacacttttccagaatcatgttgaagaagtgtttaatatcttgaatctcgttcgcccaaagtttctcaggatggaatcatcccgtcctactgccagacgtataatgagtcaagttgaaatagttggtagaagttcgaaagggcttgctgatggcgcattcactaaggcagttgaagaaaccttattgaatgatgagaacttcaagagaaaagctcatgttattagaggtcttagagaactaacaaaggatgttcttcactattataagggtgatatcttagatgaactacctggcttagtagacttcagtgtgtttttgaagctcacacccaaacagaaagacattatttataagttggaagcacatgatcggttcaaaagaaatgcagtagggagtgcactgtacattcatccatgtctttcagaactttcagaggttaatgctgagcatagggctaacacctttagagatgatttagttgatagtctggtagattctatcactgtgagagatggcgtgaaggccaattttttcatgaatatcctgtcacttgctaattctgcaggagagaaagtgctagctttcagtcaatatatatctcccatgattttctttgaaaggctgctggtgaagaagaaaggctggcatgtggggaaagagatctttatgatctctggtgatactagccaagaagacagagaattggcaacggaccattttaacaactctgctgacgcaaaaattatgtttggttctatcaaggcatgtggggagggtatctccctcgttggtgcgtcgagagttgtcattctggacgtacacctgaacccatctgtcacccgtcaagcgattgggcgtgcattcaggcccggacagcagaagaaggtgtttgtgtacaggcttgtagctgccgattctgacgaggtaaaggtccatgagacagcattcaagaaagaagtcataccgaagctgtggttcgaatggagcgagcactgtactacggaagacttcaaacttggtcaaattgatattgatgactctggtgacgaactgttggatactaaagcaatccgcaaggatatcaaagcgctgtatagaaggtgagcttccctccttcccttacaattgttttgcatgctagttgcctcatctagtgcctttgtaggtaggtaacaagctttgtggccactggacaccatgtacatattgcagtgctgaccgtcgagctgatccttaaactgaagaaagaggtgacgggtgttgcggtggctacattgcgcggtcattcccagctatatccgtggaatggcggcttcttttgttcgtagtatgtgccaacttggggcagcagtcagctgatccccagacacatttctagactcttttttaggctcaagtttctgagaattaacctgctatggcgtttagccttaagtaaatatttcgttcgcaacaataataacccagtaaacctaatttgttcttgtgcgtttgtggtggtggttcttgaaatttacctggcgccttcttcctgggctagatgctatgcaggtgtcacaggttggtttgttggcatgtagaatcgggaaatgctaatctcgaaagctcgtagtttccttttcccccccgggtgacatgtttattcacctcttactagttaccacgtccatttccaactataagatatgatactttg

SEQ ID NO: 39277 - DNA, 3560 bp, Zea Mays
atgggatctggccgcgccgtcatgctctgtgggacccttgccctggtgcctaaagatcttgcgctgccaccctgccggagcacgagagggtggggatcatcgggcggacaaggcttggtcggcggacaccacagcggcggggagcgaccacagttttggctaccccgcgggaagaagatgaaggaggaccgttggatgcgcgatgaagaattgagcaggcagaggaaacctgagcgcaatggcagtgtatttacacctatagctgcaatgtattccagtggtcatgcactccctgttgcaaataggagccacggtttggtatttggcagtctgagcaaggactgggacgacattcgccagcgcaaggatcagttggtcaacttccttgctagtcttgaacgagcctctggagattctgcggcagctggcaaaatcgaagatagcaaattggccagtcctgtggagccaactgaacaaaaagagaaggctgccataatcgttcttgattcagacgatgaggacggaaatggttcaggaaacagtaagttggcatctgagactaacaaagaactcggaacatctggattgattaataatatcgcagaaaggatgacgtttaatgggagccaagcatttggaaccgtgcatacttatggagataagaacacacagattgttccgtatggtcaatgttctgctttagtgaatcagtttcctttgcaaaccagttggcaaccatctattcagtttgagagagtcgtgctgcagaaaaggcctgaggagcagcgaatgcaagatcttgtggctgctagcatagccgagaagagagcagaaacacaagtgttcctttcacttcccacagagaaaaagcgaaggagatcagaccccagtctgcatgccagtgacgatactgctactgtccctaaacaaagaaaaagtaaaggtgccacagttgtagcagcagctaatttgtcattggtttcacaacaaactgctacatcaccagaacctgacatggttatagaggaagaggagaaacataaaaatgaaagtgatggtcttgacgattattggaaagattttgcattggctgttgaaagcacaaagcttgacgaagttgatgaggcggcaattgaaaaggaagataatggaaagatggaggacatcgattgcaatcatgacatccggattcatgaagatttgggtcatgtatgccgtgtgtgtggtatgattgtgagaagagctgattcaataattgattatcagtggaaaaaggcttcaaggagaagaacgaatggctatggaggacattcaaaagatgctgatgagatagattgtggtactgttaaactgtctgaagatttcatagtcgcagatattgctattcatcctagacatgctcggataatgaaaccacatcagttggaaggtttcaactttttggttaagaatttgattggagacaagcctggaggttgcattctagctcatgccccaggtacagggaaaacatttatgcttataagcttcattcagagcttcatggcaaggtatccatctgcaaggcctcttgttgtgctgcccaaagggattctaggtatatggaagacagaaattaaacgatggcaagtgcaggatataccagtgtacgatttttactctgtcaaggctgaaaaaagagtagaacagttgcaaatcctcaaatcttgggaagacaagatgagtatactatttcttggatacaagcagttctccacaatcgtcactgatgatgggggcagcaatgtcacagctgcatgtcgagacaggctgcttaaggttcccaaccttctgatacttgacgaaggacatacacctagaaatcgggagactaatgtactcgaatcactaaatagagtggaaacaccacgcaaagtggttctttcgggtacacttttccagaatcatgttgaagaagtgtttaatatcttgaatctcgttcgcccaaagtttctcaggatggaatcatcccgtcctactgccagacgtataatgagtcaagttgaaatagttggtagaagttcgaaagggcttgctgatggcgcattcactaaggcagttgaagaaaccttattgaatgatgagaacttcaagagaaaagctcatgttattagaggtcttagagaactaacaaaggatgttcttcactattataagggtgatatcttagatgaactacctggcttagtagacttcagtgtgtttttgaagctcacacccaaacagaaagacattatttataagttggaagcacatgatcggttcaaaagaaatgcagtagggagtgcactgtacattcatccatgtctttcagaactttcagaggttaatgctgagcatagggctaacacctttagagatgatttagttgatagtctggtagattctatcactgtgagagatggcgtgaaggccaattttttcatgaatatcctgtcacttgctaattctgcaggagagaaagtgctagctttcagtcaatatatatctcccatgattttctttgaaaggctgctggtgaagaagaaaggctggcatgtggggaaagagatctttatgatctctggtgatactagccaagaagacagagaattggcaacggaccattttaacaactctgctgacgcaaaaattatgtttggttctatcaaggcatgtggggagggtatctccctcgttggtgcgtcgagagttgtcattctggacgtacacctgaacccatctgtcacccgtcaagcgattgggcgtgcattcaggcccggacagcagaagaaggtgtttgtgtacaggcttgtagctgccgattctgacgaggtaaaggtccatgagacagcattcaagaaagaagtcataccgaagctgtggttcgaatggagcgagcactgtactacggaagacttcaaacttggtcaaattgatattgatgactctggtgacgaactgttggatactaaagcaatccgcaaggatatcaaagcgctgtatagaaggtaggtaacaagctttgtggccactggacaccatgtacatattgcagtgctgaccgtcgagctgatccttaaactgaagaaagaggtgacgggtgttgcggtggctacattgcgcggtcattcccagctatatccgtggaatggcggcttcttttgttcgtagtatgtgccaacttggggcagcagtcagctgatccccagacacatttctagactcttttttaggctcaagtttctgagaattaacctgctatggcgtttagccttaagtaaatatttcgttcgcaacaataataacccagtaaacctaatttgttcttgtgcgtttgtggtggtggttcttgaaatttacctggcgccttcttcctgggctagatgctatgcaggtgtcacaggttggtttgttggcatgtagaatcgggaaatgctaatctcgaaagctcgtagtttccttttcccccccgggtgacatgtttattcacctcttactagttaccacgtccatttccaactataagatatgatactttg

SEQ ID NO: 39278 - DNA, 3556 bp, Zea Mays
atgggatctggccgcgccgtcatgctctgtgggacccttgccctggtgcctaaagatcttgcgctgccaccctgccggagcacgagagggtggggatcatcgggcggacaaggcttggtcggcggacaccacagcggcggggagcgaccacagttttggctaccccgcgggaagaagatgaaggaggaccgttggatgcgcgatgaagaattgagcaggcagaggaaacctgagcgcaatggcagtgtatttacacctatagctgcaatgtattccagtggtcatgcactccctgttgcaaataggagccacggtttggtatttggcagtctgagcaaggactgggacgacattcgccagcgcaaggatcagttggtcaacttccttgctagtcttgaacgagcctctggagattctgcggcagctggcaaaatcgaagatagcaaattggccagtcctgtggagccaactgaacaaaaagagaaggctgccataatcgttcttgattcagacgatgaggacggaaatggttcaggaaacagtaagttggcatctgagactaacaaagaactcggaacatctggattgattaataatatcgcagaaaggatgacgtttaatgggagccaagcatttggaaccgtgcatacttatggagataagaacacacagattgttccgtatggtcaatgttctgctttagtgaatcagtttcctttgcaaaccagttggcaaccatctattcagtttgagagagtcgtgctgcagaaaaggcctgaggagcagcgaatgcaagatcttgtggctgctagcatagccgagaagagagcagaaacacaagtgttcctttcacttcccacagagaaaaagcgaaggagatcagaccccagtctgcatgccagtgacgatactgctactgtccctaaacaaagaaaaagtaaaggtgccacagttgtagcagcagctaatttgtcattggtttcacaacaaactgctacatcaccagaacctgacatggttatagaggaagaggagaaacataaaaatgaaagtgatggtcttgacgattattggaaagattttgcattggctgttgaaagcacaaagcttgacgaagttgatgaggcggcaattgaaaaggaagataatggaaagatggaggacatcgattgcaatcatgacatccggattcatgaagatttgggtcatgtatgccgtgtgtgtggtatgattgtgagaagagctgattcaataattgattatcagtggaaaaaggcttcaaggagaagaacgaatggctatggaggacattcaaaagatgctgatgagatagattgtggtactgttaaactgtctgaagatttcatagtcgcagatattgctattcatcctagacatgctcggataatgaaaccacatcagttggaaggtttcaactttttggttaagaatttgattggagacaagcctggaggttgcattctagctcatgccccaggtacagggaaaacatttatgcttataagcttcattcagagcttcatggcaaggtatccatctgcaaggcctcttgttgtgctgcccaaagggattctaggtatatggaagacagaaattaaacgatggcaagtgcaggatataccagtgtacgatttttactctgtcaaggctgaaaaaagagtagaacagttgcaaatcctcaaatcttgggaagacaagatgagtatactatttcttggatacaagcagttctccacaatcgtcactgatgatgggggcagcaatgtcacagctgcatgtcgagacaggctgcttaaggttcccaaccttctgatacttgacgaaggacatacacctagaaatcgggagactaatgtactcgaatcactaaatagagtggaaacaccacgcaaagtggttctttcgggtacacttttccagaatcatgttgaagaagtgtttaatatcttgaatctcgttcgcccaaagtttctcaggatggaatcatcccgtcctactgccagacgtataatgagtcaagttgaaatagttggtagaagttcgaaagggcttgctgatggcgcattcactaaggcagttgaagaaaccttattgaatgatgagaacttcaagagaaaagctcatgttattagaggtcttagagaactaacaaaggatgttcttcactattataagggtgatatcttagatgaactacctggcttagtagacttcagtgtgtttttgaagctcacacccaaacagaaagacattatttataagttggaagcacatgatcggttcaaaagaaatgcagtagggagtgcactgtacattcatccatgtctttcagaactttcagaggttaatgctgagcatagggctaacacctttagagatgatttagttgatagtctggtagattctatcactgtgagagatggcgtgaaggccaattttttcatgaatatcctgtcacttgctaattctgcaggagagaaagtgctagctttcagtcaatatatatctcccatgattttctttgaaaggctgctggtgaagaagaaaggctggcatgtggggaaagagatctttatgatctctggtgatactagccaagaagacagagaattggcaacggaccattttaacaactctgctgacgcaaaaattatgtttggttctatcaaggcatgtggggagggtatctccctcgttggtgcgtcgagagttgtcattctggacgtacacctgaacccatctgtcacccgtcaagcgattgggcgtgcattcaggcccggacagcagaagaaggtgtttgtgtacaggcttgtagctgccgattctgacgaggtaaaggtccatgagacagcattcaagaaagaagtcataccgaagctgtggttcgaatggagcgagcactgtactacggaagacttcaaacttggtcaaattgatattgatgactctggtgacgaactgttggatactaaagcaatccgcaaggatatcaaagcgctgtatagaaggtaacaagctttgtggccactggacaccatgtacatattgcagtgctgaccgtcgagctgatccttaaactgaagaaagaggtgacgggtgttgcggtggctacattgcgcggtcattcccagctatatccgtggaatggcggcttcttttgttcgtagtatgtgccaacttggggcagcagtcagctgatccccagacacatttctagactcttttttaggctcaagtttctgagaattaacctgctatggcgtttagccttaagtaaatatttcgttcgcaacaataataacccagtaaacctaatttgttcttgtgcgtttgtggtggtggttcttgaaatttacctggcgccttcttcctgggctagatgctatgcaggtgtcacaggttggtttgttggcatgtagaatcgggaaatgctaatctcgaaagctcgtagtttccttttcccccccgggtgacatgtttattcacctcttactagttaccacgtccatttccaactataagatatgatactttg

SEQ ID NO: 39279 - DNA, 3646 bp, Zea Mays
gtcatttcctcctaaaatccccaagcctccaatccactgaactaaaccctagacatggcgggtagagactactgccggttgccggtgcgcccgcgcgacttctgaggccccgcccccgtcccggcgtcgccggaactggctccactgtcgcccccatcactgggactgggagagtgggagttcagagccgcagacgctggggcgccgggtcaccggaaggccgggaaggaaggtgtggccgcaagacgcaggcaggaggcatcgactcgactcaccatgtctcagtcaccgggaggacgggaaggcagaggaaacctgagcgcaatggcagtgtatttacacctatagctgcaatgtattccagtggtcatgcactccctgttgcaaataggagccacggtttggtatttggcagtctgagcaaggactgggacgacattcgccagcgcaaggatcagttggtcaacttccttgctagtcttgaacgagcctctggagattctgcggcagctggcaaaatcgaagatagcaaattggccagtcctgtggagccaactgaacaaaaagagaaggctgccataatcgttcttgattcagacgatgaggacggaaatggttcaggaaacagtaagttggcatctgagactaacaaagaactcggaacatctggattgattaataatatcgcagaaaggatgacgtttaatgggagccaagcatttggaaccgtgcatacttatggagataagaacacacagattgttccgtatggtcaatgttctgctttagtgaatcagtttcctttgcaaaccagttggcaaccatctattcagtttgagagagtcgtgctgcagaaaaggcctgaggagcagcgaatgcaagatcttgtggctgctagcatagccgagaagagagcagaaacacaagtgttcctttcacttcccacagagaaaaagcgaaggagatcagaccccagtctgcatgccagtgacgatactgctactgtccctaaacaaagaaaaagtaaaggtgccacagttgtagcagcagctaatttgtcattggtttcacaacaaactgctacatcaccagaacctgacatggttatagaggaagaggagaaacataaaaatgaaagtgatggtcttgacgattattggaaagattttgcattggctgttgaaagcacaaagcttgacgaagttgatgaggcggcaattgaaaaggaagataatggaaagatggaggacatcgattgcaatcatgacatccggattcatgaagatttgggtcatgtatgccgtgtgtgtggtatgattgtgagaagagctgattcaataattgattatcagtggaaaaaggcttcaaggagaagaacgaatggctatggaggacattcaaaagatgctgatgagatagattgtggtactgttaaactgtctgaagatttcatagtcgcagatattgctattcatcctagacatgctcggataatgaaaccacatcagttggaaggtttcaactttttggttaagaatttgattggagacaagcctggaggttgcattctagctcatgccccaggtacagggaaaacatttatgcttataagcttcattcagagcttcatggcaaggtatccatctgcaaggcctcttgttgtgctgcccaaagggattctaggtatatggaagacagaaattaaacgatggcaagtgcaggatataccagtgtacgatttttactctgtcaaggctgaaaaaagagtagaacagttgcaaatcctcaaatcttgggaagacaagatgagtatactatttcttggatacaagcagttctccacaatcgtcactgatgatgggggcagcaatgtcacagctgcatgtcgagacaggctgcttaaggttcccaaccttctgatacttgacgaaggacatacacctagaaatcgggagactaatgtactcgaatcactaaatagagtggaaacaccacgcaaagtggttctttcgggtacacttttccagaatcatgttgaagaagtgtttaatatcttgaatctcgttcgcccaaagtttctcaggatggaatcatcccgtcctactgccagacgtataatgagtcaagttgaaatagttggtagaagttcgaaagggcttgctgatggcgcattcactaaggcagttgaagaaaccttattgaatgatgagaacttcaagagaaaagctcatgttattagaggtcttagagaactaacaaaggatgttcttcactattataagggtgatatcttagatgaactacctggcttagtagacttcagtgtgtttttgaagctcacacccaaacagaaagacattatttataagttggaagcacatgatcggttcaaaagaaatgcagtagggagtgcactgtacattcatccatgtctttcagaactttcagaggttaatgctgagcatagggctaacacctttagagatgatttagttgatagtctggtagattctatcactgtgagagatggcgtgaaggccaattttttcatgaatatcctgtcacttgctaattctgcaggagagaaagtgctagctttcagtcaatatatatctcccatgattttctttgaaaggctgctggtgaagaagaaaggctggcatgtggggaaagagatctttatgatctctggtgatactagccaagaagacagagaattggcaacggaccattttaacaactctgctgacgcaaaaattatgtttggttctatcaaggcatgtggggagggtatctccctcgttggtgcgtcgagagttgtcattctggacgtacacctgaacccatctgtcacccgtcaagcgattgggcgtgcattcaggcccggacagcagaagaaggtgtttgtgtacaggcttgtagctgccgattctgacgaggtaaaggtccatgagacagcattcaagaaagaagtcataccgaagctgtggttcgaatggagcgagcactgtactacggaagacttcaaacttggtcaaattgatattgatgactctggtgacgaactgttggatactaaagcaatccgcaaggatatcaaagcgctgtatagaaggtaggtaacaagctttgtggccactggacaccatgtacatattgcagtgctgaccgtcgagctgatccttaaactgaagaaagaggtgacgggtgttgcggtggctacattgcgcggtcattcccagctatatccgtggaatggcggcttcttttgttcgtagtatgtgccaacttggggcagcagtcagctgatccccagacacatttctagactcttttttaggctcaagtttctgagaattaacctgctatggcgtttagccttaagtaaatatttcgttcgcaacaataataacccagtaaacctaatttgttcttgtgcgtttgtggtggtggttcttgaaatttacctggcgccttcttcctgggctagatgctatgcaggtgtcacaggttggtttgttggcatgtagaatcgggaaatgctaatctcgaaagctcgtagtttccttttcccccccgggtgacatgtttattcacctcttactagttaccacgtccatttccaactataagatatgatactttg

SEQ ID NO: 39280 - DNA, 3652 bp, Zea Mays
gtcatttcctcctaaaatccccaagcctccaatccactgaactaaaccctagacatggcgggtagagactactgccggttgccggtgcgcccgcgcgacttctgaggccccgcccccgtcccggcgtcgccggaactggctccactgtcgcccccatcactgggactgggagagtgggagttcagagccgcagacgctggggcgccgggtcaccggaaggccgggaaggaaggtgtggccgcaagacgcaggcaggaggcatcgactcgactcaccatgtctcagtcaccgggaggacgggaaggcatatattacagcaggcagaggaaacctgagcgcaatggcagtgtatttacacctatagctgcaatgtattccagtggtcatgcactccctgttgcaaataggagccacggtttggtatttggcagtctgagcaaggactgggacgacattcgccagcgcaaggatcagttggtcaacttccttgctagtcttgaacgagcctctggagattctgcggcagctggcaaaatcgaagatagcaaattggccagtcctgtggagccaactgaacaaaaagagaaggctgccataatcgttcttgattcagacgatgaggacggaaatggttcaggaaacagtaagttggcatctgagactaacaaagaactcggaacatctggattgattaataatatcgcagaaaggatgacgtttaatgggagccaagcatttggaaccgtgcatacttatggagataagaacacacagattgttccgtatggtcaatgttctgctttagtgaatcagtttcctttgcaaaccagttggcaaccatctattcagtttgagagagtcgtgctgcagaaaaggcctgaggagcagcgaatgcaagatcttgtggctgctagcatagccgagaagagagcagaaacacaagtgttcctttcacttcccacagagaaaaagcgaaggagatcagaccccagtctgcatgccagtgacgatactgctactgtccctaaacaaagaaaaagtaaaggtgccacagttgtagcagcagctaatttgtcattggtttcacaacaaactgctacatcaccagaacctgacatggttatagaggaagaggagaaacataaaaatgaaagtgatggtcttgacgattattggaaagattttgcattggctgttgaaagcacaaagcttgacgaagttgatgaggcggcaattgaaaaggaagataatggaaagatggaggacatcgattgcaatcatgacatccggattcatgaagatttgggtcatgtatgccgtgtgtgtggtatgattgtgagaagagctgattcaataattgattatcagtggaaaaaggcttcaaggagaagaacgaatggctatggaggacattcaaaagatgctgatgagatagattgtggtactgttaaactgtctgaagatttcatagtcgcagatattgctattcatcctagacatgctcggataatgaaaccacatcagttggaaggtttcaactttttggttaagaatttgattggagacaagcctggaggttgcattctagctcatgccccaggtacagggaaaacatttatgcttataagcttcattcagagcttcatggcaaggtatccatctgcaaggcctcttgttgtgctgcccaaagggattctaggtatatggaagacagaaattaaacgatggcaagtgcaggatataccagtgtacgatttttactctgtcaaggctgaaaaaagagtagaacagttgcaaatcctcaaatcttgggaagacaagatgagtatactatttcttggatacaagcagttctccacaatcgtcactgatgatgggggcagcaatgtcacagctgcatgtcgagacaggctgcttaaggttcccaaccttctgatacttgacgaaggacatacacctagaaatcgggagactaatgtactcgaatcactaaatagagtggaaacaccacgcaaagtggttctttcgggtacacttttccagaatcatgttgaagaagtgtttaatatcttgaatctcgttcgcccaaagtttctcaggatggaatcatcccgtcctactgccagacgtataatgagtcaagttgaaatagttggtagaagttcgaaagggcttgctgatggcgcattcactaaggcagttgaagaaaccttattgaatgatgagaacttcaagagaaaagctcatgttattagaggtcttagagaactaacaaaggatgttcttcactattataagggtgatatcttagatgaactacctggcttagtagacttcagtgtgtttttgaagctcacacccaaacagaaagacattatttataagttggaagcacatgatcggttcaaaagaaatgcagtagggagtgcactgtacattcatccatgtctttcagaactttcagaggttaatgctgagcatagggctaacacctttagagatgatttagttgatagtctggtagattctatcactgtgagagatggcgtgaaggccaattttttcatgaatatcctgtcacttgctaattctgcaggagagaaagtgctagctttcagtcaatatatatctcccatgattttctttgaaaggctgctggtgaagaagaaaggctggcatgtggggaaagagatctttatgatctctggtgatactagccaagaagacagagaattggcaacggaccattttaacaactctgctgacgcaaaaattatgtttggttctatcaaggcatgtggggagggtatctccctcgttggtgcgtcgagagttgtcattctggacgtacacctgaacccatctgtcacccgtcaagcgattgggcgtgcattcaggcccggacagcagaagaaggtgtttgtgtacaggcttgtagctgccgattctgacgaggtaaaggtccatgagacagcattcaagaaagaagtcataccgaagctgtggttcgaatggagcgagcactgtactacggaagacttcaaacttggtcaaattgatattgatgactctggtgacgaactgttggatactaaagcaatccgcaaggatatcaaagcgctgtatagaaggtaacaagctttgtggccactggacaccatgtacatattgcagtgctgaccgtcgagctgatccttaaactgaagaaagagggtgttgcggtggctacattgcgcggtcattcccagctatatccgtggaatggcggcttcttttgttcgtagtatgtgccaacttggggcagcagtcagctgatccccagacacatttctagactcttttttaggctcaagtttctgagaattaacctgctatggcgtttagccttaagtaaatatttcgttcgcaacaataataacccagtaaacctaatttgttcttgtgcgtttgtggtggtggttcttgaaatttacctggcgccttcttcctgggctagatgctatgcaggtgtcacaggttggtttgttggcatgtagaatcgggaaatgctaatctcgaaagctcgtagtttccttttcccccccgggtgacatgtttattcacctcttactagttaccacgtccatttccaactataagatatgatactttg

SEQ ID NO: 39281 - DNA, 3658 bp, Zea Mays
gtcatttcctcctaaaatccccaagcctccaatccactgaactaaaccctagacatggcgggtagagactactgccggttgccggtgcgcccgcgcgacttctgaggccccgcccccgtcccggcgtcgccggaactggctccactgtcgcccccatcactgggactgggagagtgggagttcagagccgcagacgctggggcgccgggtcaccggaaggccgggaaggaaggtgtggccgcaagacgcaggcaggaggcatcgactcgactcaccatgtctcagtcaccgggaggacgggaaggcatatattacagcaggcagaggaaacctgagcgcaatggcagtgtatttacacctatagctgcaatgtattccagtggtcatgcactccctgttgcaaataggagccacggtttggtatttggcagtctgagcaaggactgggacgacattcgccagcgcaaggatcagttggtcaacttccttgctagtcttgaacgagcctctggagattctgcggcagctggcaaaatcgaagatagcaaattggccagtcctgtggagccaactgaacaaaaagagaaggctgccataatcgttcttgattcagacgatgaggacggaaatggttcaggaaacagtaagttggcatctgagactaacaaagaactcggaacatctggattgattaataatatcgcagaaaggatgacgtttaatgggagccaagcatttggaaccgtgcatacttatggagataagaacacacagattgttccgtatggtcaatgttctgctttagtgaatcagtttcctttgcaaaccagttggcaaccatctattcagtttgagagagtcgtgctgcagaaaaggcctgaggagcagcgaatgcaagatcttgtggctgctagcatagccgagaagagagcagaaacacaagtgttcctttcacttcccacagagaaaaagcgaaggagatcagaccccagtctgcatgccagtgacgatactgctactgtccctaaacaaagaaaaagtaaaggtgccacagttgtagcagcagctaatttgtcattggtttcacaacaaactgctacatcaccagaacctgacatggttatagaggaagaggagaaacataaaaatgaaagtgatggtcttgacgattattggaaagattttgcattggctgttgaaagcacaaagcttgacgaagttgatgaggcggcaattgaaaaggaagataatggaaagatggaggacatcgattgcaatcatgacatccggattcatgaagatttgggtcatgtatgccgtgtgtgtggtatgattgtgagaagagctgattcaataattgattatcagtggaaaaaggcttcaaggagaagaacgaatggctatggaggacattcaaaagatgctgatgagatagattgtggtactgttaaactgtctgaagatttcatagtcgcagatattgctattcatcctagacatgctcggataatgaaaccacatcagttggaaggtttcaactttttggttaagaatttgattggagacaagcctggaggttgcattctagctcatgccccaggtacagggaaaacatttatgcttataagcttcattcagagcttcatggcaaggtatccatctgcaaggcctcttgttgtgctgcccaaagggattctaggtatatggaagacagaaattaaacgatggcaagtgcaggatataccagtgtacgatttttactctgtcaaggctgaaaaaagagtagaacagttgcaaatcctcaaatcttgggaagacaagatgagtatactatttcttggatacaagcagttctccacaatcgtcactgatgatgggggcagcaatgtcacagctgcatgtcgagacaggctgcttaaggttcccaaccttctgatacttgacgaaggacatacacctagaaatcgggagactaatgtactcgaatcactaaatagagtggaaacaccacgcaaagtggttctttcgggtacacttttccagaatcatgttgaagaagtgtttaatatcttgaatctcgttcgcccaaagtttctcaggatggaatcatcccgtcctactgccagacgtataatgagtcaagttgaaatagttggtagaagttcgaaagggcttgctgatggcgcattcactaaggcagttgaagaaaccttattgaatgatgagaacttcaagagaaaagctcatgttattagaggtcttagagaactaacaaaggatgttcttcactattataagggtgatatcttagatgaactacctggcttagtagacttcagtgtgtttttgaagctcacacccaaacagaaagacattatttataagttggaagcacatgatcggttcaaaagaaatgcagtagggagtgcactgtacattcatccatgtctttcagaactttcagaggttaatgctgagcatagggctaacacctttagagatgatttagttgatagtctggtagattctatcactgtgagagatggcgtgaaggccaattttttcatgaatatcctgtcacttgctaattctgcaggagagaaagtgctagctttcagtcaatatatatctcccatgattttctttgaaaggctgctggtgaagaagaaaggctggcatgtggggaaagagatctttatgatctctggtgatactagccaagaagacagagaattggcaacggaccattttaacaactctgctgacgcaaaaattatgtttggttctatcaaggcatgtggggagggtatctccctcgttggtgcgtcgagagttgtcattctggacgtacacctgaacccatctgtcacccgtcaagcgattgggcgtgcattcaggcccggacagcagaagaaggtgtttgtgtacaggcttgtagctgccgattctgacgaggtaaaggtccatgagacagcattcaagaaagaagtcataccgaagctgtggttcgaatggagcgagcactgtactacggaagacttcaaacttggtcaaattgatattgatgactctggtgacgaactgttggatactaaagcaatccgcaaggatatcaaagcgctgtatagaaggtaacaagctttgtggccactggacaccatgtacatattgcagtgctgaccgtcgagctgatccttaaactgaagaaagaggtgacgggtgttgcggtggctacattgcgcggtcattcccagctatatccgtggaatggcggcttcttttgttcgtagtatgtgccaacttggggcagcagtcagctgatccccagacacatttctagactcttttttaggctcaagtttctgagaattaacctgctatggcgtttagccttaagtaaatatttcgttcgcaacaataataacccagtaaacctaatttgttcttgtgcgtttgtggtggtggttcttgaaatttacctggcgccttcttcctgggctagatgctatgcaggtgtcacaggttggtttgttggcatgtagaatcgggaaatgctaatctcgaaagctcgtagtttccttttcccccccgggtgacatgtttattcacctcttactagttaccacgtccatttccaactataagatatgatactttg

SEQ ID NO: 39282 - DNA, 3660 bp, Zea Mays
catttcctcctaaaatccccaagcctccaatccactgaactaaaccctagacatggcgggtagagactactgccggttgccggtgcgcccgcgcgacttctgaggccccgcccccgtcccggcgtcgccggaactggctccactgtcgcccccatcactgggactgggagagtgggagttcagagccgcagacgctggggcgccgggtcaccggaaggccgggaaggaaggtgtggccgcaagacgcaggcaggaggcatcgactcgactcaccatgtctcagtcaccgggaggacgggaaggcatatattacagcaggcagaggaaacctgagcgcaatggcagtgtatttacacctatagctgcaatgtattccagtggtcatgcactccctgttgcaaataggagccacggtttggtatttggcagtctgagcaaggactgggacgacattcgccagcgcaaggatcagttggtcaacttccttgctagtcttgaacgagcctctggagattctgcggcagctggcaaaatcgaagatagcaaattggccagtcctgtggagccaactgaacaaaaagagaaggctgccataatcgttcttgattcagacgatgaggacggaaatggttcaggaaacagtaagttggcatctgagactaacaaagaactcggaacatctggattgattaataatatcgcagaaaggatgacgtttaatgggagccaagcatttggaaccgtgcatacttatggagataagaacacacagattgttccgtatggtcaatgttctgctttagtgaatcagtttcctttgcaaaccagttggcaaccatctattcagtttgagagagtcgtgctgcagaaaaggcctgaggagcagcgaatgcaagatcttgtggctgctagcatagccgagaagagagcagaaacacaagtgttcctttcacttcccacagagaaaaagcgaaggagatcagaccccagtctgcatgccagtgacgatactgctactgtccctaaacaaagaaaaagtaaaggtgccacagttgtagcagcagctaatttgtcattggtttcacaacaaactgctacatcaccagaacctgacatggttatagaggaagaggagaaacataaaaatgaaagtgatggtcttgacgattattggaaagattttgcattggctgttgaaagcacaaagcttgacgaagttgatgaggcggcaattgaaaaggaagataatggaaagatggaggacatcgattgcaatcatgacatccggattcatgaagatttgggtcatgtatgccgtgtgtgtggtatgattgtgagaagagctgattcaataattgattatcagtggaaaaaggcttcaaggagaagaacgaatggctatggaggacattcaaaagatgctgatgagatagattgtggtactgttaaactgtctgaagatttcatagtcgcagatattgctattcatcctagacatgctcggataatgaaaccacatcagttggaaggtttcaactttttggttaagaatttgattggagacaagcctggaggttgcattctagctcatgccccaggtacagggaaaacatttatgcttataagcttcattcagagcttcatggcaaggtatccatctgcaaggcctcttgttgtgctgcccaaagggattctaggtatatggaagacagaaattaaacgatggcaagtgcaggatataccagtgtacgatttttactctgtcaaggctgaaaaaagagtagaacagttgcaaatcctcaaatcttgggaagacaagatgagtatactatttcttggatacaagcagttctccacaatcgtcactgatgatgggggcagcaatgtcacagctgcatgtcgagacaggctgcttaaggttcccaaccttctgatacttgacgaaggacatacacctagaaatcgggagactaatgtactcgaatcactaaatagagtggaaacaccacgcaaagtggttctttcgggtacacttttccagaatcatgttgaagaagtgtttaatatcttgaatctcgttcgcccaaagtttctcaggatggaatcatcccgtcctactgccagacgtataatgagtcaagttgaaatagttggtagaagttcgaaagggcttgctgatggcgcattcactaaggcagttgaagaaaccttattgaatgatgagaacttcaagagaaaagctcatgttattagaggtcttagagaactaacaaaggatgttcttcactattataagggtgatatcttagatgaactacctggcttagtagacttcagtgtgtttttgaagctcacacccaaacagaaagacattatttataagttggaagcacatgatcggttcaaaagaaatgcagtagggagtgcactgtacattcatccatgtctttcagaactttcagaggttaatgctgagcatagggctaacacctttagagatgatttagttgatagtctggtagattctatcactgtgagagatggcgtgaaggccaattttttcatgaatatcctgtcacttgctaattctgcaggagagaaagtgctagctttcagtcaatatatatctcccatgattttctttgaaaggctgctggtgaagaagaaaggctggcatgtggggaaagagatctttatgatctctggtgatactagccaagaagacagagaattggcaacggaccattttaacaactctgctgacgcaaaaattatgtttggttctatcaaggcatgtggggagggtatctccctcgttggtgcgtcgagagttgtcattctggacgtacacctgaacccatctgtcacccgtcaagcgattgggcgtgcattcaggcccggacagcagaagaaggtgtttgtgtacaggcttgtagctgccgattctgacgaggtaaaggtccatgagacagcattcaagaaagaagtcataccgaagctgtggttcgaatggagcgagcactgtactacggaagacttcaaacttggtcaaattgatattgatgactctggtgacgaactgttggatactaaagcaatccgcaaggatatcaaagcgctgtatagaaggtaggtaacaagctttgtggccactggacaccatgtacatattgcagtgctgaccgtcgagctgatccttaaactgaagaaagaggtgacgggtgttgcggtggctacattgcgcggtcattcccagctatatccgtggaatggcggcttcttttgttcgtagtatgtgccaacttggggcagcagtcagctgatccccagacacatttctagactcttttttaggctcaagtttctgagaattaacctgctatggcgtttagccttaagtaaatatttcgttcgcaacaataataacccagtaaacctaatttgttcttgtgcgtttgtggtggtggttcttgaaatttacctggcgccttcttcctgggctagatgctatgcaggtgtcacaggttggtttgttggcatgtagaatcgggaaatgctaatctcgaaagctcgtagtttccttttcccccccgggtgacatgtttattcacctcttactagttaccacgtccatttccaactataagatatgatactttg

SEQ ID NO: 39283 - DNA, 3509 bp, Zea Mays
gaggccccgcccccgtcccggcgtcgccggaactggctccactgtcgcccccatcactgggactgggagagtgggagttcagagccgcagacgctggggcgccgggtcaccggaaggccgggaaggaaggtgtggccgcaagacgcaggcaggaggcatatattacagcaggcagaggaaacctgagcgcaatggcagtgtatttacacctatagctgcaatgtattccagtggtcatgcactccctgttgcaaataggagccacggtttggtatttggcagtctgagcaaggactgggacgacattcgccagcgcaaggatcagttggtcaacttccttgctagtcttgaacgagcctctggagattctgcggcagctggcaaaatcgaagatagcaaattggccagtcctgtggagccaactgaacaaaaagagaaggctgccataatcgttcttgattcagacgatgaggacggaaatggttcaggaaacagtaagttggcatctgagactaacaaagaactcggaacatctggattgattaataatatcgcagaaaggatgacgtttaatgggagccaagcatttggaaccgtgcatacttatggagataagaacacacagattgttccgtatggtcaatgttctgctttagtgaatcagtttcctttgcaaaccagttggcaaccatctattcagtttgagagagtcgtgctgcagaaaaggcctgaggagcagcgaatgcaagatcttgtggctgctagcatagccgagaagagagcagaaacacaagtgttcctttcacttcccacagagaaaaagcgaaggagatcagaccccagtctgcatgccagtgacgatactgctactgtccctaaacaaagaaaaagtaaaggtgccacagttgtagcagcagctaatttgtcattggtttcacaacaaactgctacatcaccagaacctgacatggttatagaggaagaggagaaacataaaaatgaaagtgatggtcttgacgattattggaaagattttgcattggctgttgaaagcacaaagcttgacgaagttgatgaggcggcaattgaaaaggaagataatggaaagatggaggacatcgattgcaatcatgacatccggattcatgaagatttgggtcatgtatgccgtgtgtgtggtatgattgtgagaagagctgattcaataattgattatcagtggaaaaaggcttcaaggagaagaacgaatggctatggaggacattcaaaagatgctgatgagatagattgtggtactgttaaactgtctgaagatttcatagtcgcagatattgctattcatcctagacatgctcggataatgaaaccacatcagttggaaggtttcaactttttggttaagaatttgattggagacaagcctggaggttgcattctagctcatgccccaggtacagggaaaacatttatgcttataagcttcattcagagcttcatggcaaggtatccatctgcaaggcctcttgttgtgctgcccaaagggattctaggtatatggaagacagaaattaaacgatggcaagtgcaggatataccagtgtacgatttttactctgtcaaggctgaaaaaagagtagaacagttgcaaatcctcaaatcttgggaagacaagatgagtatactatttcttggatacaagcagttctccacaatcgtcactgatgatgggggcagcaatgtcacagctgcatgtcgagacaggctgcttaaggttcccaaccttctgatacttgacgaaggacatacacctagaaatcgggagactaatgtactcgaatcactaaatagagtggaaacaccacgcaaagtggttctttcgggtacacttttccagaatcatgttgaagaagtgtttaatatcttgaatctcgttcgcccaaagtttctcaggatggaatcatcccgtcctactgccagacgtataatgagtcaagttgaaatagttggtagaagttcgaaagggcttgctgatggcgcattcactaaggcagttgaagaaaccttattgaatgatgagaacttcaagagaaaagctcatgttattagaggtcttagagaactaacaaaggatgttcttcactattataagggtgatatcttagatgaactacctggcttagtagacttcagtgtgtttttgaagctcacacccaaacagaaagacattatttataagttggaagcacatgatcggttcaaaagaaatgcagtagggagtgcactgtacattcatccatgtctttcagaactttcagaggttaatgctgagcatagggctaacacctttagagatgatttagttgatagtctggtagattctatcactgtgagagatggcgtgaaggccaattttttcatgaatatcctgtcacttgctaattctgcaggagagaaagtgctagctttcagtcaatatatatctcccatgattttctttgaaaggctgctggtgaagaagaaaggctggcatgtggggaaagagatctttatgatctctggtgatactagccaagaagacagagaattggcaacggaccattttaacaactctgctgacgcaaaaattatgtttggttctatcaaggcatgtggggagggtatctccctcgttggtgcgtcgagagttgtcattctggacgtacacctgaacccatctgtcacccgtcaagcgattgggcgtgcattcaggcccggacagcagaagaaggtgtttgtgtacaggcttgtagctgccgattctgacgaggtaaaggtccatgagacagcattcaagaaagaagtcataccgaagctgtggttcgaatggagcgagcactgtactacggaagacttcaaacttggtcaaattgatattgatgactctggtgacgaactgttggatactaaagcaatccgcaaggatatcaaagcgctgtatagaaggtaacaagctttgtggccactggacaccatgtacatattgcagtgctgaccgtcgagctgatccttaaactgaagaaagaggtgacgggtgttgcggtggctacattgcgcggtcattcccagctatatccgtggaatggcggcttcttttgttcgtagtatgtgccaacttggggcagcagtcagctgatccccagacacatttctagactcttttttaggctcaagtttctgagaattaacctgctatggcgtttagccttaagtaaatatttcgttcgcaacaataataacccagtaaacctaatttgttcttgtgcgtttgtggtggtggttcttgaaatttacctggcgccttcttcctgggctagatgctatgcaggtgtcacaggttggtttgttggcatgtagaatcgggaaatgctaatctcgaaagctcgtagtttccttttcccccccgggtgacatgtttattcacctcttactagttaccacgtccatttccaactataagatatgatactttg

SEQ ID NO: 39284 - DNA, 3396 bp, Zea Mays
ctcgtctctgtttcgtctagaagctgttgcaaacatgccgttgcatatattacagcaggcagaggaaacctgagcgcaatggcagtgtatttacacctatagctgcaatgtattccagtggtcatgcactccctgttgcaaataggagccacggtttggtatttggcagtctgagcaaggactgggacgacattcgccagcgcaaggatcagttggtcaacttccttgctagtcttgaacgagcctctggagattctgcggcagctggcaaaatcgaagatagcaaattggccagtcctgtggagccaactgaacaaaaagagaaggctgccataatcgttcttgattcagacgatgaggacggaaatggttcaggaaacagtaagttggcatctgagactaacaaagaactcggaacatctggattgattaataatatcgcagaaaggatgacgtttaatgggagccaagcatttggaaccgtgcatacttatggagataagaacacacagattgttccgtatggtcaatgttctgctttagtgaatcagtttcctttgcaaaccagttggcaaccatctattcagtttgagagagtcgtgctgcagaaaaggcctgaggagcagcgaatgcaagatcttgtggctgctagcatagccgagaagagagcagaaacacaagtgttcctttcacttcccacagagaaaaagcgaaggagatcagaccccagtctgcatgccagtgacgatactgctactgtccctaaacaaagaaaaagtaaaggtgccacagttgtagcagcagctaatttgtcattggtttcacaacaaactgctacatcaccagaacctgacatggttatagaggaagaggagaaacataaaaatgaaagtgatggtcttgacgattattggaaagattttgcattggctgttgaaagcacaaagcttgacgaagttgatgaggcggcaattgaaaaggaagataatggaaagatggaggacatcgattgcaatcatgacatccggattcatgaagatttgggtcatgtatgccgtgtgtgtggtatgattgtgagaagagctgattcaataattgattatcagtggaaaaaggcttcaaggagaagaacgaatggctatggaggacattcaaaagatgctgatgagatagattgtggtactgttaaactgtctgaagatttcatagtcgcagatattgctattcatcctagacatgctcggataatgaaaccacatcagttggaaggtttcaactttttggttaagaatttgattggagacaagcctggaggttgcattctagctcatgccccaggtacagggaaaacatttatgcttataagcttcattcagagcttcatggcaaggtatccatctgcaaggcctcttgttgtgctgcccaaagggattctaggtatatggaagacagaaattaaacgatggcaagtgcaggatataccagtgtacgatttttactctgtcaaggctgaaaaaagagtagaacagttgcaaatcctcaaatcttgggaagacaagatgagtatactatttcttggatacaagcagttctccacaatcgtcactgatgatgggggcagcaatgtcacagctgcatgtcgagacaggctgcttaaggttcccaaccttctgatacttgacgaaggacatacacctagaaatcgggagactaatgtactcgaatcactaaatagagtggaaacaccacgcaaagtggttctttcgggtacacttttccagaatcatgttgaagaagtgtttaatatcttgaatctcgttcgcccaaagtttctcaggatggaatcatcccgtcctactgccagacgtataatgagtcaagttgaaatagttggtagaagttcgaaagggcttgctgatggcgcattcactaaggcagttgaagaaaccttattgaatgatgagaacttcaagagaaaagctcatgttattagaggtcttagagaactaacaaaggatgttcttcactattataagggtgatatcttagatgaactacctggcttagtagacttcagtgtgtttttgaagctcacacccaaacagaaagacattatttataagttggaagcacatgatcggttcaaaagaaatgcagtagggagtgcactgtacattcatccatgtctttcagaactttcagaggttaatgctgagcatagggctaacacctttagagatgatttagttgatagtctggtagattctatcactgtgagagatggcgtgaaggccaattttttcatgaatatcctgtcacttgctaattctgcaggagagaaagtgctagctttcagtcaatatatatctcccatgattttctttgaaaggctgctggtgaagaagaaaggctggcatgtggggaaagagatctttatgatctctggtgatactagccaagaagacagagaattggcaacggaccattttaacaactctgctgacgcaaaaattatgtttggttctatcaaggcatgtggggagggtatctccctcgttggtgcgtcgagagttgtcattctggacgtacacctgaacccatctgtcacccgtcaagcgattgggcgtgcattcaggcccggacagcagaagaaggtgtttgtgtacaggcttgtagctgccgattctgacgaggtaaaggtccatgagacagcattcaagaaagaagtcataccgaagctgtggttcgaatggagcgagcactgtactacggaagacttcaaacttggtcaaattgatattgatgactctggtgacgaactgttggatactaaagcaatccgcaaggatatcaaagcgctgtatagaaggtaacaagctttgtggccactggacaccatgtacatattgcagtgctgaccgtcgagctgatccttaaactgaagaaagaggtgacgggtgttgcggtggctacattgcgcggtcattcccagctatatccgtggaatggcggcttcttttgttcgtagtatgtgccaacttggggcagcagtcagctgatccccagacacatttctagactcttttttaggctcaagtttctgagaattaacctgctatggcgtttagccttaagtaaatatttcgttcgcaacaataataacccagtaaacctaatttgttcttgtgcgtttgtggtggtggttcttgaaatttacctggcgccttcttcctgggctagatgctatgcaggtgtcacaggttggtttgttggcatgtagaatcgggaaatgctaatctcgaaagctcgtagtttccttttcccccccgggtgacatgtttattcacctcttactagttaccacgtccatttccaactataagatatgatactttg

SEQ ID NO: 39285 - DNA, 2207 bp, Zea Mays
caaccacgggcgcgaaacgcgaccgggtccacctgtcatccataccacggctcgccttcctaatctcgggactcgggtccgcgatgcgagccaccaagagatccacgaatatacccatcccattccccacaaggctccgtcccttcggcggcggcggcgatgtctctcccccctggcccggcggacagtggcaccggcaccggagacgactggttcctcgactgcggcatcctcgacgacctgcccgccgcggcctgcggagccttcccgtgggacgcgtccccgtcgtcttccaaccccaggtccgcccagatcgaccgaccgattcctcccttccccacgccacctcctagttccggaaggcacggatgctttgtttggcgtacggtcctggcgacaggtcccgtgaccccggcgttccgtatctttgcgatgagtatattgtggaatcgtgacgggcggatgaattgttttggggatttgggctgtgtagtagtctactagatgcatgcgcgtggaggcgtctgatccgtagaggtggtttctttacactgcggatcttccagtctgttgctcgtgctataaacctgccgaggctgcttttgtacaggttaaattagattagagttcccaaacaaaaaaaatggtttcctaaaaaaacaaggctgctgagtttgcgcgctgcaagataacttgccttggtaggtttgttctcgtgtttccgtgactgtgcttatgagttatgacagtggaacggatgtattacgtgtgactatgaccaatgatttgctcaaacgattgagatggatgttttaattgattgatggcgattgtaataccagtcttgatgataagtggtgtggctgcgagtgatgggatgccatgtgttgctcggccatggatggaaatggaatcgtgacacctgactggagagccaaagatacaacttctcatcttctcctgtcatgtatgcgctgatgctgctatgatattaattttgagagtaatttgcagtgatcttgttgtttgaccttttttttcttgctttactgaaagcggtccactccatatgctcagaattcaatgccttacatgtagctagttgtctgattactttcgtccatgaatggtttccagttaattggttgagaacagtgtggaagtgggcagctatgtaaacgccaatgatgcattcaaggagcccaatgatgtcttcaaggagcctggcagcagtaaacgtttacggtcaggatccagtgatatgccaacatctaaagcttgcagggaaagaatgaggaggaacaagctgaatgacaggtttcttgaactggggtctgcattagaacctgggaagccagtgaaagctgacaaagctgccatcctaagcgatgctactcgcatggttattcagctccgttcagaatcacagcaactgaaggagactaatggcagcctcgaagaaaagattaaagaactaaaggccgagaaggacgagcttcgcgacgagaagcagaaactgaaactggagaaggagagtctagagcaccagatgaagctgatggcatcggctccagcctacatgccccatccgaccctgatgccggcgcctttcgcccaggcgcccctagctccattccatgcccagggccaagctgcagggcagaagctgatgatgcccttcgtcggctacccagggtacccaatgtggcagttcatgccgccttcagaggtcgacacctcgaaggacagcgaggcgtgccctcctgtcgcatgatcaccttgatggggctggtcctgctcacaccatgtggattagccgcaactagttgtcgttgtcgatccattgatggggtataactgatgttcttaggctatctccagcagcctctctatcctattctctatcttactccctattttaaattttactctgtaaacagtacagtctatagtgtaagacaatgttttgcatgtttatatccacgcttggctggagatgggcatggtagtctgttggtgaccaaggaagctgtgatatctgtggcgaggtgccctgctagaggctcctttaatgggtgtacaattttcgtggtggaaagaagaatgttcgttcttgttctccatagcaacagtgtcatattatctatctatgccatatatattttatatttgacatgtttgtgatacaagcaaaatttatatttaga

SEQ ID NO: 39286 - DNA, 2019 bp, Zea Mays
caaccacgggcgcgaaacgcgaccgggtccacctgtcatccataccacggctcgccttcctaatctcgggactcgggtccgcgatgcgagccaccaagagatccacgaatatacccatcccattccccacaaggctccgtcccttcggcggcggcggcgatgtctctcccccctggcccggcggacagtggcaccggcaccggagacgactggttcctcgactgcggcatcctcgacgacctgcccgccgcggcctgcggagccttcccgtgggacgcgtccccgtcgtcttccaaccccaggtccgcccagatcgaccgaccgattcctcccttccccacgccacctcctagttccggaaggcacggatgctttgtttggcgtacggtcctggcgacaggtcccgtgaccccggcgttccgtatctttgcgatgagtatattgtggaatcgtgacgggcggatgaattgttttggggatttgggctgtgtagtagtctactagatgcatgcgcgtggaggcgtctgatccgtagaggtggtttctttacactgcggatcttccagtctgttgctcgtgctataaacctgccgaggctgcttttgtacaggttaaattagattagagttcccaaacaaaaaaaatggtttcctaaaaaaacaaggctgctgagtttgcgcgctgcaagataacttgccttggtaggtttgttctcgtgtttccgtgactgtgcttatgagttatgacagtggaacggatgtattacgtgtgactatgaccaatgatttgctcaaacgattgagatggatgttttaattgattgatggcgattgtaataccagtcttgatgataagtggtgtggctgcgagtgatgggatgccatgtgttgctcggccatggatggaaatggaatcgtgacacctgactggagagccaaagatacaacttctcatcttctcctgtcattgtggaagtgggcagctatgtaaacgccaatgatgcattcaaggagcccaatgatgtcttcaaggagcctggcagcagtaaacgtttacggtcaggatccagtgatatgccaacatctaaagcttgcagggaaagaatgaggaggaacaagctgaatgacaggtttcttgaactggggtctgcattagaacctgggaagccagtgaaagctgacaaagctgccatcctaagcgatgctactcgcatggttattcagctccgttcagaatcacagcaactgaaggagactaatggcagcctcgaagaaaagattaaagaactaaaggccgagaaggacgagcttcgcgacgagaagcagaaactgaaactggagaaggagagtctagagcaccagatgaagctgatggcatcggctccagcctacatgccccatccgaccctgatgccggcgcctttcgcccaggcgcccctagctccattccatgcccagggccaagctgcagggcagaagctgatgatgcccttcgtcggctacccagggtacccaatgtggcagttcatgccgccttcagaggtcgacacctcgaaggacagcgaggcgtgccctcctgtcgcatgatcaccttgatggggctggtcctgctcacaccatgtggattagccgcaactagttgtcgttgtcgatccattgatggggtataactgatgttcttaggctatctccagcagcctctctatcctattctctatcttactccctattttaaattttactctgtaaacagtacagtctatagtgtaagacaatgttttgcatgtttatatccacgcttggctggagatgggcatggtagtctgttggtgaccaaggaagctgtgatatctgtggcgaggtgccctgctagaggctcctttaatgggtgtacaattttcgtggtggaaagaagaatgttcgttcttgttctccatagcaacagtgtcatattatctatctatgccatatatattttatatttgacatgtttgtgatacaagcaaaatttatatttaga

SEQ ID NO: 39287 - DNA, 1033 bp, Zea Mays
gtttccagttaattggttgagaacagtgtggaagtgggcagctatgtaaacgccaatgatgcattcaaggagcccaatgatgtcttcaaggagcctggcagcagtaaacgggaaagaatgaggaggaacaagctgaatgacaggtttcttgaactggggtctgcattagaacctgggaagccagtgaaagctgacaaagctgccatcctaagcgatgctactcgcatggttattcagctccgttcagaatcacagcaactgaaggagactaatggcagcctcgaagaaaagattaaagaactaaaggccgagaaggacgagcttcgcgacgagaagcagaaactgaaactggagaaggagagtctagagcaccagatgaagctgatggcatcggctccagcctacatgccccatccgaccctgatgccggcgcctttcgcccaggcgcccctagctccattccatgcccagggccaagctgcagggcagaagctgatgatgcccttcgtcggctacccagggtacccaatgtggcagttcatgccgccttcagaggtcgacacctcgaaggacagcgaggcgtgccctcctgtcgcatgatcaccttgatggggctggtcctgctcacaccatgtggattagccgcaactagttgtcgttgtcgatccattgatggggtataactgatgttcttaggctatctccagcagcctctctatcctattctctatcttactccctattttaaattttactctgtaaacagtacagtctatagtgtaagacaatgttttgcatgtttatatccacgcttggctggagatgggcatggtagtctgttggtgaccaaggaagctgtgatatctgtggcgaggtgccctgctagaggctcctttaatgggtgtacaattttcgtggtggaaagaagaatgttcgttcttgttctccatagcaacagtgtcatattatctatctatgccatatatattttatatttgacatgtttgtgatacaagcaaaatttatatttaga

SEQ ID NO: 39288 - DNA, 1152 bp, Zea Mays
cggcctggtccatgctacgtgggctggatcctgcagacccattcctggatgaaatcggcctgctacaataaagccgccgtcctgcaagtctgggacggaggaaggagaagagggagagagtggtggggattcggcatggacatcatcacgcagctgcaggaccagctcgacgagatggccgtgctggccgtcaacaccttcggcacgctgcagagggacgcgccgccggaccgcctctccagcagctaccctgacccgctcaaccccaaccctaagcccgaggacgactccaaaccccaggtccaggcccagcccggcgcgccgccgccgccaccggcgcaggcgcaggcgcaggcgcagccgcccgcgcctgacctcaccgagcaacccaaggctatgagccgcgccctcgtcctcgcggccaagaagtttgatgcacttgttgcagcagtgccactatcatcagaagaggatcaagtgaaaagaatccaagagctacaggcagagaatgaagtcgtgggactggagctccagaagcaacttgaagctgccgaaagggagttgaagcaggttgaggtgctgtttaatgaagcaacagacaattgcataaattttaagaagctagattaattacgttaatgtttgctgaaaagaaactgttcctgtggatggagtgtggaggatgaatgccatacctgagacctttgacacctgttcctaaactcccctccagccactggcctggagtagaactgtatttgggaaataaaagcacggaaattctctctacagtgctcagacatgatactggttggttctgcaaggatactccctgctcactcacacagacacaataacaaaacaaagagaaggaaaagatgcatcattcccctacagccttattcatcgtccgttgagcacagcagcagcagagcagcccgtcgtgtcaagcatatttgcaggtgccaaggcctgcaagaggatccaatgatccatcatccggtgtcagctcccccaacacggttcacgggcaatgagacactcacagcaagcaaggaagcactcactggggtcagtgatggtgattatgccggtgccgttgaagaagcagttccacgagttcctcccccgggcctggtagtaggcgttcat

SEQ ID NO: 39289 - DNA, 1262 bp, Zea Mays
cggcctggtccatgctacgtgggctggatcctgcagacccattcctggatgaaatcggcctgctacaataaagccgccgtcctgcaagtctgggacggaggaaggagaagagggagagagtggtggggattcggcatggacatcatcacgcagctgcaggaccagctcgacgagatggccgtgctggccgtcaacaccttcggcacgctgcagagggacgcgccgccggaccgcctctccagcagctaccctgacccgctcaaccccaaccctaagcccgaggacgactccaaaccccaggtccaggcccagcccggcgcgccgccgccgccaccggcgcaggcgcaggcgcaggcgcagccgcccgcgcctgacctcaccgagcaacccaaggctatgagccgcgccctcgtcctcgcggccaagaagtttgatgcacttgttgcagcagtgccactatcatcagaagaggatcaagtgaaaagaatccaagagctacaggcagagaatgaagtcgtgggactggagctccagaagcaacttgaagctgccgaaagggagttgaagcaggttgaggtgctgtttaatgaagcaacagacaattgcataaattttaagaagctagattaattacgttaatgtttgctgaaaagaaactgttcctgtggatggagtgtggaggatgaatgccagtaagaactttatattccgtcttttcagattctctactagtgaacaataattgcacttagcttttgtgtactggcattctgatctgccggattaggattgacctttggttgtaaggtgcaatgtttttagtatgaactgacgcttgaactgtggtggtctttttaatggatctggcacctggcttcctctgggatttcttctatattttgtgctcagacatgatactggttggttctgcaaggatactccctgctcactcacacagacacaataacaaaacaaagagaaggaaaagatgcatcattcccctacagccttattcatcgtccgttgagcacagcagcagcagagcagcccgtcgtgtcaagcatatttgcaggtgccaaggcctgcaagaggatccaatgatccatcatccggtgtcagctcccccaacacggttcacgggcaatgagacactcacagcaagcaaggaagcactcactggggtcagtgatggtgattatgccggtgccgttgaagaagcagttccacgagttcctcccccgggcctggtagtaggcgttcat

SEQ ID NO: 39290 - DNA, 1045 bp, Zea Mays
cggcctggtccatgctacgtgggctggatcctgcagacccattcctggatgaaatcggcctgctacaataaagccgccgtcctgcaagtctgggacggaggaaggagaagagggagagagtggtggggattcggcatggacatcatcacgcagctgcaggaccagctcgacgagatggccgtgctggccgtcaacaccttcggcacgctgcagagggacgcgccgccggaccgcctctccagcagctaccctgacccgctcaaccccaaccctaagcccgaggacgactccaaaccccaggtccaggcccagcccggcgcgccgccgccgccaccggcgcaggcgcaggcgcaggcgcagccgcccgcgcctgacctcaccgagcaacccaaggctatgagccgcgccctcgtcctcgcggccaagaagtttgatgcacttgttgcagcagtgccactatcatcagaagaggatcaagtgaaaagaatccaagagctacaggcagagaatgaagtcgtgggactggagctccagaagcaacttgaagctgccgaaagggagttgaagcaggttgaggtgctgtttaatgaagcaacagacaattgcataaattttaagaagctagattaattacgttaatgtttgctgaaaagaaactgttcctgtggatggagtgtggaggatgaatgccaacatgatactggttggttctgcaaggatactccctgctcactcacacagacacaataacaaaacaaagagaaggaaaagatgcatcattcccctacagccttattcatcgtccgttgagcacagcagcagcagagcagcccgtcgtgtcaagcatatttgcaggtgccaaggcctgcaagaggatccaatgatccatcatccggtgtcagctcccccaacacggttcacgggcaatgagacactcacagcaagcaaggaagcactcactggggtcagtgatggtgattatgccggtgccgttgaagaagcagttccacgagttcctcccccgggcctggtagtaggcgttcat

SEQ ID NO: 39291 - DNA, 1112 bp, Zea Mays
cccacacgtcagtgataggaagcaactacagaggaactctttgccctaccctagcgtatcgagcgctctccccgttcccctgccggcctgccccaggcccccagctaaaccgccgccgagacgcggcattcccgtccctttcccgccgccactaccttcgccttcgcgccacggccgattctcccatggcgcaggcctcgtccttggtggcggtgctgcgccgccgcacccccgccgctgcccgcctgcttcctcaccggctcgtctcctccgctcccgctccggcgttcgcctcgtcctcattggtcccgctccccttgccaagcctgatcgagggagacagatgcggcggcggcctctccgcttcgttcggctcccactcacgcctccggcttcctcggcgacaccatgcggttgctatggctaccaggacagcgcaccaagttgcttcgagccccgagagcccagcggcggtgacgtcgttgtcgtcaagtgaggctagcactagcactgctgcttcagagcactctgagttggtcgattttatcaagtcagcgtttgggaagcttgaaggtcaaaatcattgttggttcaacatcatgaatgacacttggatgaacttgaaccatgaaggaatatatcttcttcttttgtatcaatcttgtggaacattgaacaacgacggcaaacatctaattgcttttgagagcttgaaacatctgcaacagaggtatccacgcctgaatgtttttgctttgcaacatgggagtgatgttagttctttagcttctcaaagccaagctttccgcacaatagtgaaggagtacatcacatttcctatcttgatctcagacaaaaacttctccaatgttctaaggaccctgtactattcacaaactgggttgaggagcctgatgtcatgattaaggccatagatgaacttaccacgtctaaagaaaaaccttctgaaaatgttctgtcaagagtttcttggcagaaagaagaggttgtcaaagagccatctgttggttccttcagaaacttgttactttaccacccagtcaactgtatctttggctttgccatccagaagtgataatctacaattttat

SEQ ID NO: 39292 - DNA, 2922 bp, Zea Mays
cccacacgtcagtgataggaagcaactacagaggaactctttgccctaccctagcgtatcgagcgctctccccgttcccctgccggcctgccccaggcccccagctaaaccgccgccgagacgcggcattcccgtccctttcccgccgccactaccttcgccttcgcgccacggccgattctcccatggcgcaggcctcgtccttggtggcggtgctgcgccgccgcacccccgccgctgcccgcctgcttcctcaccggctcgtctcctccgctcccgctccggcgttcgcctcgtcctcattggtcccgctccccttgccaagcctgatcgagggagacagatgcggcggcggcctctccgcttcgttcggctcccactcacgcctccggcttcctcggcgacaccatgcggttgctatggctaccaggacagcgcaccaagttgcttcgagccccgagagcccagcggcggtgacgtcgttgtcgtcaagtgaggctagcactagcactgctgcttcagagcactctgagttggtcgattttatcaagtcagcgtttgggaagcttgaaggtcaaaatcattgttggttcaacatcatgaatgacacttggatgaacttgaaccatgaaggaatatatcttcttcttttgtatcaatcttgtggaacattgaacaacgacggcaaacatctaattgcttttgagagcttgaaacatctgcaacagaggtatccacgcctgaatgtttttgctttgcaacatgggagtgatgttagttctttagcttctcaaagccaagctttccgcacaatagtgaaggagtacatcacatttcctatcttgatctcagacaaaaacttctccaatatgacaaatggtgcttgctacttgctatttgaaggttctaaggaccctgtactattcacaaactgggttgaggagcctgatgtcatgattaaggccatagatgaacttaccacgtctaaagaaaaaccttctgaaaatgttctgtcaagagtttcttggcagaaagaagaggttgtcaaagagccatctgttggttccttcagaaacttgttactttaccacccagcatgtgtatcagttgatgaagatggggatcgcatttttatctctgacagtaaccatcataggatcatcattagcaacagcaatgggatgattttagattatattggatcttccccaggctatgaggatggagagtttgagtcagccaaattcttgcgcccagcttcatcattttatcacgctgctgaagactgtctatttattgtagattcagagaatcatgcagtcagaaaagcagatttgggaagaaggactttacaaacagtttatccagtcttcaataaaagcaatggcatctggagctggattaccgataagcttggtatgagaaaagaagctactccaactattcaagattttcatgcagactccatggcacttccatggcatttgatacaaatttcagaggacaccttattagtcgcagaccgcagctttgaaactccgtggaccctgacaatatcaactggcgaaaagcaggatattggaagagagctgaaataatggagtcatatcagaaaactgtaaaagaaaggtgtgctcttattaaggatatgcacatgaattggtcatcaagtgctagagtgctttctgattcagtgcagaagattcccaacaatgagcttatatcatctatagcaagatttcagaattacattgtcttctgtgatacagatggtcaaagggttctgaagcacgacttggataccaagaccacctcaaccattcaattttctgactgtgaggtacttgggttgccatattggtctgtttgcaatctcgagagagtgtcaacctgggggtattcatctggacagttacaggagcatgcgcagcaagtagacgtgcttcctggaagatgcaacatcaccgtctacgtggacattccggttggcactgaacttgccgcgcctttggtggataattgcatctggcgccaagtaaggggatctggcgctgaggtctctggttctgatgggccagacacggccacagagaaggtcggcatcgcgcagcagtggtatgacgagctggacaacctggccttctctgaggtggcggaggagcctactgccgctgcgcatggagacggcaacactgacgatcaaagttaccaggagcagagaagagtgcaattcacctgcacagtgaacgtcagccctgggacgtgtgagctggtggcctctgtcgcgctgtatctgaggctggctggaaagagaacgacgaccgacggcgtggagctcgtcaagcgggtgatgggcgggtgccagttccgcgaggagcaggccggcgtggagctgctggcgcggtgccgcgaggacgacgacgcgacgggcctggtggtggtgaagccggtgcacctgcggctgcggctggtgtgcggcgaccacccggccggcgccaccaacaaggagaccatcagcaccgagtccagcctcaagatcaatgtcaccttggactagctagtggttctgaattctgattttggattttgatccgtgtctatttttattctttggaacctgtctatttttattctttggattttgatccgggctggcgatgggaacgtgtcagtacgtgtatgcgactatgcgatggtaaggaacaagctgactgacaccatctcatgtactggagcaatatagttgacctagttgtgccgagaacttagctggacctgtcttgacaagcctcgtcctggccttttcgccaggcctgacgttttgattttgtctcaacacatgctggacctttttcaacagtgattcataggatgactgttgtaggtgacatattgttcaatgcaggcaacgtatttaaacta

SEQ ID NO: 39293 - DNA, 2877 bp, Zea Mays
cgagcgctctccccgttcccctgccggcctgccccaggcccccagctaaaccgccgccgagacgcggcattcccgtccctttcccgccgccactaccttcgccttcgcgccacggccgattctcccatggcgcaggcctcgtccttggtggcggtgctgcgccgccgcacccccgccgctgcccgcctgcttcctcaccggctcgtctcctccgctcccgctccggcgttcgcctcgtcctcattggtcccgctccccttgccaagcctgatcgagggagacagatgcggcggcggcctctccgcttcgttcggctcccactcacgcctccggcttcctcggcgacaccatgcggttgctatggctaccaggacagcgcaccaagttgcttcgagccccgagagcccagcggcggtgacgtcgttgtcgtcaagtgaggctagcactagcactgctgcttcagagcactctgagttggtcgattttatcaagtcagcgtttgggaagcttgaaggtcaaaatcattgttggttcaacatcatgaatgacacttggatgaacttgaaccatgaaggaatatatcttcttcttttgtatcaatcttgtggaacattgaacaacgacggcaaacatctaattgcttttgagagcttgaaacatctgcaacagaggtatccacgcctgaatgtttttgctttgcaacatgggagtgatgttagttctttagcttctcaaagccaagctttccgcacaatagtgaaggagtacatcacatttcctatcttgatctcagacaaaaacttctccaatatgacaaatggtgcttgctacttgctatttgaaggttctaaggaccctgtactattcacaaactgggttgaggagcctgatgtcatgattaaggccatagatgaacttaccacgtctaaagaaaaaccttctgaaaatgttctgtcaagagtttcttggcagaaagaagaggttgtcaaagagccatctgttggttccttcagaaacttgttactttaccacccagcatgtgtatcagttgatgaagatggggatcgcatttttatctctgacagtaaccatcataggatcatcattagcaacagcaatgggatgattttagattatattggatcttccccaggctatgaggatggagagtttgagtcagccaaattcttgcgcccagcttcatcattttatcacgctgctgaagactgtctatttattgtagattcagagaatcatgcagtcagaaaagcagatttgggaagaaggactttacaaacagtttatccagtcttcaataaaagcaatggcatctggagctggattaccgataagcttggtatgagaaaagaagctactccaactattcaagattttcatgcagactccatggcacttccatggcatttgatacaaatttcagaggacaccttattagtcgcagaccgcagctttgaaactccgtggaccctgacaatatcaactggcgaaaagcaggatattggaagagttgtgtgaaggcagagctgaaataatggagtcatatcagaaaactgtaaaagaaaggtgtgctcttattaaggatatgcacatgaattggtcatcaagtgctagagtgctttctgattcagtgcagaagattcccaacaatgagcttatatcatctatagcaagatttcagaattacattgtcttctgtgatacagatggtcaaagggttctgaagcacgacttggataccaagaccacctcaaccattcaattttctgactgtgaggtacttgggttgccatattggtctgtttgcaatctcgagagagtgtcaacctgggggtattcatctggacagttacaggagcatgcgcagcaagtagacgtgcttcctggaagatgcaacatcaccgtctacgtggacattccggttggcactgaacttgccgcgcctttggtggataattgcatctggcgccaagtaaggggatctggcgctgaggtctctggttctgatgggccagacacggccacagagaaggtcggcatcgcgcagcagtggtatgacgagctggacaacctggccttctctgaggtggcggaggagcctactgccgctgcgcatggagacggcaacactgacgatcaaagttaccaggagcagagaagagtgcaattcacctgcacagtgaacgtcagccctgggacgtgtgagctggtggcctctgtcgcgctgtatctgaggctggctggaaagagaacgacgaccgacggcgtggagctcgtcaagcgggtgatgggcgggtgccagttccgcgaggagcaggccggcgtggagctgctggcgcggtgccgcgaggacgacgacgcgacgggcctggtggtggtgaagccggtgcacctgcggctgcggctggtgtgcggcgaccacccggccggcgccaccaacaaggagaccatcagcaccgagtccagcctcaagatcaatgtcaccttggactagctagtggttctgaattctgattttggattttgatccgtgtctatttttattctttggaacctgtctatttttattctttggattttgatccgggctggcgatgggaacgtgtcagtacgtgtatgcgactatgcgatggtaaggaacaagctgactgacaccatctcatgtactggagcaatatagttgacctagttgtgccgagaacttagctggacctgtcttgacaagcctcgtcctggccttttcgccaggcctgacgttttgattttgtctcaacacatgctggacctttttcaacagtgattcataggatgactgttgtaggtgacatattgttcaatgcaggcaacgtatttaaacta

SEQ ID NO: 39294 - DNA, 2688 bp, Zea Mays
ctctccccgttcccctgccggcctgccccaggcccccagctaaaccgccgccgagacgcggcattcccgtccctttcccgccgccactaccttcgccttcgcgccacggccgattctcccatggcgcaggcctcgtccttggtggcggtgctgcgccgccgcacccccgccgctgcccgcctgcttcctcaccggctcgtctcctccgctcccgctccggcgttcgcctcgtcctcattggtcccgctccccttgccaagcctgatcgagggagacagatgcggcggcggcctctccgcttcgttcggctcccactcacgcctccggcttcctcggcgacaccatgcggttgctatggctaccaggacagcgcaccaagttgcttcgagccccgagagcccagcggcggtgacgtcgttgtcgtcaagtgaggctagcactagcactgctgcttcagagcactctgagttggtcgattttatcaagtcagcgtttgggaagcttgaaggtcaaaatcattgttggttcaacatcatgaatgacacttggatgaacttgaaccatgaaggaatatatcttcttcttttgtatcaatcttgtggaacattgaacaacgacggcaaacatctaattgcttttgagagcttgaaacatctgcaacagaggttctaaggaccctgtactattcacaaactgggttgaggagcctgatgtcatgattaaggccatagatgaacttaccacgtctaaagaaaaaccttctgaaaatgttctgtcaagagtttcttggcagaaagaagaggttgtcaaagagccatctgttggttccttcagaaacttgttactttaccacccagcatgtgtatcagttgatgaagatggggatcgcatttttatctctgacagtaaccatcataggatcatcattagcaacagcaatgggatgattttagattatattggatcttccccaggctatgaggatggagagtttgagtcagccaaattcttgcgcccagcttcatcattttatcacgctgctgaagactgtctatttattgtagattcagagaatcatgcagtcagaaaagcagatttgggaagaaggactttacaaacagtttatccagtcttcaataaaagcaatggcatctggagctggattaccgataagcttggtatgagaaaagaagctactccaactattcaagattttcatgcagactccatggcacttccatggcatttgatacaaatttcagaggacaccttattagtcgcagaccgcagctttgaaactccgtggaccctgacaatatcaactggcgaaaagcaggatattggaagaggcagagctgaaataatggagtcatatcagaaaactgtaaaagaaaggtgtgctcttattaaggatatgcacatgaattggtcatcaagtgctagagtgctttctgattcagtgcagaagattcccaacaatgagcttatatcatctatagcaagatttcagaattacattgtcttctgtgatacagatggtcaaagggttctgaagcacgacttggataccaagaccacctcaaccattcaattttctgactgtgaggtacttgggttgccatattggtctgtttgcaatctcgagagagtgtcaacctgggggtattcatctggacagttacaggagcatgcgcagcaagtagacgtgcttcctggaagatgcaacatcaccgtctacgtggacattccggttggcactgaacttgccgcgcctttggtggataattgcatctggcgccaagtaaggggatctggcgctgaggtctctggttctgatgggccagacacggccacagagaaggtcggcatcgcgcagcagtggtatgacgagctggacaacctggccttctctgaggtggcggaggagcctactgccgctgcgcatggagacggcaacactgacgatcaaagttaccaggagcagagaagagtgcaattcacctgcacagtgaacgtcagccctgggacgtgtgagctggtggcctctgtcgcgctgtatctgaggctggctggaaagagaacgacgaccgacggcgtggagctcgtcaagcgggtgatgggcgggtgccagttccgcgaggagcaggccggcgtggagctgctggcgcggtgccgcgaggacgacgacgcgacgggcctggtggtggtgaagccggtgcacctgcggctgcggctggtgtgcggcgaccacccggccggcgccaccaacaaggagaccatcagcaccgagtccagcctcaagatcaatgtcaccttggactagctagtggttctgaattctgattttggattttgatccgtgtctatttttattctttggaacctgtctatttttattctttggattttgatccgggctggcgatgggaacgtgtcagtacgtgtatgcgactatgcgatggtaaggaacaagctgactgacaccatctcatgtactggagcaatatagttgacctagttgtgccgagaacttagctggacctgtcttgacaagcctcgtcctggccttttcgccaggcctgacgttttgattttgtctcaacacatgctggacctttttcaacagtgattcataggatgactgttgtaggtgacatattgttcaatgcaggcaacgtatttaaacta

SEQ ID NO: 39295 - DNA, 2837 bp, Zea Mays
ctctccccgttcccctgccggcctgccccaggcccccagctaaaccgccgccgagacgcggcattcccgtccctttcccgccgccactaccttcgccttcgcgccacggccgattctcccatggcgcaggcctcgtccttggtggcggtgctgcgccgccgcacccccgccgctgcccgcctgcttcctcaccggctcgtctcctccgctcccgctccggcgttcgcctcgtcctcattggtcccgctccccttgccaagcctgatcgagggagacagatgcggcggcggcctctccgcttcgttcggctcccactcacgcctccggcttcctcggcgacaccatgcggttgctatggctaccaggacagcgcaccaagttgcttcgagccccgagagcccagcggcggtgacgtcgttgtcgtcaagtgaggctagcactagcactgctgcttcagagcactctgagttggtcgattttatcaagtcagcgtttgggaagcttgaaggtcaaaatcattgttggttcaacatcatgaatgacacttggatgaacttgaaccatgaaggaatatatcttcttcttttgtatcaatcttgtggaacattgaacaacgacggcaaacatctaattgcttttgagagcttgaaacatctgcaacagaggtatccacgcctgaatgtttttgctttgcaacatgggagtgatgttagttctttagcttctcaaagccaagctttccgcacaatagtgaaggagtacatcacatttcctatcttgatctcagacaaaaacttctccaatgttctaaggaccctgtactattcacaaactgggttgaggagcctgatgtcatgattaaggccatagatgaacttaccacgtctaaagaaaaaccttctgaaaatgttctgtcaagagtttcttggcagaaagaagaggttgtcaaagagccatctgttggttccttcagaaacttgttactttaccacccagcatgtgtatcagttgatgaagatggggatcgcatttttatctctgacagtaaccatcataggatcatcattagcaacagcaatgggatgattttagattatattggatcttccccaggctatgaggatggagagtttgagtcagccaaattcttgcgcccagcttcatcattttatcacgctgctgaagactgtctatttattgtagattcagagaatcatgcagtcagaaaagcagatttgggaagaaggactttacaaacagtttatccagtcttcaataaaagcaatggcatctggagctggattaccgataagcttggtatgagaaaagaagctactccaactattcaagattttcatgcagactccatggcacttccatggcatttgatacaaatttcagaggacaccttattagtcgcagaccgcagctttgaaactccgtggaccctgacaatatcaactggcgaaaagcaggatattggaagagttgtgtgaaggcagagctgaaataatggagtcatatcagaaaactgtaaaagaaaggtgtgctcttattaaggatatgcacatgaattggtcatcaagtgctagagtgctttctgattcagtgcagaagattcccaacaatgagcttatatcatctatagcaagatttcagaattacattgtcttctgtgatacagatggtcaaagggttctgaagcacgacttggataccaagaccacctcaaccattcaattttctgactgtgaggtacttgggttgccatattggtctgtttgcaatctcgagagagtgtcaacctgggggtattcatctggacagttacaggagcatgcgcagcaagtagacgtgcttcctggaagatgcaacatcaccgtctacgtggacattccggttggcactgaacttgccgcgcctttggtggataattgcatctggcgccaagtaaggggatctggcgctgaggtctctggttctgatgggccagacacggccacagagaaggtcggcatcgcgcagcagtggtatgacgagctggacaacctggccttctctgaggtggcggaggagcctactgccgctgcgcatggagacggcaacactgacgatcaaagttaccaggagcagagaagagtgcaattcacctgcacagtgaacgtcagccctgggacgtgtgagctggtggcctctgtcgcgctgtatctgaggctggctggaaagagaacgacgaccgacggcgtggagctcgtcaagcgggtgatgggcgggtgccagttccgcgaggagcaggccggcgtggagctgctggcgcggtgccgcgaggacgacgacgcgacgggcctggtggtggtgaagccggtgcacctgcggctgcggctggtgtgcggcgaccacccggccggcgccaccaacaaggagaccatcagcaccgagtccagcctcaagatcaatgtcaccttggactagctagtggttctgaattctgattttggattttgatccgtgtctatttttattctttggaacctgtctatttttattctttggattttgatccgggctggcgatgggaacgtgtcagtacgtgtatgcgactatgcgatggtaaggaacaagctgactgacaccatctcatgtactggagcaatatagttgacctagttgtgccgagaacttagctggacctgtcttgacaagcctcgtcctggccttttcgccaggcctgacgttttgattttgtctcaacacatgctggacctttttcaacagtgattcataggatgactgttgtaggtgacatattgttcaatgcaggcaacgtatttaaacta

SEQ ID NO: 39296 - DNA, 2823 bp, Zea Mays
ctctccccgttcccctgccggcctgccccaggcccccagctaaaccgccgccgagacgcggcattcccgtccctttcccgccgccactaccttcgccttcgcgccacggccgattctcccatggcgcaggcctcgtccttggtggcggtgctgcgccgccgcacccccgccgctgcccgcctgcttcctcaccggctcgtctcctccgctcccgctccggcgttcgcctcgtcctcattggtcccgctccccttgccaagcctgatcgagggagacagatgcggcggcggcctctccgcttcgttcggctcccactcacgcctccggcttcctcggcgacaccatgcggttgctatggctaccaggacagcgcaccaagttgcttcgagccccgagagcccagcggcggtgacgtcgttgtcgtcaagtgaggctagcactagcactgctgcttcagagcactctgagttggtcgattttatcaagtcagcgtttgggaagcttgaaggtcaaaatcattgttggttcaacatcatgaatgacacttggatgaacttgaaccatgaaggaatatatcttcttcttttgtatcaatcttgtggaacattgaacaacgacggcaaacatctaattgcttttgagagcttgaaacatctgcaacagaggtatccacgcctgaatgtttttgctttgcaacatgggagtgatgttagttctttagcttctcaaagccaagctttccgcacaatagtgaaggagtacatcacatttcctatcttgatctcagacaaaaacttctccaatgttctaaggaccctgtactattcacaaactgggttgaggagcctgatgtcatgattaaggccatagatgaacttaccacgtctaaagaaaaaccttctgaaaatgttctgtcaagagtttcttggcagaaagaagaggttgtcaaagagccatctgttggttccttcagaaacttgttactttaccacccagcatgtgtatcagttgatgaagatggggatcgcatttttatctctgacagtaaccatcataggatcatcattagcaacagcaatgggatgattttagattatattggatcttccccaggctatgaggatggagagtttgagtcagccaaattcttgcgcccagcttcatcattttatcacgctgctgaagactgtctatttattgtagattcagagaatcatgcagtcagaaaagcagatttgggaagaaggactttacaaacagtttatccagtcttcaataaaagcaatggcatctggagctggattaccgataagcttggtatgagaaaagaagctactccaactattcaagattttcatgcagactccatggcacttccatggcatttgatacaaatttcagaggacaccttattagtcgcagaccgcagctttgaaactccgtggaccctgacaatatcaactggcgaaaagcaggatattggaagagagctgaaataatggagtcatatcagaaaactgtaaaagaaaggtgtgctcttattaaggatatgcacatgaattggtcatcaagtgctagagtgctttctgattcagtgcagaagattcccaacaatgagcttatatcatctatagcaagatttcagaattacattgtcttctgtgatacagatggtcaaagggttctgaagcacgacttggataccaagaccacctcaaccattcaattttctgactgtgaggtacttgggttgccatattggtctgtttgcaatctcgagagagtgtcaacctgggggtattcatctggacagttacaggagcatgcgcagcaagtagacgtgcttcctggaagatgcaacatcaccgtctacgtggacattccggttggcactgaacttgccgcgcctttggtggataattgcatctggcgccaagtaaggggatctggcgctgaggtctctggttctgatgggccagacacggccacagagaaggtcggcatcgcgcagcagtggtatgacgagctggacaacctggccttctctgaggtggcggaggagcctactgccgctgcgcatggagacggcaacactgacgatcaaagttaccaggagcagagaagagtgcaattcacctgcacagtgaacgtcagccctgggacgtgtgagctggtggcctctgtcgcgctgtatctgaggctggctggaaagagaacgacgaccgacggcgtggagctcgtcaagcgggtgatgggcgggtgccagttccgcgaggagcaggccggcgtggagctgctggcgcggtgccgcgaggacgacgacgcgacgggcctggtggtggtgaagccggtgcacctgcggctgcggctggtgtgcggcgaccacccggccggcgccaccaacaaggagaccatcagcaccgagtccagcctcaagatcaatgtcaccttggactagctagtggttctgaattctgattttggattttgatccgtgtctatttttattctttggaacctgtctatttttattctttggattttgatccgggctggcgatgggaacgtgtcagtacgtgtatgcgactatgcgatggtaaggaacaagctgactgacaccatctcatgtactggagcaatatagttgacctagttgtgccgagaacttagctggacctgtcttgacaagcctcgtcctggccttttcgccaggcctgacgttttgattttgtctcaacacatgctggacctttttcaacagtgattcataggatgactgttgtaggtgacatattgttcaatgcaggcaacgtatttaaacta

SEQ ID NO: 39297 - DNA, 865 bp, Zea Mays
aaacacgctccctcctcttctccaaagtttgcactactgtcggcatcgcgcagcagtggtatgacgagctggacaacctggccttctctgaggtggcggaggagcctactgccgctgcgcatggagacggcaacactgacgatcaaagttaccaggagcagagaagagtgcaattcacctgcacagtgaacgtcagccctgggacgtgtgagctggtggcctctgtcgcgctgtatctgaggctggctggaaagagaacgacgaccgacggcgtggagctcgtcaagcgggtgatgggcgggtgccagttccgcgaggagcaggccggcgtggagctgctggcgcggtgccgcgaggacgacgacgcgacgggcctggtggtggtgaagccggtgcacctgcggctgcggctggtgtgcggcgaccacccggccggcgccaccaacaaggagaccatcagcaccgagtccagcctcaagatcaatgtcaccttggactagctagtggttctgaattctgattttggattttgatccgtgtctatttttattctttggaacctgtctatttttattctttggattttgatccgggctggcgatgggaacgtgtcagtacgtgtatgcgactatgcgatggtaaggaacaagctgactgacaccatctcatgtactggagcaatatagttgacctagttgtgccgagaacttagctggacctgtcttgacaagcctcgtcctggccttttcgccaggcctgacgttttgattttgtctcaacacatgctggacctttttcaacagtgattcataggatgactgttgtaggtgacatattgttcaatgcaggcaacgtatttaaacta

SEQ ID NO: 39298 - DNA, 1395 bp, Zea Mays
ccttataaaagccatgactgccgccactcgactcagtaggttaaagcgacgcccgccgccgcaagccgtccgccttgcccctcgaaggcttggtcctcctccttgtatcccgacctcccccgcgacagacccgtttccccgctaggctagagttatcgttcctctgcagcgatggcgatcaagcggaccaaggcggagaagaagatcgcgtacgacaagaagctgtgcagcctgctcgatgagtacaccaaggtgctcatcgccctcgccgacaacgtcggctccaagcagctccaagacatccgccggggcctcaggggcgactcggtggtgctcatgggcaagaacacgctcatcaggcgctgcatcaaggtctacgccgagaagaccggcaaccacacctttgacccgctcatggacctgctcgtcggcaacgttggcctcatcttcaccaagggagacctcaaggaggtgcgcgaggaggtcgccaagtacaaggttggggctcctgctcgtgttggtctggttgctcctgttgatgttgtcgtgccccctggcaacactgggctggatccctcccagacctctttcttccaggtgcttaacatccccaccaagattaacaagggtactgtggaaattatcacccctgtggagctgatcaagaagggtgagaaggtgggctcgtccgagtctgctctgctcgccaagctgggcatccgccccttctcgtacggtctccaggtcaccagcgtctacgaggatgggtctgtgttcagccctgaggtgcttgacctttctgaggaggacctaatcgagaagttcgccactggtgtctccatggtcgcttctctttccctggcactatcgtacccaacccttgctgctgtgccccacatgtttatcaatgggtacaagaacgtgcttgctgttgctgtggagactgactactcgtacccacacgccgacaagatcaaggagtacctcaaggacccgagcaagtttgctgttgctgctcctgtagctgctgcggactctagtgctgctgctgcccccaaggaggaagagaaggctccagagcctgccgaggagtcggacgaggaaatgggcttcagcctgttcgacgactaagccgctcttatcgtccatccgcccctattccatgtggaaaggattgatgaagaagatgcaacatgcgaggatgaacgttgagattcgtaattttttttaatttagtgcactttgtatcaaattttgtatgaatttatattttatttatgaatatatattacctataccatatctggagcgtgcaatctattttttaaatggtatcaaataaaaggactaagcgcactgtagaaaagtattcagaggacacgaaaatggcacacc

SEQ ID NO: 39299 - DNA, 2497 bp, Zea Mays
catgaggccatgaacctcttctcccagactggacgtctgcagtctgcactctgcacccccgtgccaatcccgtttctattcagtcggttcccctctcccccaagccaaacaccaccatccttccctccctccctacgcatcctctccccctcgacgctttccccacccaatccgaccgccggggcgggcgattccctggagattcggcgcggattcggggctcctctcggggtttctcggcgaatcagcggggatcgggactcccggctgaagaatcctctatctgtttcggtaactgtttgcaacagtttgtgtggagattgcataccatcaccttccctgaagtgaaaaatatatgggctgatcttggcatttcatgggaggttctgaagatgacgagccaccctcaaaacgcgcaagaacatcctcagtagaatctgcaagtttaccagactgtttctcgttttcgaaattttccaatcctttgggaagtacaatggctagacctttgccttcccaagggaaagaagttatggttggttccaagggtgttattaagaaggaggaatttgttaggataatcaccaaaactctgtatagtcttggatatgaaaaaagtggagcagttctggaggaggaatcagggattattttacataaccctatggtgaaacttttcagagaacaggtgattgatggaaattgggataatgcggtggttaccatgaatacaattggccttcaagatgaaaacatcttgaaatctgcggcatttttgatattggagcaaaaattctttgaacttctaaaaaatgacaatgtcatgggtgctatgaagactttacgatgtgagatcacaccccttggtgttaatagaaaaagagtgcatgaactgtcgacttgtatgatttcttgttcttcacagcagttgttccttggtttttcaaagcttggaattgattcttctagttcacggttgaagcttctagaggaattgcagaaggtgcttcctccagctgttatggtgccagagaggaggttttgcgtgcacatcacgatgaagtgtggtttattcaattctcaaataatggaaagtatttagcctcagcgtcaaatgataaatctgcaattatatgggaggttgatgaggatggagagctattactgaggcatacattgagtggccatcaaaagtcagtgatgatggttgcatggagccctgatgattgtcagctcctcacatgtgggcaggaagaaaccatccgacgctgggatgttaaatctggcaaatgtcttcatgtttacgagaagtctgccactggtttgatatcatgtgcttggttcccagatggaaagcaattatctggtttagctgatcaaaacttttgcatttgggatttagatggtaaggaagtagattgctggaaagggcagggatcaacaggaacatctgattttgctgtagcaaaagatggaaaccttataataagcatgagcaagcagaacacaattcttctatttgatagggagacaaaacaggagagaataattgaagagggtagtacaattacttcattttgtctatcagaagacggtgatttcctgcttgtaaatcttgtaagcgaagagattcatttgtggaacataagaaatgatcctgttcgtgtcaaccggtacaatggtcataagcgcacccggtttgtgataaggtcttgttttggcggatttgagcaggcgttcattgctagtgggagtgaagattcacaggtctacatatggcatagagccactggcgatctcattgagactcttgctggtcactcgggcacagtcaactgcgtcagttggaatcctgcgaatccccacatgctcgcctcagcgagcgacgatcacacagttcgtatatggggggcaaagaagtccagtcttaagcgcaaggatgttgggagcagcaattgcaacagtaacggttctcgctcgaatggcaatgcacataacaacgttttcgttcaaaagtgcaacgggaacaacaccaaatgatttgccagggcaatgtatccccatggatggttgactggcgtctgtaaatccccctgtcctttacttccctcgtggaagaagaatcgccaccgccatagttaagacaacaacaacaaagctgcagcacaaagtgtggggaacctgctaggtttcgtgcgctatctttcccttgttccttcatgactgtcatcacatgtatttcttaattcaagctgggatggaattatggtattactttgcatctttgatatcttgatttgccctctctgattgattgtaactgcattttggtggtgatggttgttaactcctcttattgcattttgccttgagaagaaacaaatgttggcctaggatgctccgtctaaagaacgggacggaacatcttatcacaaatttaagtagattcatggatcatttatttccaatgaattaagtggtctgtttgattgtcata

SEQ ID NO: 39300 - DNA, 2518 bp, Zea Mays
tgaacctcttctcccagactggacgtctgcagtctgcactctgcacccccgtgccaatcccgtttctattcagtcggttcccctctcccccaagccaaacaccaccatccttccctccctccctacgcatcctctccccctcgacgctttccccacccaatccgaccgccggggcgggcgattccctggagattcggcgcggattcggggctcctctcggggtttctcggcgaatcagcggggatcgggactcccggctgaagaatcctctatctgtttcggtaactgtttgcaacagtttgtgtggagattgcataccatcaccttccctgaagtgaaaaatatatgggctgatcttggcatttcatgggaggttctgaagatgacgagccaccctcaaaacgcgcaagaacatcctcagtagaatctgcaagtttaccagactgtttctcgttttcgaaattttccaatcctttgggaagtacaatggctagacctttgccttcccaagggaaagaagttatggttggttccaagggtgttattaagaaggaggaatttgttaggataatcaccaaaactctgtatagtcttggatatgaaaaaagtggagcagttctggaggaggaatcagggattattttacataaccctatggtgaaacttttcagagaacaggtgattgatggaaattgggataatgcggtggttaccatgaatacaattggccttcaagatgaaaacatcttgaaatctgcggcatttttgatattggagcaaaaattctttgaacttctaaaaaatgacaatgtcatgggtgctatgaagactttacgatgtgagatcacaccccttggtgttaatagaaaaagagtgcatgaactgtcgacttgtatgatttcttgttcttcacagcagttgttccttggtttttcaaagcttggaattgattcttctagttcacggttgaagcttctagaggaattgcagaaggtgcttcctccagctgttatggtgccagagaggaggttagaaaatttagttgagcaagcacttactgtgcaaagagatgcttgctatttccataattctgttgatgggttgtcactttacattgatcatcactgtgggaaagatcagataccatcttgcacgctacaggttgatgaggatggagagctattactgaggcatacattgagtggccatcaaaagtcagtgatgatggttgcatggagccctgatgattgtcagctcctcacatgtgggcaggaagaaaccatccgacgctgggatgttaaatctggcaaatgtcttcatgtttacgagaagtctgccactggtttgatatcatgtgcttggttcccagatggaaagcaattatctggtttagctgatcaaaacttttgcatttgggatttagatggtaaggaagtagattgctggaaagggcagggatcaacaggaacatctgattttgctgtagcaaaagatggaaaccttataataagcatgagcaagcagaacacaattcttctatttgatagggagacaaaacaggagagaataattgaagagggtagtacaattacttcattttgtctatcagaagacggtgatttcctgcttgtaaatcttgtaagcgaagagattcatttgtggaacataagaaatgatcctgttcgtgtcaaccggtacaatggtcataagcgcacccggtttgtgataaggtcttgttttggcggatttgagcaggcgttcattgctagtgggagtgaagattcacaggtctacatatggcatagagccactggcgatctcattgagactcttgctggtcactcgggcacagtcaactgcgtcagttggaatcctgcgaatccccacatgctcgcctcagcgagcgacgatcacacagttcgtatatggggggcaaagaagtccagtcttaagcgcaaggatgttgggagcagcaattgcaacagtaacggttctcgctcgaatggcaatgcacataacaacgttttcgttcaaaagtgcaacgggaacaacaccaaatgatttgccagggcaatgtatccccatggatggttgactggcgtctgtaaatccccctgtcctttacttccctcgtggaagaagaatcgccaccgccatagttaagacaacaacaacaaagctgcagcacaaagtgtggggaacctgctaggtttcgtgcgctatctttcccttgttccttcatgactgtcatcacatgtatttcttaattcaagctgggatggaattatggtattactttgcatctttgatatcttgatttgccctctctgattgattgtaactgcattttggtggtgatggttgttaactcctcttattgcattttgccttgagaagaaacaaatgttggcctaggatgctccgtctaaagaacgggacggaacatcttatcacaaatttaagtagattcatggatcatttatttccaatgaattaagtggtctgtttgattgtcata

SEQ ID NO: 39301 - DNA, 2543 bp, Zea Mays
tgaacctcttctcccagactggacgtctgcagtctgcactctgcacccccgtgccaatcccgtttctattcagtcggttcccctctcccccaagccaaacaccaccatccttccctccctccctacgcatcctctccccctcgacgctttccccacccaatccgaccgccggggcgggcgattccctggagattcggcgcggattcggggctcctctcggggtttctcggcgaatcagcggggatcgggactcccggctgaagaatcctctatctgtttcggtaactgtttgcaacagtttgtgtggagattgcataccatcaccttccctgaagtgaaaaatatatgggctgatcttggcatttcatgggaggttctgaagatgacgagccaccctcaaaacgcgcaagaacatcctcagtagaatctgcaagtttaccagactgtttctcgttttcgaaattttccaatcctttgggaagtacaatggctagacctttgccttcccaagggaaagaagttatggttggttccaagggtgttattaagaaggaggaatttgttaggataatcaccaaaactctgtatagtcttggatatgaaaaaagtggagcagttctggaggaggaatcagggattattttacataaccctatggtgaaacttttcagagaacaggtgattgatggaaattgggataatgcggtggttaccatgaatacaattggccttcaagatgaaaacatcttgaaatctgcggcatttttgatattggagcaaaaattctttgaacttctaaaaaatgacaatgtcatgggtgctatgaagactttacgatcagttgttccttggtttttcaaagcttggaattgattcttctagttcacggttgaagcttctagaggaattgcagaaggtgcttcctccagctgttatggtgccagagaggaggttagaaaatttagttgagcaagcacttactgtgcaaagagatgcttgctatttccataattctgttgatgggttgtcactttacattgatcatcactgtgggaaagatcagataccatcttgcacgctacaggttttgcgtgcacatcacgatgaagtgtggtttattcaattctcaaataatggaaagtatttagcctcagcgtcaaatgataaatctgcaattatatgggaggttgatgaggatggagagctattactgaggcatacattgagtggccatcaaaagtcagtgatgatggttgcatggagccctgatgattgtcagctcctcacatgtgggcaggaagaaaccatccgacgctgggatgttaaatctggcaaatgtcttcatgtttacgagaagtctgccactggtttgatatcatgtgcttggttcccagatggaaagcaattatctggtttagctgatcaaaacttttgcatttgggatttagatggtaaggaagtagattgctggaaagggcagggatcaacaggaacatctgattttgctgtagcaaaagatggaaaccttataataagcatgagcaagcagaacacaattcttctatttgatagggagacaaaacaggagagaataattgaagagggtagtacaattacttcattttgtctatcagaagacggtgatttcctgcttgtaaatcttgtaagcgaagagattcatttgtggaacataagaaatgatcctgttcgtgtcaaccggtacaatggtcataagcgcacccggtttgtgataaggtcttgttttggcggatttgagcaggcgttcattgctagtgggagtgaagattcacaggtctacatatggcatagagccactggcgatctcattgagactcttgctggtcactcgggcacagtcaactgcgtcagttggaatcctgcgaatccccacatgctcgcctcagcgagcgacgatcacacagttcgtatatggggggcaaagaagtccagtcttaagcgcaaggatgttgggagcagcaattgcaacagtaacggttctcgctcgaatggcaatgcacataacaacgttttcgttcaaaagtgcaacgggaacaacaccaaatgatttgccagggcaatgtatccccatggatggttgactggcgtctgtaaatccccctgtcctttacttccctcgtggaagaagaatcgccaccgccatagttaagacaacaacaacaaagctgcagcacaaagtgtggggaacctgctaggtttcgtgcgctatctttcccttgttccttcatgactgtcatcacatgtatttcttaattcaagctgggatggaattatggtattactttgcatctttgatatcttgatttgccctctctgattgattgtaactgcattttggtggtgatggttgttaactcctcttattgcattttgccttgagaagaaacaaatgttggcctaggatgctccgtctaaagaacgggacggaacatcttatcacaaatttaagtagattcatggatcatttatttccaatgaattaagtggtctgtttgattgtcata

SEQ ID NO: 39302 - DNA, 2423 bp, Zea Mays
gggggtttggccatttgcgtgcaccggtttactgcccgcgaccggctccctcgccgccctgtctagaatcctctatctgtttcggtaactgtttgcaacagtttgtgtggagattgcataccatcaccttccctgaagtgaaaaatatatgggctgatcttggcatttcatgggaggttctgaagatgacgagccaccctcaaaacgcgcaagaacatcctcagtagaatctgcaagtttaccagactgtttctcgttttcgaaattttccaatcctttgggaagtacaatggctagacctttgccttcccaagggaaagaagttatggttggttccaagggtgttattaagaaggaggaatttgttaggataatcaccaaaactctgtatagtcttggatatgaaaaaagtggagcagttctggaggaggaatcagggattattttacataaccctatggtgaaacttttcagagaacaggtgattgatggaaattgggataatgcggtggttaccatgaatacaattggccttcaagatgaaaacatcttgaaatctgcggcatttttgatattggagcaaaaattctttgaacttctaaaaaatgacaatgtcatgggtgctatgaagactttacgatgtgagatcacaccccttggtgttaatagaaaaagagtgcatgaactgtcgacttgtatgatttcttgttcttcacagcagttgttccttggtttttcaaagcttggaattgattcttctagttcacggttgaagcttctagaggaattgcagaaggtgcttcctccagctgttatggtgccagagaggaggttagaaaatttagttgagcaagcacttactgtgcaaagagatgcttgctatttccataattctgttgatgggttgtcactttacattgatcatcactgtgggaaagatcagataccatcttgcacgctacaggttttgcgtgcacatcacgatgaagtgtggtttattcaattctcaaataatggaaagtatttagcctcagcgtcaaatgataaatctgcaattatatgggaggttgatgaggatggagagctattactgaggcatacattgagtggccatcaaaagtcagtgatgatggttgcatggagccctgatgattgtcagctcctcacatgtgggcaggaagaaaccatccgacgctgggatgttaaatctggcaaatgtcttcatgtttacgagaagtctgccactggtttgatatcatgtgcttggttcccagatggaaagcaattatctggtttagctgatcaaaacttttgcatttgggatttagatggtaaggaagtagattgctggaaagggcagggatcaacaggaacatctgattttgctgtagcaaaagatggaaaccttataataagcatgagcaagcagaacacaattcttctatttgatagggagacaaaacaggagagaataattgaagagggtagtacaattacttcattttgtctatcagaagacggtgatttcctgcttgtaaatcttgtaagcgaagagattcatttgtggaacataagaaatgatcctgttcgtgtcaaccggtacaatggtcataagcgcacccggtttgtgataaggtcttgttttggcggatttgagcaggcgttcattgctagtgggagtgaagattcacaggtctacatatggcatagagccactggcgatctcattgagactcttgctggtcactcgggcacagtcaactgcgtcagttggaatcctgcgaatccccacatgctcgcctcagcgagcgacgatcacacagttcgtatatggggggcaaagaagtccagtcttaagcgcaaggatgttgggagcagcaattgcaacagtaacggttctcgctcgaatggcaatgcacataacaacgttttcgttcaaaagtgcaacgggaacaacaccaaatgatttgccagggcaatgtatccccatggatggttgactggcgtctgtaaatccccctgtcctttacttccctcgtggaagaagaatcgccaccgccatagttaagacaacaacaacaaagctgcagcacaaagtgtggggaacctgctaggtttcgtgcgctatctttcccttgttccttcatgactgtcatcacatgtatttcttaattcaagctgggatggaattatggtattactttgcatctttgatatcttgatttgccctctctgattgattgtaactgcattttggtggtgatggttgttaactcctcttattgcattttgccttgagaagaaacaaatgttggcctaggatgctccgtctaaagaacgggacggaacatcttatcacaaatttaagtagattcatggatcatttatttccaatgaattaagtggtctgtttgattgtcata

SEQ ID NO: 39303 - DNA, 2433 bp, Zea Mays
ctaaatttacaaccaaactgcaacttatgcatccctatgtcgaatgtgcttgcagtgataaatttaccacctgtagaatcctctatctgtttcggtaactgtttgcaacagtttgtgtggagattgcataccatcaccttccctgaagtgaaaaatatatgggctgatcttggcatttcatgggaggttctgaagatgacgagccaccctcaaaacgcgcaagaacatcctcagtagaatctgcaagtttaccagactgtttctcgttttcgaaattttccaatcctttgggaagtacaatggctagacctttgccttcccaagggaaagaagttatggttggttccaagggtgttattaagaaggaggaatttgttaggataatcaccaaaactctgtatagtcttggatatgaaaaaagtggagcagttctggaggaggaatcagggattattttacataaccctatggtgaaacttttcagagaacaggtgattgatggaaattgggataatgcggtggttaccatgaatacaattggccttcaagatgaaaacatcttgaaatctgcggcatttttgatattggagcaaaaattctttgaacttctaaaaaatgacaatgtcatgggtgctatgaagactttacgatgtgagatcacaccccttggtgttaatagaaaaagagtgcatgaactgtcgacttgtatgatttcttgttcttcacagcagttgttccttggtttttcaaagcttggaattgattcttctagttcacggttgaagcttctagaggaattgcagaaggtgcttcctccagctgttatggtgccagagaggaggttagaaaatttagttgagcaagcacttactgtgcaaagagatgcttgctatttccataattctgttgatgggttgtcactttacattgatcatcactgtgggaaagatcagataccatcttgcacgctacaggttttgcgtgcacatcacgatgaagtgtggtttattcaattctcaaataatggaaagtatttagcctcagcgtcaaatgataaatctgcaattatatgggaggttgatgaggatggagagctattactgaggcatacattgagtggccatcaaaagtcagtgatgatggttgcatggagccctgatgattgtcagctcctcacatgtgggcaggaagaaaccatccgacgctgggatgttaaatctggcaaatgtcttcatgtttacgagaagtctgccactggtttgatatcatgtgcttggttcccagatggaaagcaattatctggtttagctgatcaaaacttttgcatttgggatttagatggtaaggaagtagattgctggaaagggcagggatcaacaggaacatctgattttgctgtagcaaaagatggaaaccttataataagcatgagcaagcagaacacaattcttctatttgatagggagacaaaacaggagagaataattgaagagggtagtacaattacttcattttgtctatcagaagacggtgatttcctgcttgtaaatcttgtaagcgaagagattcatttgtggaacataagaaatgatcctgttcgtgtcaaccggtacaatggtcataagcgcacccggtttgtgataaggtcttgttttggcggatttgagcaggcgttcattgctagtgggagtgaagattcacaggtctacatatggcatagagccactggcgatctcattgagactcttgctggtcactcgggcacagtcaactgcgtcagttggaatcctgcgaatccccacatgctcgcctcagcgagcgacgatcacacagttcgtatatggggggcaaagaagtccagtcttaagcgcaaggatgttgggagcagcaattgcaacagtaacggttctcgctcgaatggcaatgcacataacaacgttttcgttcaaaagtgcaacgggaacaacaccaaatgatttgccagggcaatgtatccccatggatggttgactggcgtctgtaaatccccctgtcctttacttccctcgtggaagaagaatcgccaccgccatagttaagacaacaacaacaaagctgcagcacaaagtgtggggaacctgctaggtttcgtgcgctatctttcccttgttccttcatgactgtcatcacatgtatttcttaattcaagctgggatggaattatggtattactttgcatctttgatatcttgatttgccctctctgattgattgtaactgcattttggtggtgatggttgttaactcctcttattgcattttgccttgagaagaaacaaatgttggcctaggatgctccgtctaaagaacgggacggaacatcttatcacaaatttaagtagattcatggatcatttatttccaatgaattaagtggtctgtttgattgtcata

SEQ ID NO: 39304 - DNA, 2481 bp, Zea Mays
ctgcttcgtaggctggctgatattgattggcatatcaatagtttgctctgcgcactccttttagtattttctattactaggtgaaatcggatcatcttgccactttttggttcaggtagtagagaatcctctatctgtttcggtaactgtttgcaacagtttgtgtggagattgcataccatcaccttccctgaagtgaaaaatatatgggctgatcttggcatttcatgggaggttctgaagatgacgagccaccctcaaaacgcgcaagaacatcctcagtagaatctgcaagtttaccagactgtttctcgttttcgaaattttccaatcctttgggaagtacaatggctagacctttgccttcccaagggaaagaagttatggttggttccaagggtgttattaagaaggaggaatttgttaggataatcaccaaaactctgtatagtcttggatatgaaaaaagtggagcagttctggaggaggaatcagggattattttacataaccctatggtgaaacttttcagagaacaggtgattgatggaaattgggataatgcggtggttaccatgaatacaattggccttcaagatgaaaacatcttgaaatctgcggcatttttgatattggagcaaaaattctttgaacttctaaaaaatgacaatgtcatgggtgctatgaagactttacgatgtgagatcacaccccttggtgttaatagaaaaagagtgcatgaactgtcgacttgtatgatttcttgttcttcacagcagttgttccttggtttttcaaagcttggaattgattcttctagttcacggttgaagcttctagaggaattgcagaaggtgcttcctccagctgttatggtgccagagaggaggttagaaaatttagttgagcaagcacttactgtgcaaagagatgcttgctatttccataattctgttgatgggttgtcactttacattgatcatcactgtgggaaagatcagataccatcttgcacgctacaggttttgcgtgcacatcacgatgaagtgtggtttattcaattctcaaataatggaaagtatttagcctcagcgtcaaatgataaatctgcaattatatgggaggttgatgaggatggagagctattactgaggcatacattgagtggccatcaaaagtcagtgatgatggttgcatggagccctgatgattgtcagctcctcacatgtgggcaggaagaaaccatccgacgctgggatgttaaatctggcaaatgtcttcatgtttacgagaagtctgccactggtttgatatcatgtgcttggttcccagatggaaagcaattatctggtttagctgatcaaaacttttgcatttgggatttagatggtaaggaagtagattgctggaaagggcagggatcaacaggaacatctgattttgctgtagcaaaagatggaaaccttataataagcatgagcaagcagaacacaattcttctatttgatagggagacaaaacaggagagaataattgaagagggtagtacaattacttcattttgtctatcagaagacggtgatttcctgcttgtaaatcttgtaagcgaagagattcatttgtggaacataagaaatgatcctgttcgtgtcaaccggtacaatggtcataagcgcacccggtttgtgataaggtcttgttttggcggatttgagcaggcgttcattgctagtgggagtgaagattcacaggtctacatatggcatagagccactggcgatctcattgagactcttgctggtcactcgggcacagtcaactgcgtcagttggaatcctgcgaatccccacatgctcgcctcagcgagcgacgatcacacagttcgtatatggggggcaaagaagtccagtcttaagcgcaaggatgttgggagcagcaattgcaacagtaacggttctcgctcgaatggcaatgcacataacaacgttttcgttcaaaagtgcaacgggaacaacaccaaatgatttgccagggcaatgtatccccatggatggttgactggcgtctgtaaatccccctgtcctttacttccctcgtggaagaagaatcgccaccgccatagttaagacaacaacaacaaagctgcagcacaaagtgtggggaacctgctaggtttcgtgcgctatctttcccttgttccttcatgactgtcatcacatgtatttcttaattcaagctgggatggaattatggtattactttgcatctttgatatcttgatttgccctctctgattgattgtaactgcattttggtggtgatggttgttaactcctcttattgcattttgccttgagaagaaacaaatgttggcctaggatgctccgtctaaagaacgggacggaacatcttatcacaaatttaagtagattcatggatcatttatttccaatgaattaagtggtctgtttgattgtcata

SEQ ID NO: 39305 - DNA, 2302 bp, Zea Mays
cagaaatctatgactccctttgctgagtatcaaatgggtgttttatcctctgtcaagtgagtgcagtccgaggccaggaatcctctatctgtttcggtaactgtttgcaacagtttgtgtggagattgcataccatcaccttccctgaagtgaaaaatatatgggctgatcttggcatttcatgggaggttctgaagatgacgagccaccctcaaaacgcgcaagaacatcctcagtagaatctgcaagtttaccagactgtttctcgttttcgaaattttccaatcctttgggaagtacaatggctagacctttgccttcccaagggaaagaagttatggttggttccaagggtgttattaagaaggaggaatttgttaggataatcaccaaaactctgtatagtcttggatatgaaaaaagtggagcagttctggaggaggaatcagggattattttacataaccctatggtgaaacttttcagagaacaggtgattgatggaaattgggataatgcggtggttaccatgaatacaattggccttcaagatgaaaacatcttgaaatctgcggcatttttgatattggagcaaaaattctttgaacttctaaaaaatgacaatgtcatgggtgctatgaagactttacgatgtgagatcacaccccttggtgttaatagaaaaagagtgcatgaactgtcgacttgtatgatttcttgttcttcacagcagttgttccttggtttttcaaagcttggaattgattcttctagttcacggttgaagcttctagaggaattgcagaaggtgcttcctccagctgttatggtgccagagaggaggttttgcgtgcacatcacgatgaagtgtggtttattcaattctcaaataatggaaagtatttagcctcagcgtcaaatgataaatctgcaattatatgggaggttgatgaggatggagagctattactgaggcatacattgagtggccatcaaaagtcagtgatgatggttgcatggagccctgatgattgtcagctcctcacatgtgggcaggaagaaaccatccgacgctgggatgttaaatctggcaaatgtcttcatgtttacgagaagtctgccactggtttgatatcatgtgcttggttcccagatggaaagcaattatctggtttagctgatcaaaacttttgcatttgggatttagatggtaaggaagtagattgctggaaagggcagggatcaacaggaacatctgattttgctgtagcaaaagatggaaaccttataataagcatgagcaagcagaacacaattcttctatttgatagggagacaaaacaggagagaataattgaagagggtagtacaattacttcattttgtctatcagaagacggtgatttcctgcttgtaaatcttgtaagcgaagagattcatttgtggaacataagaaatgatcctgttcgtgtcaaccggtacaatggtcataagcgcacccggtttgtgataaggtcttgttttggcggatttgagcaggcgttcattgctagtgggagtgaagattcacaggtctacatatggcatagagccactggcgatctcattgagactcttgctggtcactcgggcacagtcaactgcgtcagttggaatcctgcgaatccccacatgctcgcctcagcgagcgacgatcacacagttcgtatatggggggcaaagaagtccagtcttaagcgcaaggatgttgggagcagcaattgcaacagtaacggttctcgctcgaatggcaatgcacataacaacgttttcgttcaaaagtgcaacgggaacaacaccaaatgatttgccagggcaatgtatccccatggatggttgactggcgtctgtaaatccccctgtcctttacttccctcgtggaagaagaatcgccaccgccatagttaagacaacaacaacaaagctgcagcacaaagtgtggggaacctgctaggtttcgtgcgctatctttcccttgttccttcatgactgtcatcacatgtatttcttaattcaagctgggatggaattatggtattactttgcatctttgatatcttgatttgccctctctgattgattgtaactgcattttggtggtgatggttgttaactcctcttattgcattttgccttgagaagaaacaaatgttggcctaggatgctccgtctaaagaacgggacggaacatcttatcacaaatttaagtagattcatggatcatttatttccaatgaattaagtggtctgtttgattgtcata

SEQ ID NO: 39306 - DNA, 1433 bp, Zea Mays
gcagtgaagattgagttgtagtccttcttcctagtacatgtagaaactttgatcctgtaatttgctactgataaaggttgatgaggatggagagctattactgaggcatacattgagtggccatcaaaagtcagtgatgatggttgcatggagccctgatgattgtcagctcctcacatgtgggcaggaagaaaccatccgacgctgggatgttaaatctggcaaatgtcttcatgtttacgagaagtctgccactggtttgatatcatgtgcttggttcccagatggaaagcaattatctggtttagctgatcaaaacttttgcatttgggatttagatggtaaggaagtagattgctggaaagggcagggatcaacaggaacatctgattttgctgtagcaaaagatggaaaccttataataagcatgagcaagcagaacacaattcttctatttgatagggagacaaaacaggagagaataattgaagagggtagtacaattacttcattttgtctatcagaagacggtgatttcctgcttgtaaatcttgtaagcgaagagattcatttgtggaacataagaaatgatcctgttcgtgtcaaccggtacaatggtcataagcgcacccggtttgtgataaggtcttgttttggcggatttgagcaggcgttcattgctagtgggagtgaagattcacaggtctacatatggcatagagccactggcgatctcattgagactcttgctggtcactcgggcacagtcaactgcgtcagttggaatcctgcgaatccccacatgctcgcctcagcgagcgacgatcacacagttcgtatatggggggcaaagaagtccagtcttaagcgcaaggatgttgggagcagcaattgcaacagtaacggttctcgctcgaatggcaatgcacataacaacgttttcgttcaaaagtgcaacgggaacaacaccaaatgatttgccagggcaatgtatccccatggatggttgactggcgtctgtaaatccccctgtcctttacttccctcgtggaagaagaatcgccaccgccatagttaagacaacaacaacaaagctgcagcacaaagtgtggggaacctgctaggtttcgtgcgctatctttcccttgttccttcatgactgtcatcacatgtatttcttaattcaagctgggatggaattatggtattactttgcatctttgatatcttgatttgccctctctgattgattgtaactgcattttggtggtgatggttgttaactcctcttattgcattttgccttgagaagaaacaaatgttggcctaggatgctccgtctaaagaacgggacggaacatcttatcacaaatttaagtagattcatggatcatttatttccaatgaattaagtggtctgtttgattgtcata

SEQ ID NO: 39307 - DNA, 1395 bp, Zea Mays
cagaggtgtcaggaaactaatggacgaggtcaccctgtgccccaagcctcgtttcctggtcatcccatggccagccactagccacatgattcctatcgtggacatcggctgcctcctcgccgcggacggcgccccggtcaccatcatcaccacgccctccagctcgcagctcgtccagagccgcgtggacgaccgcgctgggcaagcgggctcggcggacaccacggtcaccgcgctcccgttcccggccatggaagccggcctgccggacggctgcgagccctgggccgtacctgaggggattgttaaactaatatttcaaatatttatcgaatactttatccgtttcaaaatagcacccgaccgttggcggctttgtgacaaactgtgggtggggctcgacgctggagagcgttgctgcgggcgtgccgatggccacctggcgttctccgccgagcagttcctgaacgagaagctggccgttggcgtgctgggcatcagagtgtctgtcggcgtgacgaagcccacggagggcgtgctgaccggtgccaaagacggcggcggcgctagggcggaggcagatgtggggatggagcaggacaaactaagaaaagcacttgctgaacctgtggagtctctatttgatgttgcagaccaaacaacctggcaatcaataagaaacatttacaaacgtgagacagaggccatcctaccagagtttctgaataacctttgtcagtttgaaatggaatacgctccagcagaagaaatggtatccaaattaaaggattatgcccagagtgttgtggaaagtaaagctaaagaggaatctagcaaagtattgatccatatgaaagagaggggggattctgacactgtttcctctgttgctaggttcacaacagtgtttagccatgacaaggattcaattccaagggtctggacaggaaaggaagatgttcatgcaatagcaaaggaagctcgatctacggctctcaaacttctgtctgtaatggcggccattcgttgggatgacgagccagataggattgaaagcatcctcacttcaacacttctagaaggctctgttgtatcaaagattgcaagtgctgcttctgctgatccacttgcttctaccacttgggaagagcaagctcataggcgcggtaatagtaaactgcctcctccttgggcaatcgtggccattgctattcttggtttcaatgagatcatggtgcttattaggaatcccatttatctgttcttgctatttgtgggctacttgatggtcaaagctttggcgatgcagctagatgtcagcagagaattccagaatggagtggttcctgggataatctctgtgtcggtgaagctcctaccaacgatacagaacct

SEQ ID NO: 39308 - DNA, 1028 bp, Zea Mays
atgcacaatctacggtccgtttcaaagcccaacgcgaagctctatttgggccttccgtttacgcccaaccgacaatgcgaagccttatttggcccaaccgaaggcccaacgcggtcagctgatgtctctttgactctttccaccacacgaccacactgctcgtgctctctcgatgcggtcaccagtcgaatggacggcgcggatatcccctcccactccgccgccgatggcgaccggcctccggagaacgcggacgacggcggcgtggaggacgagcgtgccgccgcgccccctccggagcggtgcggggcgttggcttccgcaatcgcaggggtgctggccggcgcgctgcgggagcacgaggagcgggcggccgccaccgcccggagccaggacgaggtcgccgctgccatcgaccgcctcaacggagagctagacaggctattagagaatgcacccacaatggtaataatgcatcattcagcaaggatttccagcatccgcaagaggatttcagcaatgaacatgctgctcaagtccatacaacgacgcatagatagcatggatagaattatttctactgaccattcatctcctgtacagaaagccggtaatgaagttggaacaagttatggctttcaatatcacgaagttagtggtggagaggtgagcttttcctgggctttggtgctgtggtatgaaatacagtaaacaataaataatagaataagttctagcagaattctggtggtgtcccatcaattgcgcaccatttctgttttggtagagctgccatccaacaatcacacgcatattggagtggggaaagtcttttgtactggatggtcaatgttgcagacaacgaatcgtgctttcagctttggcgtttacccttgtattcaaacatgaaattgtcttcagaaatattatcatattgtcactgttgagcggttttgatgtatacttgcttgttgaagatggcaacatctggaattcgtgttgttatattttatcataaatgcttctag

SEQ ID NO: 39309 - DNA, 1047 bp, Zea Mays
atgcacaatctacggtccgtttcaaagcccaacgcgaagctctatttgggccttccgtttacgcccaaccgacaatgcgaagccttatttggcccaaccgaaggcccaacgcggtcagctgatgtctctttgactctttccaccacacgaccacactgctcgtgctctctcgatgcggtcaccagtcgaatggacggcgcggatatcccctcccactccgccgccgatggcgaccggcctccggagaacgcggacgacggcggcgtggaggacgagcgtgccgccgcgccccctccggagcggtgcggggcgttggcttccgcaatcgcaggggtgctggccggcgcgctgcgggagcacgaggagcgggcggccgccaccgcccggagccaggacgaggtcgccgctgccatcgaccgcctcaacggagagctagacaggctattagagaatgcacccacaatggtaataatgcatcattcagcaaggatttccagcatccgcaagaggatttcagcaatgaacatgctgctcaagtccatacaacgacgcatagatagcatggatagaattatttctactgaccattcatctcctgtacagaaagccggtaatgaagttggaacaagttatggctttcaatatcacgaagttagtggtggagaggttctagcagaattctggtggtgtcccatcaattgcgcaccatttctgttttggtagagctgccatccaacaatcacacggtgctgtgcatagaagtgagacgtcataatgtcgattttttccccagagatgtgtcatcaaaatatttcaatcctttttgtagcatattggagtggggaaagtcttttgtactggatggtcaatgttgcagacaacgaatcgtgctttcagctttggcgtttacccttgtattcaaacatgaaattgtcttcagaaatattatcatattgtcactgttgagcggttttgatgtatacttgcttgttgaagatggcaacatctggaattcgtgttgttatattttatcataaatgcttctag

SEQ ID NO: 39310 - DNA, 1043 bp, Zea Mays
atgcacaatctacggtccgtttcaaagcccaacgcgaagctctatttgggccttccgtttacgcccaaccgacaatgcgaagccttatttggcccaaccgaaggcccaacgcggtcagctgatgtctctttgactctttccaccacacgaccacactgctcgtgctctctcgatgcggtcaccagtcgaatggacggcgcggatatcccctcccactccgccgccgatggcgaccggcctccggagaacgcggacgacggcggcgtggaggacgagcgtgccgccgcgccccctccggagcggtgcggggcgttggcttccgcaatcgcaggggtgctggccggcgcgctgcgggagcacgaggagcgggcggccgccaccgcccggagccaggacgaggtcgccgctgccatcgaccgcctcaacggagagctagacaggctattagagaatgcacccacaatggtaataatgcatcattcagcaaggatttccagcatccgcaagaggatttcagcaatgaacatgctgctcaagtccatacaacgacgcatagatagcatggatagaattatttctactgaccattcatctcctgtacagaaagccggtaatgaagttggaacaagttatggctttcaatatcacgaagttagtggtggagaggtgagcttttcctgggctttggtgctgtggtatgaaatacagtaaacaataaataatagaataagttctagcagaattctggtggtgtcccatcaattgcgcaccatttctgttttggtagagctgccatccaacaatcacacggtgctgtgcatagaacatattggagtggggaaagtcttttgtactggatggtcaatgttgcagacaacgaatcgtgctttcagctttggcgtttacccttgtattcaaacatgaaattgtcttcagaaatattatcatattgtcactgttgagcggttttgatgtatacttgcttgttgaagatggcaacatctggaattcgtgttgttatattttatcataaatgcttctag

SEQ ID NO: 39311 - DNA, 927 bp, Zea Mays
atgcacaatctacggtccgtttcaaagcccaacgcgaagctctatttgggccttccgtttacgcccaaccgacaatgcgaagccttatttggcccaaccgaaggcccaacgcggtcagctgatgtctctttgactctttccaccacacgaccacactgctcgtgctctctcgatgcggtcaccagtcgaatggacggcgcggatatcccctcccactccgccgccgatggcgaccggcctccggagaacgcggacgacggcggcgtggaggacgagcgtgccgccgcgccccctccggagcggtgcggggcgttggcttccgcaatcgcaggggtgctggccggcgcgctgcgggagcacgaggagcgggcggccgccaccgcccggagccaggacgaggtcgccgctgccatcgaccgcctcaacggagagctagacaggctattagagaatgcacccacaatggtaataatgcatcattcagcaaggatttccagcatccgcaagaggatttcagcaatgaacatgctgctcaagtccatacaacgacgcatagatagcatggatagaattatttctactgaccattcatctcctgtacagaaagccggtaatgaagttggaacaaggttctagcagaattctggtggtgtcccatcaattgcgcaccatttctgttttggtagagctgccatccaacaatcacacgcatattggagtggggaaagtcttttgtactggatggtcaatgttgcagacaacgaatcgtgctttcagctttggcgtttacccttgtattcaaacatgaaattgtcttcagaaatattatcatattgtcactgttgagcggttttgatgtatacttgcttgttgaagatggcaacatctggaattcgtgttgttatattttatcataaatgcttctag

SEQ ID NO: 39312 - DNA, 942 bp, Zea Mays
atgcacaatctacggtccgtttcaaagcccaacgcgaagctctatttgggccttccgtttacgcccaaccgacaatgcgaagccttatttggcccaaccgaaggcccaacgcggtcagctgatgtctctttgactctttccaccacacgaccacactgctcgtgctctctcgatgcggtcaccagtcgaatggacggcgcggatatcccctcccactccgccgccgatggcgaccggcctccggagaacgcggacgacggcggcgtggaggacgagcgtgccgccgcgccccctccggagcggtgcggggcgttggcttccgcaatcgcaggggtgctggccggcgcgctgcgggagcacgaggagcgggcggccgccaccgcccggagccaggacgaggtcgccgctgccatcgaccgcctcaacggagagctagacaggctattagagaatgcacccacaatggtaataatgcatcattcagcaaggatttccagcatccgcaagaggatttcagcaatgaacatgctgctcaagtccatacaacgacgcatagatagcatggatagaattatttctactgaccattcatctcctgtacagaaagccggtaatgaagttggaacaaggttctagcagaattctggtggtgtcccatcaattgcgcaccatttctgttttggtagagctgccatccaacaatcacacggtgctgtgcatagaacatattggagtggggaaagtcttttgtactggatggtcaatgttgcagacaacgaatcgtgctttcagctttggcgtttacccttgtattcaaacatgaaattgtcttcagaaatattatcatattgtcactgttgagcggttttgatgtatacttgcttgttgaagatggcaacatctggaattcgtgttgttatattttatcataaatgcttctag

SEQ ID NO: 39313 - DNA, 882 bp, Zea Mays
agaatttaacaggaagcaaggtgcaggttgctcctagtgtaaatggagaagtgattctctcctgatccctgcttgaattagttggcgttttgaccacttgattggttgggagtgattctcttcggagaagctaaagtcggagctctcccaaacggccccttttacattttccaaagccccaaggctccactcttttgttcagattgtctcgcctattgctattgtctgtgtacacatttttttgatggaaagcatgtatatatatccagtaactgtatgaaactaagactaagtgtttgcagagctagacaggctattagagaatgcacccacaatggtaataatgcatcattcagcaaggatttccagcatccgcaagaggatttcagcaatgaacatgctgctcaagtccatacaacgacgcatagatagcatggatagaattatttctactgaccattcatctcctgtacagaaagccggtaatgaagttggaacaaggttctagcagaattctggtggtgtcccatcaattgcgcaccatttctgttttggtagagctgccatccaacaatcacacggtgctgtgcatagaagtgagacgtcataatgtcgattttttccccagagatgtgtcatcaaaatatttcaatcctttttgtagcatattggagtggggaaagtcttttgtactggatggtcaatgttgcagacaacgaatcgtgctttcagctttggcgtttacccttgtattcaaacatgaaattgtcttcagaaatattatcatattgtcactgttgagcggttttgatgtatacttgcttgttgaagatggcaacatctggaattcgtgttgttatattttatcataaatgcttctag

SEQ ID NO: 39314 - DNA, 829 bp, Zea Mays
gcaggttgctcctagtgtaaatggagaagtgattctctcctgatccctgcttgaattagttggcgttttgaccacttgattggttgggagtgattctcttcggagaagctaaagtcggagctctcccaaacggccccttttacattttccaaagccccaaggctccactcttttgttcagattgtctcgcctattgctattgtctgtgtacacatttttttgatggaaagcatgtatatatatccagtaactgtatgaaactaagactaagtgtttgcagagctagacaggctattagagaatgcacccacaatggtaataatgcatcattcagcaaggatttccagcatccgcaagaggatttcagcaatgaacatgctgctcaagtccatacaacgacgcatagatagcatggatagaattatttctactgaccattcatctcctgtacagaaagccggtaatgaagttggaacaagttatggctttcaatatcacgaagttagtggtggagaggttctagcagaattctggtggtgtcccatcaattgcgcaccatttctgttttggtagagctgccatccaacaatcacacggtgctgtgcatagaacatattggagtggggaaagtcttttgtactggatggtcaatgttgcagacaacgaatcgtgctttcagctttggcgtttacccttgtattcaaacatgaaattgtcttcagaaatattatcatattgtcactgttgagcggttttgatgtatacttgcttgttgaagatggcaacatctggaattcgtgttgttatattttatcataaatgcttctag

SEQ ID NO: 39315 - DNA, 1927 bp, Zea Mays
accagacccacacgtttctttaccctaaccttttcgctgctccagcgaagaacacagccaccgccgtttcttcgtcttcctcgcagcgccggcgcgccatctcggtacgaaggcgacggcggcggcgacggcggcgttcaggatcgggatctcagcgacgacgtcagaggcttcccatcccgacccccgccagtcgcctcgcgccctcgactccggactccggtcctccgcacaccggccggtgaccctgcgtttgaacctgctatagaaatttataaaatggccgcggttgatgcgacaaccaaggagatggatgcactgcatgttggacaaaatgatgaaacaaaaagactctgattaaagaagacaaagctgcaaacagcaatcattctgttgttgcagctcagtccttgctaccagaggacgacgatgatgatgaagcacaagctgatggtccatctcaagatggagcagcagctgtaaagaagaaaaagaagaaaaacaaatccaaaaagaagaagggcccccttcaacagacagatcctccatcaatacctgttgatgagcttttcccctcaggagaatttccagagggcgaaatccaacaatacaaggatgacaatctgtggagaacaactagtgaggaaaagagggacctggaacgactgcaaaagccaatatacaactctgttcgccaagcagcagaagttcatagacaggtgcggaaatatatgaggagcatcataaaacctggaatgttaatggttgatctatgtgagacattggaaaacatggtccggaaacttatcaaggagaatggactgcaagctggcattgcttttccgactggatgctccttgaattgggttgcagctcactggactccaaatgcgggcgacaaaactgtgctacaatatgatgatgtgatgaagcttgattttggaacacatatagatggttacattgttgattgtgcatttactgttgcattcaatcctatgtttgatccattgcttcaagcaacgagagatgccacaaatactggaatcaaggaagctgggatagatgcacggcttggtgatgtcggtgctgcaatccaagaagttatggaatcctatgaggttgaaatcaatgggaaagttttccaagttaaaagtgttcggaacctcaatggacacagcatcgggccatatcaaatccatgctgggaaatcagttccaatagtgaaaggtggagaacaaacaaaaatggaggaaggggagttttatgccattgaaacttttggatctacgggaaagggatttgtcagggaggacttggaatgcagtcattacatgaagaactttgatgtcggacatgtgcctttaaggttagcaaaggccaagcaactgcttgggaccatcaaccacaacttcggaacgctcgccttttgccggcggtacttggaccgccttggtgagaccaagtacctcatggctctgaagaatctttgtgacaatggcatcgttcagccgtaccctcccctgtgcgatgtgagagggagctacgtctcacagtttgagcacacaatcttactccggccaacttgcaaagaggtcatttccagaggcgatgactactgattgcggctggaggaggctccttgtaccaggttgtgtgtgtggagcgccatccgtttatggatcacactcggataaatggtttggtcctccagagttcaggatgttgtatgagttttataataactcgctaaagattgtggatgtacaagtagcagtaatacgttttctgggaacatggacattgttaggctatttccagcggggatttcgtccgagtttcaatctcgattaaatgtgttgccacataagaaaatatgataatatggcaataatttaataagagagtgagttttattggatgtgtt

SEQ ID NO: 39316 - DNA, 1967 bp, Zea Mays
ccgggacaaccggaccggtcgaaccagccgaagcccagcccgagcccagagtagggtttcgggcttttcgtcttctctttcgtcctcttcttgttgcgcgccatccgatcgccgctgccaggtcgtgtcctttctcgtcgccggcaaggcctcctcccacccaatttccttgacgagaggcgctgctcggttccccggacctcacctggggcctgcctggcgtccattttagcctaaaataggcttaaatagtcagattttgagcacccaatctcgataaagaaagccccaaagaggtacgacgacgtgccgccgccagctgcctctgcgcgaagacgacgcgccgccgtagagttgcccaggcccgctgactcccgatctgcatctctcggactgcccgacgccttgcggctgcggacgcctttcgctgtgcgggctgcgtccagtggaacgtcacctctcccagcgcgggacgcgcctccaggctccagcggagctcgacaggccggcagttgaccccttgccaactggctcctggactcctgttttgctgggttgaggagaaccatgccggacgtgaagtccgctgctgccacggtcgccaaggcagtggctggtgactctccttcccctgctgctactcctcctgcgccggccgtcgccagcagcaatgggacaccgcagaagccgcctcctattccagctgccaccttcgacatgcccaagccaaaccttcgtggtcttaacaagcccaagtgcatccagtgtggtaacgttgcccgctccaggtgcccattccaatgttgcaagagctgctgctacaaggctcagaatccttgtcacatccatgtcctgaagcagagcaacacattgccagataagccatcacctgctactgcttcttcaacagaacagccatctaccaatttacccgcaaccagttcagcatcaaggctagctgccttgcaaaagcttcctcagcattttctgaagtctctccaaacaaagaagtcgcttacgaaaaaggatgccgtggctataaacaagtggaggtttatgaagctaagggaacatatgcaaggcgatatcgatgatgaaaacgaagcatatgagaggtatacacagaatgttaggttactggaggaaacattctatcccatggaatacgctgatgtcgagcctgaagccgaagcaccttcttcagacgaagaaaggatggacttgctggtttcggaggcaaaggtgaggctgaagtcggataacgaaatcgctgatcgcttcaaggagagggtcgccgccatcttggaccagaagctgaaaaaactgctcgagagccaaagcgccgacgaggacgacaaactgtccgatccagaccaggacgatcatctaaacccggcgaagttcagcgcgaagcagaaggcagagagaagcgcgagcttaaacgagctgctcggtaagctgacacgggcacggagcgaggacgacctgaagccgtgccgcgatctcatcgagcagctgtttgggaaggagaagggctcctctactgacaggcaagctggagtggagatggagcagagagatcaagagtcagccgcagcagcagtagcacagccttactccgtcccagagttgtgcgctaggatggaggttgatgaggactttgccgcaaagattagtgatgagttctcgttgagtcaggtggcgcagctatgaatctggaacccggccttcgatgagttctcgttgagtcagggggatgcaatgttattatcactgagctccttcgatgtgtaccaactcaacagcgctatccatcgacgtgctggcctgtcatttaggtgttgttgtttggttacgactagtaaatgtaaatgttagaaccccgatgagcagatgagttgagcaccgctcccggcgctcgacttcctctcacgaagatttctggagtatggtatagttggagttcg

SEQ ID NO: 39317 - DNA, 1952 bp, Zea Mays
gcccgagcccagagtagggtttcgggcttttcgtcttctctttcgtcctcttcttgttgcgcgccatccgatcgccgctgccaggtcgtgtcctttctcgtcgccggcaaggcctcctcccacccaatttccttgacgagaggcgctgctcggttccccggacctcacctggggcctgcctggcgtccattttagcctaaaataggcttaaatagtcagattttgagcacccaatctcgataaagaaagccccaaagaggcaatagccagctgccagccctagtacgacgacgtgccgccgccagctgcctctgcgcgaagacgacgcgccgccgtagagttgcccaggcccgctgactcccgatctgcatctctcggactgcccgacgccttgcggctgcggacgcctttcgctgtgcgggctgcgtccagtggaacgtcacctctcccagcgcgggacgcgcctccaggctccagcggagctcgacaggccggcagttgaccccttgccaactggctcctggactcctgtttgctgggttgaggagaaccatgccggacgtgaagtccgctgctgccacggtcgccaaggcagtggctggtgactctccttcccctgctgctactcctcctgcgccggccgtcgccagcagcaatgggacaccgcagaagccgcctcctattccagctgccaccttcgacatgcccaagccaaaccttcgtggtcttaacaagcccaagtgcatccagtgtggtaacgttgcccgctccaggtgcccattccaatgttgcaagagctgctgctacaaggctcagaatccttgtcacatccatgtcctgaagcagagcaacacattgccagataagccatcacctgctactgcttcttcaacagaacagccatctaccaatttacccgcaaccagttcagcatcaaggctagctgccttgcaaaagcttcctcagcattttctgaagtctctccaaacaaagaagtcgcttacgaaaaaggatgccgtggctataaacaagtggaggtttatgaagctaagggaacatatgcaaggcgatatcgatgatgaaaacgaagcatatgagaggtatacacagaatgttaggttactggaggaaacattctatcccatggaatacgctgatgtcgagcctgaagccgaagcaccttcttcagacgaagaaaggatggacttgctggtttcggaggcaaaggtgaggctgaagtcggataacgaaatcgctgatcgcttcaaggagagggtcgccgccatcttggaccagaagctgaaaaaactgctcgagagccaaagcgccgacgaggacgacaaactgtccgatccagaccaggacgatcatctaaacccggcgaagttcagcgcgaagcagaaggcagagagaagcgcgagcttaaacgagctgctcggtaagctgacacgggcacggagcgaggacgacctgaagccgtgccgcgatctcatcgagcagctgtttgggaaggagaagggctcctctactgacaggcaagctggagtggagatggagcagagagatcaagagtcagccgcagcagcagtagcacagccttactccgtcccagagttgtgcgctaggatggaggttgatgaggactttgccgcaaagattagtgatgagttctcgttgagtcaggtggcgcagctatgaatctggaacccggccttcgatgagttctcgttgagtcagggggatgcaatgttattatcactgagctccttcgatgtgtaccaactcaacagcgctatccatcgacgtgctggcctgtcatttaggtgttgttgtttggttacgactagtaaatgtaaatgttagaaccccgatgagcagatgagttgagcaccgctcccggcgctcgacttcctctcacgaagatttctggagtatggtatagttggagttcg

SEQ ID NO: 39318 - DNA, 2198 bp, Zea Mays
gcccgagcccagagtagggtttcgggcttttcgtcttctctttcgtcctcttcttgttgcgcgccatccgatcgccgctgccaggtcgtgtcctttctcgtcgccggcaaggcctcctcccacccaatttccttgacgagaggcgctgctcggttccccggacctcacctggggcctgcctggcgtccattttagcctaaaataggcttaaatagtcagattttgagcacccaatctcgataaagaaagccccaaagaggcaatagccagctgccagccctagtacgacgacgtgccgccgccagctgcctctgcgcgaagacgacgcgccgccgtagagttgcccaggcccgctgactcccgatctgcatctctcggactgcccgacgccttgcggctgcggacgcctttcgctgtgcgggctgcgtccagtggaacgtcacctctcccagcgcgggacgcgcctccaggctccagcggagctcgacaggccggcagttgaccccttgccaactggctcctggactcctgttttgctgggttgaggagaaccatgccggacgtgaagtccgctgctgccacggtcgccaaggcagtggctggtgactctccttcccctgctgctactcctcctgcgccggccgtcgccagcagcaatgggacaccgcagaagccgcctcctattccagctgccaccttcgacatgcccaagccaaaccttcgtggtcttaacaagcccaagtgcatccagtgtggtaacgttgcccgctccaggtatggagacagagtttatcaatacttcctgattaggcagaattatttcttcctacttatggcatagtgtgcagaggcagtttacaggcaactgagaaccttcacctttgattatgtgacaagagaccacagtatttttttatttgttaatgaatcatatgcgtgcgctctgcttggcctttcaggtgcccattccaatgttgcaagagctgctgctacaaggctcagaatccttgtcacatccatgtcctgaagcagagcaacacattgccagataagccatcacctgctactgcttcttcaacagaacagccatctaccaatttacccgcaaccagcatcaaggctagctgccttgcaaaagcttcctcagcattttctgaagtctctccaaacaaagaagtcgcttacgaaaaaggttgttggctgtttcacgcgctctgtttgtttttgaaccgttttgtgacttctgtcttgttctaggatgccgtggctataaacaagtggaggtttatgaagctaagggaacatatgcaaggcgatatcgatgatgaaaacgaagcatatgagaggtatacacagaatgttaggttactggaggaaacattctatcccatggaatacgctgatgtcgagcctgaagccgaagcaccttcttcagacgaagaaaggatggacttgctggtttcggaggcaaaggtgaggctgaagtcggataacgaaatcgctgatcgcttcaaggagagggtcgccgccatcttggaccagaagctgaaaaaactgctcgagagccaaagcgccgacgaggacgacaaactgtccgatccagaccaggacgatcatctaaacccggcgaagttcagcgcgaagcagaaggcagagagaagcgcgagcttaaacgagctgctcggtaagctgacacgggcacggagcgaggacgacctgaagccgtgccgcgatctcatcgagcagctgtttgggaaggagaagggctcctctactgacaggcaagctggagtggagatggagcagagagatcaagagtcagccgcagcagcagtagcacagccttactccgtcccagagttgtgcgctaggatggaggttgatgaggactttgccgcaaagattagtgatgagttctcgttgagtcaggtggcgcagctatgaatctggaacccggccttcgatgagttctcgttgagtcagggggatgcaatgttattatcactgagctccttcgatgtgtaccaactcaacagcgctatccatcgacgtgctggcctgtcatttaggtgttgttgtttggttacgactagtaaatgtaaatgttagaaccccgatgagcagatgagttgagcaccgctcccggcgctcgacttcctctcacgaagatttctggagtatggtatagttggagttcg

SEQ ID NO: 39319 - DNA, 954 bp, Zea Mays
gtaaacgacgatgaatggttacagccgtgatctgagaaaaccgaagcctgtcattgtttgtgtagggaattttttcttctcactgtgtaaggggaaatctgtgaacggcatgggcattgtactgtgccgtagtatctgtaaacgctgtgatccattactgtctgtccgacgcaatcaaacaggaagcagcggtatccattaatgatgtgaattgattattacatgccgaaaagccccaaccaaacagcactaatgaacgtgctcgttgcttaccccactgatggacagagccagaggtcacccacccaccccaccaacgcggggcgcacacagacccagacatatcactcacaacagtacaacacaagccacccacttcgcctgggttctggccttctgggtggctggttcttccttcccgcttccctcgtcaaccaaatcaaccgactcgccaggtctcctccggatcgccacgcgccgcgcaccacccgcccgcctccccgaatctctcgagcccgcgcgcaggcctcgatcgcggcggaccccgatgccccgcctcccggccaatccggcggcggcgacggaggagacatgagccggccgggactcgccggacctgccagtcatggacgccaccgcgcgcccggccatcgtcatcgacaacggcacagggtatagcaaacttggattttctgggaactcagagccgtctttcaccctccctactgtcgtagcagcaaatgaatcttttctagaccagacagagctgttgagtagtgcaaactggatagcgcagtataatgcaggcatcatggctgatcttgacttttttattggagacgaggctctatcgcggtttagatctagtgggctgtacactttaagaagtccaatccgtcatggtcagtgaggtcacgaggacctgaagatcaccctggtaactggaatctcaag

SEQ ID NO: 39320 - DNA, 2292 bp, Zea Mays
gtaaacgacgatgaatggttacagccgtgatctgagaaaaccgaagcctgtcattgtttgtgtagggaattttttcttctcactgtgtaaggggaaatctgtgaacggcatgggcattgtactgtgccgtagtatctgtaaacgctgtgatccattactgtctgtccgacgcaatcaaacaggaagcagcggtatccattaatgatgtgaattgattattacatgccgaaaagccccaaccaaacagcactaatgaacgtgctcgttgcttaccccactgatggacagagccagaggtcacccacccaccccaccaacgcggggcgcacacagacccagacatatcactcacaacagtacaacacaagccacccacttcgcctgggttctggccttctgggtggctggttcttccttcccgcttccctcgtcaaccaaatcaaccgactcgccaggtctcctccggatcgccacgcgccgcgcaccacccgcccgcctccccgaatctctcgagcccgcgcgcaggcctcgatcgcggcggaccccgatgccccgcctcccggccaatccggcggcggcgacggaggagacatgagccggccgggactcgccggacctgccagtcatggacgccaccgcgcgcccggccatcgtcatcgacaacggcacagggtatagcaaacttggattttctgggaactcagagccgtctttcaccctccctactgtcgtagcagcaaatgaatcttttctagaccagacagagctgttgagtagtgcaaactggatagcgcagtataatgcaggcatcatggctgatcttgacttttttattggagacgaggctctatcgcggtttagatctagtgggctgtacactttaagaagtccaatccgtcatggtcaggtttatgactgggatacaatggagagattttggcagcaatgtattttcaattatctacgttgcaatcccgaagagcactatttccttcttacggatagtcctgttagtacacctgaaagtcgtgaatgtacaggagaaataatgttcgagaccttcaatgtccctggattatatatttctgttcaatctgtcctcagcctttctgctggatatgcatatctgaaaagtctttctgatgacgattccgataccaggtctgatatgacaggagtagtagttgatattggggatggagctccacaaatcgtgccagttgtaaatggctatgtaattgggagtagcataaagtcttttccttcttccggaagtgatgtaacccagtttatttcgcaacttttacaggaaagaggtgagcttttggcacctgaggattctttggatatatctcgtaaagtgaaagaagtgtattgttatacttgttcagacattgtcaaggagttcaagaagcatgacaagaagcctgataagtacatcaaacattggtcagctgttaaaccaaagacgggggtcccatatacaattgacattggatatgaacgctttcttgggccagagatcttcttcaatcctgagatttactctgccgacttctccactcctttacctgagttgattgataactgtgttcagtctgcaccaattgacacaaggagagctctgtacaagaatatagtattatctggtggatctaccatgtttaaagacttccacaagagactccaaactgatataaagaagatagtggatgaccgtgttgctgcgactaatgcccgtcatcgtgtggaagtgagacctattgaagtcaacgtggttgcccatccaatccagagttatgcagtttggttcggggggtcagtagctgcatctaaccctgaattctttgagttctgccacacaaaggaggaatacgaggaacatggagccagcatctgcagaacaagcccggttttcaaaggaatgtactgaattttcctcacaacccatcgtctagcaggagagttcatttaggtttcttcgatagaatagtcaattttgattcttttctggtccgttgcacaaccattgtcgggctcgggccaccctgactagatttgtagttgtagctctgtttgtactagttgtttggtctgtgttctgcgtcgaatgttgtgtatagccaacagctcggttcctgttcgaggtgcttgattgtagccagaaggcccagaaccttggacagtttagaggggaaatattgttttttttacattagcttgttcagacagatttacggaactcatataataataaatcaggctaatctagagtggccaggatagaagata

SEQ ID NO: 39321 - DNA, 1411 bp, Zea Mays
gtccatgactagtatgaacaacataggtttatgactgggatacaatggagagattttggcagcaatgtattttcaattatctacgttgcaatcccgaagagcactatttccttcttacggatagtcctgttagtacacctgaaagtcgtgaatgtacaggagaaataatgttcgagaccttcaatgtccctggattatatatttctgttcaatctgtcctcagcctttctgctggatatgcatatctgaaaagtctttctgatgacgattccgataccaggtctgatatgacaggagtagtagttgatattggggatggagctccacaaatcgtgccagttgtaaatggctatgtaattgggagtagcataaagtcttttccttcttccggaagtgatgtaacccagtttatttcgcaacttttacaggaaagaggtgagcttttggcacctgaggattctttggatatatctcgtaaagtgaaagaagtgtattgttatacttgttcagacattgtcaaggagttcaagaagcatgacaagaagcctgataagtacatcaaacattggtcagctgttaaaccaaagacgggggtcccatatacaattgacattggatatgaacgctttcttgggccagagatcttcttcaatcctgagatttactctgccgacttctccactcctttacctgagttgattgataactgtgttcagtctgcaccaattgacacaaggagagctctgtacaagaatatagtattatctggtggatctaccatgtttaaagacttccacaagagactccaaactgatataaagaagatagtggatgaccgtgttgctgcgactaatgcccgtcatcgtgtggaagtgagacctattgaagtcaacgtggttgcccatccaatccagagttatgcagtttggttcggggggtcagtagctgcatctaaccctgaattctttgagttctgccacacaaaggaggaatacgaggaacatggagccagcatctgcagaacaagcccggttttcaaaggaatgtactgaattttcctcacaacccatcgtctagcaggagagttcatttaggtttcttcgatagaatagtcaattttgattcttttctggtccgttgcacaaccattgtcgggctcgggccaccctgactagatttgtagttgtagctctgtttgtactagttgtttggtctgtgttctgcgtcgaatgttgtgtatagccaacagctcggttcctgttcgaggtgcttgattgtagccagaaggcccagaaccttggacagtttagaggggaaatattgttttttttacattagcttgttcagacagatttacggaactcatataataataaatcaggctaatctagagtggccaggatagaagata

SEQ ID NO: 39322 - DNA, 1094 bp, Zea Mays
agaaattagtaagtttgatggttcacacagtgaaattatgttgaattgctaaattgttatcaccagagttcacatcaatgattggatttatagatgtagagttgtgaatgactgtcttgcatacttataaagcatcctttggcatatagatctgctactatttatgaactgagatcatggtttcctcggttcatccacaaaattgaatagttgtcaattgctattattctctggaactgtcttaacctttggcactatttttgttcattacctccttgtagatactgtataaacattggtctctacctccaatgggatactacgatcttcttcaatcctgagatttactctgccgacttctccactcctttacctgagttgattgataactgtgttcagtctgcaccaattgacacaaggagagctctgtacaagaatatagtattatctggtggatctaccatgtttaaagacttccacaagagactccaaactgatataaagaagatagtggatgaccgtgttgctgcgactaatgcccgtcatcgtgtggaagtgagacctattgaagtcaacgtggttgcccatccaatccagagttatgcagtttggttcggggggtcagtagctgcatctaaccctgaattctttgagttctgccacacaaaggaggaatacgaggaacatggagccagcatctgcagaacaagcccggttttcaaaggaatgtactgaattttcctcacaacccatcgtctagcaggagagttcatttaggtttcttcgatagaatagtcaattttgattcttttctggtccgttgcacaaccattgtcgggctcgggccaccctgactagatttgtagttgtagctctgtttgtactagttgtttggtctgtgttctgcgtcgaatgttgtgtatagccaacagctcggttcctgttcgaggtgcttgattgtagccagaaggcccagaaccttggacagtttagaggggaaatattgttttttttacattagcttgttcagacagatttacggaactcatataataataaatcaggctaatctagagtggccaggatagaagata

SEQ ID NO: 39323 - DNA, 593 bp, Zea Mays
ccaccaccctcaccctggttccgccctccccccgccgctcgccgctaatctcgccgcgcacgccccctccctcgcgtccacagtcaccctggttccgccctacccccgccgctcgccgctaatctcgccgcgcacgccccctccctcacgtccacagctagcttgacctcgcctccgctgaatccgcccctccccgcactcgcgcatggaaccaaccagcctccgcccccgtccaccttggccccggcaccgtaggcggatctgtgcctctcctcgcccgcgtccacccccatcgcctcctcctacaccttctccgccatcggcatcatcgtctccatcatcgcctccgtcctcggccctccctgcacactgcaaccgcctcctgacgatgctcgcgtgggatggtgacggtgacgcggcgctccgtggcttgtgccccctccgccgcctccagcaccttctctgccatcggcatctccatccttggcgcggcatgttcgtggccgggcaattctcagggagggcctcggtgtctgtgtttggttatgctactcagagtgatttgaagttggccctaccctgctctttttaag

SEQ ID NO: 39324 - DNA, 365 bp, Zea Mays
ctagcttgacctcgcctccgctgaatccgcccctccccgcactcgcgcatggaaccaaccagcctccgcccccgtccaccttggccccggcaccgtaggcggatctgtgcctctcctcgcccgcgtccacccccatcgcctcctcctacaccttctccgccatcggcatcatcgtctccatcatcgcctccgtcctcggccctccctgcacactgcaaccgcctcctgacgatgctcgcgtgggatggtgacggtgacgcggcgctccgtggcttgtgccccctccgccgcctccagcaccttctctgccatcggcatctccatccttggcgcggcatggttggccctaccctgctctttttaag

SEQ ID NO: 39325 - DNA, 1035 bp, Zea Mays
gtttaatttgtcttaattatgcagtatactgaaataacttacacaagagaaatttgagaaaatggtttagagatcgaggaagtcactcgtgagaaagtgaatttcttagaagagcttttgagcagcacataatttgcttaccaattagcggatcagatgacttcagcaaaagcatatgtcatccttgcaaagagcatgataatctttcgcttgcatgggagcttagttcgcagataaggaattgccaaagattgttctctaaaggggcagttagtgggagagcaatcacttgttttagttagtaatttaaaaactttggactccaatcagttatgtatagtagaatcaattgtcagttaacataaacataaggggtcttcccatgacatgatatgttagcatggatgtccaccgaggctgtgatgcactctgcatttgttttattcatgtataactgtaatcatattatagtttttttggaaatgtttgctctatactcgatcatattctaaagccaccattgagtctcaacctgtcttacttaacatttgtagtcacctatctgtgtgtagagctgcactagctgttcttattgtcaggttctgttggtgagaacatgttccattggcaagcgaccatcatggggccttcagacaccccatttgcaggtgggctattcttggtgaacattcacttcccaccggattaccctttcaagccaccaaaggtgtctttccacaccaaggttttcgacctgaacattaacgacaacaacaacatttgccttggacattcttaagcaacaatgtggcaaaacttatttcacactctgtaggaaagggaaacaccattctttcgcataagcacgatgattcggccaactgaacatgtctcagtccacagagctatgtagctgagaacctcataggtagattcacagtagttaactgtctgtttgaacaaactgatgcagatgtttgttctatgtaaaagatgacactgttgttggttttaatactgaaatgttatcctaac

SEQ ID NO: 39326 - DNA, 1428 bp, Zea Mays
tgcgggtatgagtaatattttatatccgcgagcgtatatatgggtaacccgttgtcatccctaacccacatagacctcgcccttggctcgcatggcttccggcttcttctcctcgccgttgcgtgagaccgcgctaaaaccctaggctttgagaccccaatggcgtccgcgacggcgacggcgcccgcattcgctctcgcgtcgtccctctcgcgccgcggtttcctcccgctctctcgtcgcgccggccggcccgtgccccagtcgctgcgcttcgtagcgtcagccgtgaggcggcgccgcagcgcggtcgtggtggcagcggacgcggcggcagcggccgggagcgcggagttcggcgacgaggagaacccttatgagcttctgggcatcaggccgcttgatagcttcgaccacatgaagatggcctacaagaagaagcgcaaggacgccgaggagactggagacgatgagttccttgccaagttggatagggcccacgacactgtcatgatgcagcagctgcggtatcggaagaagggagtcacatacgggtctgttcaggtgtccaaggatatcaagtatgctgacaatcaaccaatagtgctttggggaccaagattctccagatcaacagtgaaggacatgcgcataaatatggcaatatcagcagcatttgttgtttggatagctattatgggcaatgcagactggaagcctttgcagttcctatgttttgctttcttctgcagaatactacagaagctaagagctactgaaccactaataactccaatatacaatgaatatggcgaggttgaaggacgaggaataagaatggcaaaaagagtagtccgtgctctgggtttgatttttggatgtgtgttcactgcatccctgtttgattgtcctcctaatattttcaggcttatacagcagctagtaacatggttgagctttcattgcagtatactccccgtatgttttactactatcaggagctgattgttactgtggctgcctccgttcttctgtacatcacggcttcatggtaccgataaacacgacaaacaattatggcctggcttagatgattgcgagatgttaggacatgccttgagtttcagatagagaccaacctgtggtgccttccgcatctaagggatagccaagaacccgcaaattctgtagcattcttccagctttgaggcaggtagttcttagtggaggatcatgtgaccagctatggattcagtagtacaatgaagatggccaatggatgaaaattgtttcgcgagaatatttgaacagcggtgttgtccatgcaatttttaattagatcttggacatatgcttagacgacatacttaactgtgatgtgcatgtgcttttttttgcctgaatgagtgctgagcttcttctgtgtta

SEQ ID NO: 39327 - DNA, 1407 bp, Zea Mays
tgcgggtatgagtaatattttatatccgcgagcgtatatatgggtaacccgttgtcatccctaacccacatagacctcgcccttggctcgcatggcttccggcttcttctcctcgccgttgcgtgagaccgcgctaaaaccctaggctttgagaccccaatggcgtccgcgacggcgacggcgcccgcattcgctctcgcgtcgtccctctcgcgccgcggtttcctcccgctctctcgtcgcgccggccggcccgtgccccagtcgctgcgtgaagcttcgtagcgtcagccgtgaggcggcgccgcagcgcggtcgtggtggcagcggacgcggcggcagcggccgggagcgcggagttcggcgacgaggagaacccttatgagcttctgggcatcaggccgcttgatagcttcgaccacatgaagatggcctacaagaagaagcgcaaggacgccgaggagactggagacgatgagttccttgccaagttggatagggcccacgacactgtcatgatgcagcagctgcggtatcggaagaagggagtcacatacgggtctgttcaggtgtccaaggatatcaagtatgctgacaatcaaccaatagtgctttggggaccaagattctccagatcaacagtgaaggacatgcgcataaatatggcaatatcagcagcatttgttgtttggatagctattatgggcaatgcagactggaagcctttgcagttcctatgttttgctttcttctgcagaatactacagaagctaagagctactgaaccactaataactccaatatacaatgaatatggcgaggttgaaggacgaggaataagaatggcaaaaagagtagtccgtgctctgggtttgatttttggatgtgtgttcactgcatccctggcttatacagcagctagtaacatggttgagctttcattgcagtatactccccgtatgttttactactatcaggagctgattgttactgtggctgcctccgttcttctgtacatcacggcttcatggtaccgataaacacgacaaacaattatggcctggcttagatgattgcgagatgttaggacatgccttgagtttcagatagagaccaacctgtggtgccttccgcatctaagggatagccaagaacccgcaaattctgtagcattcttccagctttgaggcaggtagttcttagtggaggatcatgtgaccagctatggattcagtagtacaatgaagatggccaatggatgaaaattgtttcgcgagaatatttgaacagcggtgttgtccatgcaatttttaattagatcttggacatatgcttagacgacatacttaactgtgatgtgcatgtgcttttttttgcctgaatgagtgctgagcttcttctgtgtta

SEQ ID NO: 39328 - DNA, 774 bp, Zea Mays
atgctatgcttggatgcacatgattctccttgattcaagacaatgatgtgtaattgcaagaggtgtccaaggatatcaagtatgctgacaatcaaccaatagtgctttggggaccaagattctccagatcaacagtgaaggacatgcgcataaatatggcaatatcagcagcatttgaatatggcgaggttgaaggacgaggaataagaatggcaaaaagagtagtccgtgctctgggtttgatttttggatgtgtgttcactgcatccctggcttatacagcagctagtaacatggttgagctttcattgcagtatactccccgtatgttttactactatcaggagctgattgttactgtggctgcctccgttcttctgtacatcacggcttcatggtaccgataaacacgacaaacaattatggcctggcttagatgattgcgagatgttaggacatgccttgagtttcagatagagaccaacctgtggtgccttccgcatctaagggatagccaagaacccgcaaattctgtagcattcttccagctttgaggcaggtagttcttagtggaggatcatgtgaccagctatggattcagtagtacaatgaagatggccaatggatgaaaattgtttcgcgagaatatttgaacagcggtgttgtccatgcaatttttaattagatcttggacatatgcttagacgacatacttaactgtgatgtgcatgtgcttttttttgcctgaatgagtgctgagcttcttctgtgtta

SEQ ID NO: 39329 - DNA, 794 bp, Zea Mays
gtactcttctcttaattcataagaagacccagctattgctaacatgctcattgtttatggttattcacttgttgtttggatagctattatgggcaatgcagactggaagcctttgcagttcctatgttttgctttcttctgcagaatactacagaagctaagagctactgaaccactaataactccaatatacaatgaatatggcgaggttgaaggacgaggaataagaatggcaaaaagagtagtccgtgctctgggtttgatttttggatgtgtgttcactgcatccctggcttatacagcagctagtaacatggttgagctttcattgcagtatactccccgtatgttttactactatcaggagctgattgttactgtggctgcctccgttcttctgtacatcacggcttcatggtaccgataaacacgacaaacaattatggcctggcttagatgattgcgagatgttaggacatgccttgagtttcagatagagaccaacctgtggtgccttccgcatctaagggatagccaagaacccgcaaattctgtagcattcttccagctttgaggcaggtagttcttagtggaggatcatgtgaccagctatggattcagtagtacaatgaagatggccaatggatgaaaattgtttcgcgagaatatttgaacagcggtgttgtccatgcaatttttaattagatcttggacatatgcttagacgacatacttaactgtgatgtgcatgtgcttttttttgcctgaatgagtgctgagcttcttctgtgtta

SEQ ID NO: 39330 - DNA, 3588 bp, Zea Mays
accgagccgaccgcgaggggagagataagagaggggcagaggagagagaaacccttagtctccagccgcctcgcctgatcgccgcctccgcctgatcgcctccgcgcagcgcgagtagtgaggaagaaagccctagggggttcgtgccgcggacggaggcgccggcgcctgtggaaggccacgagatctcgcggcggcgccgcccgccgggtggtgtgttgggggtgcggcgctggtggtgctcggtgagttcgctcgatcacctcgccgcggagcgtccgctcgaggtgccccgcccctcgaatcgagggttctggtagggggggggggggggggaggggtcgccttctgctccccggtcaccgcggaataagctagcccccctctcctcctgcctcggggggttagggttaggctttttctcccggaattgcgagaggaattccgcggccaaggcggcgcattgctagcgagaggaggagaaggaggagtcagcagcgcggctccgacacggccgccagcaatgatggggaagacgcatatgttctctaagggccacccgctcggcttcgtgcccgactaccggcacagggtggaggcaatgggggagttcaagcggctcgggagccccgtgagggtcgactcggggagctactgcccgccgcccaagaggaagtgcgtcagcgtgaattctgaggagagggaatgcgcctccgggttcagcttgacccgcgtgccccgggaggtgttctcactgcccagtatgactgctctagacaagaaggacgtggagatgaggctccaccatgagcttgcgcaggtgaaggacctccagattagactgttttcaggagggcataatgttgggagcatgaatggtgcgacggtcgcgtcagctcccggaagcgatatgctgcccaagaaaaaagccgagaagctcaggcgaagcaattcagtgcagacggataggggagctccaccacctatggccacagctgtcgccccacctgtttccagctctattaactacacgtcctcgtttaaacaatgtgccaaccttctcaagtcccttatgagccatgtatgggcaagcccgtttcttgttccagttgacattgtgaagttgaacatccctgactactttcaaatagtcaagcagcccatggatttgggtacgatccagaaaaggatgaaggcaggcatgtactctacacctccggaatttgctgcagatgtgaggctcactttcagcaacgctatgaactataacccagctaacaatgatgttcatttaatggccaaaactttgagcaagaactttgagagccgatggaagcttattgagaagaagctccctaaaccagatgagaagcctcctcagccagatgagaagcctcctcaaccagttgagaagcctcctgtgaggaagcccacaaaaaagaattcaactaagagagtttccattgagaaagaagacctcactaagaaaaaaccctcaaagaaaagtgtacctaagcagtacatctttcggggagaagattcagctgacagtccagttctgcaaccaaagaaaaggaaaacctctcctttggtacaagatgctcctttggtaggggatattgttccaaccagaaagagaataatgacgagtgagcaaaaatatgatttaagtgcaagattacagtcatatggtgcattcattccagatcatgtagttgagctcataaggagtcacgctgactattgcgacgccaacgaagaggaattagagcttgatatggatgctctaggtgatgatacactttttgaattactgaggctacttgatgactatgacagagttaacccatcaagaaaccttacagaacaggatcctcatgaggttaagtctcgaagtcaatatgaactcatcaatgcgtcagtgtgtaacgaggaagtaaatgagctctttgacgaggacgttgatattggggagaatgaccctccagttttgacttttcctcctttggtacttgaagatgaaacagcagacagaagccgcaaacatagtgcatctagcagttctagtagtgactcagaatcatcctctagtggttctagtagctcttctggaagtgatacagatgccaaagctgctcaacaaaacagcgtgtcaaaggaaaaaattctacctgtggatggcctgggtcatgaaaaggattcactggacacattaaatttaccagagcaaagtacagaccctgtctctgtttctgcttatggtgagggggggtatgtatctgagaaggtctcccctgagaagcaaatccgagctgcccttctgagaagccgctttgctgatacgattctgaaggctcgcgaaaaggctcttgatcagactaccaaaaaggatcctgagaagcttcgacgcgagagggaggaacttgagaggttacaaagacaagagagagctcggttgcaagctgaggctaaagctgcagaggatgcctgcaagagggctgaagaagcagcagctgctgaggctgctgcagaagctaaacgacaaagagatattgagagagaagcagctcggaaagctttgcaagagatggagagaactgttgacatcaacggagggagtcactttctgaaagaccttgaaatgcttagaggtatcacatgcgaagagatgcccaacttggttggtgaagggagccctgggtttcaactgggaagcagcaacgccctagcaaagctcgggctgtacatgaaagatgacgaagatgacgaggagggcgatttggcagatgcaccagtggtggttgatatcgaagagggagaaatagattaagcgtgcttcttctggaccattttttatacgcgacaggagacctgtgggcatcactgatctgcatagcttttctttggcatacaaagcgacctgacgaaaagatcgcctcgcaccagacctggaggtctggtattcgtttttgtaactgcccaagttttggagccaagtcactaggttcgtcgagcttatcgtttggattgagaatctctggacttctgatatccactttcgataaggacttgttcggttaagaggtgatcgaaggagattggagaggggattggagaggattaaatccctttctagtcaattgaacagaggtagcaactgaataagccctaaaatggaatggcgagtttactgcatatatgatgaggccataaaagcggatgaaaagggaggagaaggcacaaggagtgatatatatgatgaggccataaattcggatgaaatgggagaagagatggggtagtggggagaaggcacaaggagtgatggtgatggctcttgagctggtgccagccgtttttgaggggtagttttagagccatttccgtgtcgtgaatgtaatatcggaaactgtacaaaagttagctagttagacgatggaaatcattctttccttcaatttatgcagtgcctgttcttatgagacgttgcacatttctcgtattgctatgggatcctgttgcgtagtagtattgttttggcacagaaattttggtatgtagcttgtcatgtatgtgcaagagtacaag

SEQ ID NO: 39331 - DNA, 3582 bp, Zea Mays
accgagccgaccgcgaggggagagataagagaggggcagaggagagagaaacccttagtctccagccgcctcgcctgatcgccgcctccgcctgatcgcctccgcgcagcgcgagtagtgaggaagaaagccctagggggttcgtgccgcggacggaggcgccggcgcctgtggaaggccacgagatctcgcggcggcgccgcccgccgggtggtgtgttgggggtgcggcgctggtggtgctcggtgagttcgctcgatcacctcgccgcggagcgtccgctcgaggtgccccgcccctcgaatcgagggttctggtagggggggggggggggggaggggtcgccttctgctccccggtcaccgcggaataagctagcccccctctcctcctgcctcggggggttagggttaggctttttctcccggaattgcgagaggaattccgcggccaaggcggcgcattgctagcgagaggaggagaaggaggagtcagcagcgcggctccgacacggccgccagcaatgatggggaagacgcatatgttctctaagggccacccgctcggcttcgtgcccgactaccggcacagggtggaggcaatgggggagttcaagcggctcgggagccccgtgagggtcgactcggggagctactgcccgccgcccaagaggaagtgcgtcagcgtgaattctgaggagagggaatgcgcctccgggttcagcttgacccgcgtgccccgggaggtgttctcactgcccagtatgactgctctagacaagaaggacgtggagatgaggctccaccatgagcttgcgcaggtgaaggacctccagattagactgttttcaggagggcataatgttgggagcatgaatggtgcgacggtcgcgtcagctcccggaagcgatatgctgcccaagaaaaaagccgagaagctcaggcgaagcaattcagtgcagacggataggggagctccaccacctatggccacagctgtcgccccacctgtttccagctctattaactacacgtcctcgtttaaacaatgtgccaaccttctcaagtcccttatgagccatgtatgggcaagcccgtttcttgttccagttgacattgtgaagttgaacatccctgactactttcaaatagtcaagcagcccatggatttgggtacgatccagaaaaggatgaaggcaggcatgtactctacacctccggaatttgctgcagatgtgaggctcactttcagcaacgctatgaactataacccagctaacaatgatgttcatttaatggccaaaactttgagcaagaactttgagagccgatggaagcttattgagaagaagctccctaaaccagatgagaagcctcctcagccagatgagaagcctcctcaaccagttgagaagcctcctgtgaggaagcccacaaaaaagaattcaactaagagagtttccattgagaaagaagacctcactaagaaaaaaccctcaaagaaaagtgtacctaagcagtacatctttcggggagaagattcagctgacagtccagttctgcaaccaaagaaaaggaaaacctctcctttggtacaagatgctcctttggtaggggatattgttccaaccagaaagagaataatgacgagtgagcaaaaatatgatttaagtgcaagattacagtcatatggtgcattcattccagatcatgtagttgagctcataaggagtcacgctgactattgcgacgccaacgaagaggaattagagcttgatatggatgctctaggtgatgatacactttttgaattactgaggctacttgatgactatgacagagttaacccatcaagaaaccttacagaacaggatcctcatgaggttaagtctcgaagtcaatatgaactcatcaatgcgtcagtgtgtaacgaggaagtaaatgagctctttgacgaggacgttgatattggggagaatgaccctccagttttgacttttcctcctttggtacttgaagatgaaacagcagacagaagccgcaaacatagtgcatctagcagttctagtagtgactcagaatcatcctctagtggttctagtagctcttctggaagtgatacagatgccaaagctgctcaacaaaacagcgtgtcaaaggaaaaaattctacctgtggatggcctgggtcatgaaaaggattcactggacacattaaatttaccagagcaaagtacagaccctgtctctgtttctgcttatggggggtatgtatctgagaaggtctcccctgagaagcaaatccgagctgcccttctgagaagccgctttgctgatacgattctgaaggctcgcgaaaaggctcttgatcagactaccaaaaaggatcctgagaagcttcgacgcgagagggaggaacttgagaggttacaaagacaagagagagctcggttgcaagctgaggctaaagctgcagaggatgcctgcaagagggctgaagaagcagcagctgctgaggctgctgcagaagctaaacgacaaagagatattgagagagaagcagctcggaaagctttgcaagagatggagagaactgttgacatcaacggagggagtcactttctgaaagaccttgaaatgcttagaggtatcacatgcgaagagatgcccaacttggttggtgaagggagccctgggtttcaactgggaagcagcaacgccctagcaaagctcgggctgtacatgaaagatgacgaagatgacgaggagggcgatttggcagatgcaccagtggtggttgatatcgaagagggagaaatagattaagcgtgcttcttctggaccattttttatacgcgacaggagacctgtgggcatcactgatctgcatagcttttctttggcatacaaagcgacctgacgaaaagatcgcctcgcaccagacctggaggtctggtattcgtttttgtaactgcccaagttttggagccaagtcactaggttcgtcgagcttatcgtttggattgagaatctctggacttctgatatccactttcgataaggacttgttcggttaagaggtgatcgaaggagattggagaggggattggagaggattaaatccctttctagtcaattgaacagaggtagcaactgaataagccctaaaatggaatggcgagtttactgcatatatgatgaggccataaaagcggatgaaaagggaggagaaggcacaaggagtgatatatatgatgaggccataaattcggatgaaatgggagaagagatggggtagtggggagaaggcacaaggagtgatggtgatggctcttgagctggtgccagccgtttttgaggggtagttttagagccatttccgtgtcgtgaatgtaatatcggaaactgtacaaaagttagctagttagacgatggaaatcattctttccttcaatttatgcagtgcctgttcttatgagacgttgcacatttctcgtattgctatgggatcctgttgcgtagtagtattgttttggcacagaaattttggtatgtagcttgtcatgtatgtgcaagagtacaag

SEQ ID NO: 39332 - DNA, 3588 bp, Zea Mays
accgagccgaccgcgaggggagagataagagaggggcagaggagagagaaacccttagtctccagccgcctcgcctgatcgccgcctccgcctgatcgcctccgcgcagcgcgagtagtgaggaagaaagccctagggggttcgtgccgcggacggaggcgccggcgcctgtggaaggccacgagatctcgcggcggcgccgcccgccgggtggtgtgttgggggtgcggcgctggtggtgctcggtgagttcgctcgatcacctcgccgcggagcgtccgctcgaggtgccccgcccctcgaatcgagggttctggtagggggggggggggggggaggggtcgccttctgctccccggtcaccgcggaataagctagcccccctctcctcctgcctcggggggttagggttaggctttttctcccggaattgcgagaggaattccgcggccaaggcggcgcattgctagcgagaggaggagaaggaggagtcagcagcgcggctccgacacggccgccagcaatgatggggaagacgcatatgttctctaagggccacccgctcggcttcgtgcccgactaccggcacagggtggaggcaatgggggagttcaagcggctcgggagccccgtgagggtcgactcggggagctactgcccgccgcccaagaggaagtgcgtcagcgtgaattctgaggagagggaatgcgcctccgggttcagcttgacccgcgtgccccgggaggtgttctcactgcccagtatgactgctctagacaagaaggacgtggagatgaggctccaccatgagcttgcgcaggtgaaggacctccagattagactgttttcaggagggcataatgttgggagcatgaatggtgcgacggtcgcgtcagctcccggaagcgatatgctgcccaagaaaaaagccgagaagctcaggcgaagcaattcagtgcagacggataggggagctccaccacctatggccacagctgtcgccccacctgtttccagctctattaactacacgtcctcgtttaaacaatgtgccaaccttctcaagtcccttatgagccatgtatgggcaagcccgtttcttgttccagttgacattgtgaagttgaacatccctgactactttcaaatagtcaagcagcccatggatttgggtacgatccagaaaaggatgaaggcaggcatgtactctacacctccggaatttgctgcagatgtgaggctcactttcagcaacgctatgaactataacccagctaacaatgatgttcatttaatggccaaaactttgagcaagaactttgagagccgatggaagcttattgagaagaagctccctaaaccagatgagaagcctcctcagccagatgagaagcctcctcaaccagttgagaagcctcctgtgaggaagcccacaaaaaagaattcaactaagagagtttccattgagaaagaagacctcactaagaaaaaaccctcaaagaaaagtgtacctaagcagtacatctttcggggagaagattcagctgacagtccagttctgcaaccaaagaaaaggaaaacctctcctttggtacaagatgctcctttggtaggggatattgttccaaccagaaagagaataatgacgagtgagcaaaaatatgatttaagtgcaagattacagtcatatggtgcattcattccagatcatgtagttgagctcataaggagtcacgctgactattgcgacgccaacgaagaggaattagagcttgatatggatgctctaggtgatgatacactttttgaattactgaggctacttgatgactatgacagagttaacccatcaagaaaccttacagaacaggatcctcatgaggttaagtctcgaagtcaatatgaactcatcaatgcgtcagtgtgtaacgaggaagtaaatgagctctttgacgaggacgttgatattggggagaatgaccctccagttttgacttttcctcctttggtacttgaagatgaaacagcagacagaagccgcaaacatagtgcatctagcagttctagtagtgactcagaatcatcctctagtggctcaggttctagtagctcttctggaagtgatacagatgccaaagctgctcaacaaaacagcgtgtcaaaggaaaaaattctacctgtggatggcctgggtcatgaaaaggattcactggacacattaaatttaccagagcaaagtacagaccctgtctctgtttctgcttatggggggtatgtatctgagaaggtctcccctgagaagcaaatccgagctgcccttctgagaagccgctttgctgatacgattctgaaggctcgcgaaaaggctcttgatcagactaccaaaaaggatcctgagaagcttcgacgcgagagggaggaacttgagaggttacaaagacaagagagagctcggttgcaagctgaggctaaagctgcagaggatgcctgcaagagggctgaagaagcagcagctgctgaggctgctgcagaagctaaacgacaaagagatattgagagagaagcagctcggaaagctttgcaagagatggagagaactgttgacatcaacggagggagtcactttctgaaagaccttgaaatgcttagaggtatcacatgcgaagagatgcccaacttggttggtgaagggagccctgggtttcaactgggaagcagcaacgccctagcaaagctcgggctgtacatgaaagatgacgaagatgacgaggagggcgatttggcagatgcaccagtggtggttgatatcgaagagggagaaatagattaagcgtgcttcttctggaccattttttatacgcgacaggagacctgtgggcatcactgatctgcatagcttttctttggcatacaaagcgacctgacgaaaagatcgcctcgcaccagacctggaggtctggtattcgtttttgtaactgcccaagttttggagccaagtcactaggttcgtcgagcttatcgtttggattgagaatctctggacttctgatatccactttcgataaggacttgttcggttaagaggtgatcgaaggagattggagaggggattggagaggattaaatccctttctagtcaattgaacagaggtagcaactgaataagccctaaaatggaatggcgagtttactgcatatatgatgaggccataaaagcggatgaaaagggaggagaaggcacaaggagtgatatatatgatgaggccataaattcggatgaaatgggagaagagatggggtagtggggagaaggcacaaggagtgatggtgatggctcttgagctggtgccagccgtttttgaggggtagttttagagccatttccgtgtcgtgaatgtaatatcggaaactgtacaaaagttagctagttagacgatggaaatcattctttccttcaatttatgcagtgcctgttcttatgagacgttgcacatttctcgtattgctatgggatcctgttgcgtagtagtattgttttggcacagaaattttggtatgtagcttgtcatgtatgtgcaagagtacaag

SEQ ID NO: 39333 - DNA, 1876 bp, Zea Mays
tggtgctcgcccacgtcgggtacttccaccgcatatatgtggttgcgtgcctagcgcagaccttgcgcttctacaccctgaacccgagaccccttggttgcagctatccgcaccagcagagcgaaatcgaggagagtgagagagaagaggatttccgccgccgtggtttcgcgactacgacgccggagcggtcagaattgttggcccgggtgcttctacgcaacctccggtgtgtgctctcggcctctgttggcgcgattgaagctctgcgcgccggcgattgctcatcgaacttcaaccgggaccgcatcacgtggccagagccgttcgcataataattagtgacgagcaagctacagaggattctgaggttcagctggtagagactgctgagcaggagctcgtggaaggcaagttgtgcccttggtcacttcttttacccattcatgttcttattaatcataatgatctgcataggttaattttgatgggacccaataggttaccctagattttgactatctttataccttgtttcaccactggttatactactaaatttttgggtagcacatgttattgctttatgtggctttgggtatagagatattcatcactcattgttatattttttttatctgtttattattactgttcatgataagatcattatgttaatgggaacatggagaaccacccgggaaaacagtgctaccacaagggtttaatgggacgcccttggctgattaactaggaaagctagtgaatgactaccttacccgaaaggggcaagggcagtaggggagtggtcagtgtagggaggtccttgggttgatattgctgcgatggcggtcaggcgagggattcctgcactggagcttcctataaactgtagcgggttttctgaagctagtggaactttgtaaaggcctcgtagtggtaccctgcctcgcttccttggtagaggtgtatggggtctgatcaactacgtggcaaatgggtaacacgacttgtgggtaaagatgcgcaacctctgcagagtgtaaaactggtatactagccgtgctcacggtcgtgagcggctcggacactcacatgattaatttatggaacttaaattcaatttgtcatttcattgcatctgggattattatacttttacttttatttattatttctaaggttcagtatttacttacactaagtaactgctaataaaattttgactaacttataaaagcaatgctcagcttcaacctttatctcattgatcagccttacacttcatgaactcccatctttggtgagttcatgccacattatttcccacgacttgttgagctatgaacgtatgtgagctcactcttgctgtctcacacccccccacacaggagaagaacaggtggtcgaagaggagccgcctaacactgaggctttcgacttaatctaggtggcgtctcccagtcaactttctggcaccaaggatagattttagttcctgtattgatcatcttttattttgtaagacttccgctatgtaataagtactctgattttattgtgacatttatctctatacactctgttattatatatgttgtcttctttggcgcatgtatgagatgcacccggctttgttccttaaagcccgggtgtgacagacgggaatcaaggcaaggttaaaggactaggaaaaatagctatttcatccgagcattccatatctaatgtgtttttagttgaatcactcgggtataacttgttgtccattagtcaactatgtaatatgggttacaattgcttatttaccaatgtagatgtgtcggtctttagaaggagtgatggttcattagcttttaagggtgtactagacgac

SEQ ID NO: 39334 - DNA, 1062 bp, Zea Mays
ggaattctccagcgcggggcgcgtcgcgaaacgcctcaaaggaggtgatgtttttgggtgagctagaggaggtgctggaagctacacagccagcagagttccagaggtgtatggtgccactttttcgtcagatttcccgatgtttaagcagttctcactttcaggtggcagaaagagcgctcttcctatggaacagcaatcacatcgagggtttgatcaaacacaacagcaaggttatactgcccgtagtcctcccagcattagaacggaacacgaaaggccattggaatcaggcagtgcagagcctgagtctaaatgtccgtaaaatattcatggactacgacccagcactgttcgaggagtgtcgcgagaagtttgaggaagaggaagctcaagaagccggcatgaggtcaagatgtgaggctagatggaagcgcctagaagaaattgcctcgtcaaaggaggtgaagtagctcgtcttgccgactgcccaggctgtagctcgtcagcagagttcctctagctatctagccttgctggctgcatacgagcagctagctctttctggcaggatcaagtagatgctgatgtaactgcccatggatggctgcttgcctcgtgttacttgctttaccgaacattttacaggctgacatgtaaatacgaggtacatggtgggccgtgaagcttcaacggggactcaggttctggctgccgtgtgatccactgatgacagtatcggttttcatcatcagaggacaaaggaaaggatgtaaaatggtcattcctgctttactgagatgctcatgccacatgttaacgtctagtctgcggctcaatgtcttgatccaagcactgctagaagcacttgaaagacagtcgagcagcacttgttcttgcctgctgatggtgattttgctgaaatgtatagcatgctttgtgtatgatgaatggtaacttggagccatgtcttgtgatgatatgtaatcgtgttgtacatgtcttttccttcctttgatgtatacagaaatttggaatgaagtgctcattgattgatgtttt

SEQ ID NO: 39335 - DNA, 927 bp, Zea Mays
attgtccttgtttcgagagtgtccagaaggtggcagaaagagcgctcttcctatggaacagcaatcacatcgagggtttgatcaaacacaacagcaaggttatactgcccgtagtcctcccagcattagaacggaacacgaaaggccattggaatcaggcagtgcagagcctgagtctaaatgtccgtaaaatattcatggactacgacccagcactgttcgaggagtgtcgcgagaagtttgaggaagaggaagctcaagaagccggcatgaggtcaagatgtgaggctagatggaagcgcctagaagaaattgcctcgtcaaaggaggtgaagtagctcgtcttgccgactgcccaggctgtagctcgtcagcagagttcctctagctatctagccttgctggctgcatacgagcagctagctctttctggcaggatcaagtagatgctgatgtaactgcccatggatggctgcttgcctcgtgttacttgctttaccgaacattttacaggctgacatgtaaatacgaggtacatggtgggccgtgaagcttcaacggggactcaggttctggctgccgtgtgatccactgatgacagtatcggttttcatcatcagaggacaaaggaaaggatgtaaaatggtcattcctgctttactgagatgctcatgccacatgttaacgtctagtctgcggctcaatgtcttgatccaagcactgctagaagcacttgaaagacagtcgagcagcacttgttcttgcctgctgatggtgattttgctgaaatgtatagcatgctttgtgtatgatgaatggtaacttggagccatgtcttgtgatgatatgtaatcgtgttgtacatgtcttttccttcctttgatgtatacagaaatttggaatgaagtgctcattgattgatgtttt

SEQ ID NO: 39336 - DNA, 2202 bp, Zea Mays
ggcaaagcaagcttccttccttgcgaacgcaactgaccgctccggattcgccggcccccgccgccgcttcgccttctctctccctcgtccacggcaaccaactaaccgtcgagatattggcggggcgccgatgctccctgactccccgtagcgcgttgcggatgctgtgggcctgtgaggctcgctgccgccgctttgggatctgggctgctgccggagcggcagcggcggttgtgactggcgccggcgatggcgatatcggcgaaggagaggaagctgagcaggctcgggagttgtaagggcggtgcggcggctggaagtggcagcggcggcggcggcggttcgcctgctgccagggcccaccggtcggtggcggcggcgccgcagcggcgtgtcttcgctgcgctcttcgcgttcctgtgcgccggcgtagtcgtcctcggcggcgtgcacgtcattggagcaacgttccggccagtgctcaggacggcgtggccggcggcaaccctgaacgccatttcctccgatgccagagcgcggcgaggtggcagcagcgccgacaccaccgtgctgccgtcagtccaaatccggcacgcggtcgccatgccggaccgtgtactcctgatcctcaaggacgggccgttgctgccatctcccgagcggttccagtgcctgtactcccccgccaactcctcggaactgcgccgccaccgacccctcttggccgcctcctcacccgatggacccagcctcgtccactgccctgccgagccatcgtgtgtggacgtctctctgtccctgtccctgtcccctccggtggcgccgctgcagtgggacaggcttgtgtacgctgcgctcgttgacagcagggacaactccaccgtcgtgttcgccaaggggatgaacctccggccaggccggttgggtgtggcgtcgaggtaccagtgcgtctttggccgtgatctgtggaagccaaagcagcgtgtgctcacgtcccctgtgatttctgccgcacaagaggttttccggtgcgtgactccagctcgcgttcgccggcacctcaggatgacaactgatcccaacggcaatggcaatggcaatgacaagccgatgttggtctccatcagaacgaaggggcagagggactccacgctgccctcgatcgctgaacctgagccacttcctcctcggcacaactacaggcatcatcgacgacggccaaaggcgcactcaatgtgcgtgtgcaccatgctccgcaaccaggcgaggttcctcagggaatggatcatctaccactcgcgcatcggcgtggagcggtggttcatctacgacaacaacagcgacgacggcatcgagcaggtcctcggcaccatggacccgtcgacgcacaacgtgacgcgccacctgtggccgtggacgaagtcccaggaggctggcttcgcgcactgcgctctgagggcccgggagagctgcgagtgggtggggttcatcgacgtcgacgagttcctccacttccccggcaaccagacgaccctgccagacatcctgcggagctactcgaacaggccgcgggtgggcgagctgaggacagcctgccacagcttcgggccctcggggcggaccagaatccccaagcaaggcgtgacgacgggctacacctgccggctcgccgcgccggagcgccacaagtcgatcgtgaggcccgacgcgctgaacccgtcgctcgtcaacgtggtgcaccacttccacctgagggaaggcgcgaggagggactaagcacatacttcgttggggattgacaagaagagtatcccctaaaatggtgtgcacagacagtttgaggtacgtatgctcatcttcctttgcattattacttccctccttgatcagtcttgtgtttccttgcttcaaattaacacttcaaattaacatacgattagattcggtaagcaagggggttgtggttctattttgttgtctaccccagaaaagttcgtgtgattttttattcatattgtggatcttacagcctttgctcattgttaggcccttgtctatgcccagttggttttaattcactatcgacatatgaatggattgttgctgattgtttgataaatggtcctctaaaatgtgaaaatggagaagtgacattttatccaatatagcatccatagatatcccttggaagctttcacatcg

SEQ ID NO: 39337 - DNA, 1467 bp, Zea Mays
attcactccccctcccagcacaaccgcgctctgctcgacgctaaggaaggcacacagtcgaaatagggaaaaaaagaaagtcaccgcgctcttcgtcgccggtgacgctgttggtggtcaccgcaccgtgcaccctgctcctcggcgcgtttgacagcccgaacttcgtttgctctctcatcgtcctcaagcacggcagcgacaagctggtgcatggccagcctcggggcgagattagatgagttggaggagcaggagaagtacacgatagagtggggcgcgggaaagaaggtgggagggccggagcaggacgacttggcgcacatcgactgccttgtcctcgctagactgtggccagcccagcgtcgccgccgtctgcctcctcgacgaggtcaacaagatcgtcttcaacctaactgtctgaaatctcgtcaacatcaggcacggaccctaaactgagtgtccaccgcgagtacgtcaatctcattgatagctcttctccattcccttccccttcgcctacctcctccctttcaccgcctacggatagccctcaaggtgcctttcttcttcttgccatttgtctgtcctcctattatttttgtgttattatttttgtgttatgtgtaacaatttccgtcacagactagctgctccaagattaggcatgacatagaaaagcaagcaggggaggacaagacaaggtgagcgagatgcttcagatgcctagacgcaagtgtgtgctgcgtggctcacatcaggtgcaccgggcatgctggacgagctgaaggcgttcggcgaaatgcctcaccccaagagcccgttgtctatcaaagcctcttggttccatgagaactgagaagcatgttggcattgacgaggcaacgggtattgtcggactcttcacatcagttacgttcatttgtggagacaaaaattggtttaccaaggtcactgaaagatagatgcccaacagatcagcatcatgttgactgcataacgtgtcatgatagaatccatatgcctggcaggagggactaagcacatacttcgttggggattgacaagaagagtatcccctaaaatggtgtgcacagacagtttgaggtacgtatgctcatcttcctttgcattattacttccctccttgatcagtcttgtgtttccttgcttcaaattaacacttcaaattaacatacgattagattcggtaagcaagggggttgtggttctattttgttgtctaccccagaaaagttcgtgtgattttttattcatattgtggatcttacagcctttgctcattgttaggcccttgtctatgcccagttggttttaattcactatcgacatatgaatggattgttgctgattgtttgataaatggtcctctaaaatgtgaaaatggagaagtgacattttatccaatatagcatccatagatatcccttggaagctttcacatcg

SEQ ID NO: 39338 - DNA, 1006 bp, Zea Mays
cctcattatcctcgttgcgcaccctcaactctatccccattatcccctaatcccaattaaaggaataaagctaggtccctcaaccttattgtttgatctatcgaaccaaatgttaccccactaccttgcccatcgtccctccaaccactaccatcatcggtctagcggctctctgatgcctcctcttccaaacatgtggccacaaatccctctccttgacatgaaaacttcaaaccctaacccaaaacaagagtctgtcatacgtccttaaaggttgaggagatcgcttaagaataggtaaccatcagatttggcttcttaatttctccttcattccaattctatcttacttatttgccggaggaccttaaataaggcggagaacatcggagaagaagaggtggatacaggacagccgtgaccagttcaccaaggagcgcctggacgccatcaacgacgagttcaagctgtaccgctgccacaccatcaagaactgcacgcacgcctgccccaaaggcctgaacccggcaaagcagatcgacacgatcaagaagctccagttgggtgccccaagtgcctgaaaccgagcgtgtcttcccttgaaaacggtcgtggaacagacctgtggaaaaaattgggatgaacttgccacttatttcgttgttgttgttgttctttggtcttcgcgcggtggtttctacctgccaaagacgaataattcccggctggggcccctccagtccactccacccatgcttttgtgtcaggcggagcggacgtagagcatagggagtgaataaccgctaccttatttcatttctatgatgtatctatctaatttggtcctcccctgataatgcacgacccgtagtgttaacaggcgtatttggaccttcaggaagtatttggacatggcaaatgtattttggaatgctcttatctaccgtgagatgcgaaaggaactatagcgtaatggttatggatttccactagcatcttctggtcc

SEQ ID NO: 39339 - DNA, 1530 bp, Zea Mays
atcaccttggtggcgacgatgtgagcgtgcaccacctccctaccaccaccctgcgtcacaaaggatccgtgaagcccttcaaagtctctccctccccctcgtgtacgacgcaaaggggagcaccgcaatccggcccgccaacggcgtgcctccacctcggccagccgccgccacgtcagcgcgtgatcggggaaaagcggcctggccaccatgcttctcgcggtctcgccgcggtcgcgggctttccctcgctgctccaaacagtcgtccaggacagccccggatcccgtgacaaaagaagcgtcgccaattcgccatggcccgtggccagcggcggcggaggcggcggaggccggagccgcgggcgagggccagtggcaaggggaagaaggccaggtacctgagcctcagcgacctcatggttaaggcggaggtgggagcgacgccgccgcggtccgggtgcgaggaggcgggcgtgaagcctgaggaggaggacgcccgcggcgacgggcagcagcggcaggtggagccgttcgcgccgcaccaccaccacgaggcgtccaccctgttcgaggccctgccggcgccttcgctctccgacatcctcggcccgtcgccgtcgccgtcgcccgacggggccggctccggggcctcggggctcccgggcgccgacgaggaggacctgccgcgccgcgcgctgcggggcagggagcgctgggtgtactgcagcggcgactcctcgttctcgccggcgtccacgccgcccgccaccgccacggccaccacgtcgtcgccgtcgccgccgtgctcgtcgtccgccgcgagcacgggcgcgtcggcgcgctcgctgctgctcaagctggattacgaggagatcctcgcggcctgggcggaccgggggccgctctacatcggcgccggcagcgacctgcaactcgacgcagcgcaggtggcttcggggagggcggagagggtgaggcggtacaaggagaagcggcggaggcggctcttcgcgaagcggatccgctacgaggttcgccgggccaatgccgtcaagcggccgcggttcaagggccgtttcatcaaggaggaggacgacgaaggcgagctccggcctacacagcctgcctccttcagtttgcttcttccatcatcgccagcctcgtccccgtgtgtatcactgcatggcaaaagaactcgatagctagctgcgatacgtacatgtatcttgtaaaacagtaaccaggaaaaaaaaagaaattgctacagccatggtctgggatttcgaggtccattgatgggaggcatctttgatgactcattgctttctccgtaacaagggctcattgttactcgttgttggtctcttccctttgcgttgagcttgtgtcctatactcctatcacagtcaatagaacgtcgtgaattgacattgttcgattatatggagctaccgttgtttaagttcaagttgggactagatcttttgctcattatcagcgtgtcaagcacaccacttgcaaagtgcac

SEQ ID NO: 39340 - DNA, 1011 bp, Zea Mays
attgaatgagatgcaataattgtttcatggaacactgattaaaattagcattttcattctcacctactcttcatccttatattggcttacatgcttttttgggagcaaagctgaggagtcagctgcatctggtgatccgctggctatggcgagcaagggaggtgctgttctcatggtttgcagaacctgtgggaagaagggcgatcactggacctcaaagtgtccgtacaaggacctggcaccaccgactgaaactttcacggacaggcctccaacgtcagatggccctcctgcaccaggtggtcctgctaagggagcatatgttcctccaaccatgagaggaggtgctgataggactggagactcgatgcgccgcaggaacgacgagaattccgtccgtgtgaccaacctctcggaggacacccgcgagcctgacctccttgagctcttccgtgcctttggccctgtcagccgtgtctacgtcgcggtggatcagaagactgggtcgagcagggggtttgggtttgtcaactttgttcacagagaggacgccgagaaggccatcaacaagctcaacgggtatggttatgacaaccttatcctccgagtcgagtgggcgacaccaaggcccaattagttttgccgctacctgctagaatcgcatatttctgttgaattatatcagtatgtttgtttgaattactggtacctgagtcatgaatttatcttgttggaaaaacctgttatgtgtggtttggttggacgagaataactatactcgcttcttttatattgagttcgcatgccgtttgttgtcagcaaattctatgtgccctctaagttctgacttgtgatgattgtatggctgaacaaagcaaatttcatggtcgcaaggctggcaccttgcatagccttgaatgcttgatcctttgggtcagagactctaaaggttcagtggtttactagcatctcattcgatcaaaagataacaaaaaacgaacgactaaacct

SEQ ID NO: 39341 - DNA, 4176 bp, Zea Mays
gcataactggggctcaatgggccggcgcccacttctagccttctggaactctcccttccggttccttcatctccgcctccacggctccacctccaccgctgctccacacgggcacacctttgcctcgcccaaccgctgccttgctcgcgttcgccattccccagaccttgagagctaccgtctggtccgatcggacggatcccttcgcgcgccccagagatttcaggtaaggtgctgtaacagaagatgcaagggggaagaggtgggaggcagggcttattcggtttcggggacccttctggtggttccggtggctttggacaaccagggagccttatgcctggtttttttggtggcgcaaatccctttgacgaccctttcttcacaaacccctttggtagcatgatgcagactagtttctcagcccctttcagcggcatgatgcaacctagcttcatgaaccccttcggcagcatggtgcaacctagcttgcttggaccaagtatgtttgcgccccatggcaatctcaatggaggcatgtttggaagccagacacatctcggtcaagatgatgatgaagaaggcgagaagaagaatggtaactttaggaagcatcaaagggaaagcaaagagccatatgtggaggacccagatgatgaagaagataataaaagacctaagcatggacaatttgggagggagttcagcagagttaacacatcacgtccacagcctcagacatttatgtttcagagttcaactgttacatatggtggtccaaatggagcatgttatacatcttcaacaactaggaggactggtgcagatggatttacgctggaagaaaataaagaggctgacacaactactggtaaagccactcacaggatttcacgtggcattggcattaagggtcactcgttaacaagaaatcttaattctgatgggcgtgtgaacacccttcaaactttacacaacttgaatgaagatgagcttggtggatttgaggaatcatggcaaagaaataccagggagaatatgcctggctgggatcctagaatgaacatgcttggcaatggaaatgttcgctctgacttccgagatgtgaatcaaatgcctgcacttccagccccagaactataccgtggcacgaattttcagaatggctcttccatgggccgtgcaccccgcacatgagttcctctgtggcatatgctggatcacagtgctcagtaccggtgacttgcactattatgcagaaaaatgttgaaacccaaactcagcttttgaaaaactactgtaacttgagacagttttaatagtcgagagctttccttagtttcagcagctctatccgagtactccaatcactgtagtttagtgctgcctgagatgcaactaaaatctgtttggatagggaggattatttcttgggaaatttactggtttttggtgaaatctgaagaaaatgaaccatcctgatcttacccatcacgtgttggtgatgtagcctgttaaaccttcatgaataaactgtgagcctcagggtctgtatgcttgtagtttttctcattctagctgccaataagctatgcaaagtacattcattacggttacatctagatagcagcagctaaacaaacaaaggtgcatatatacgtatatatagttgtgtcatcaaacgtggccgtcagattcaggtggcttcgccgcgttcttctccggcgaccggctgatctcaccggcggctgccctggtctgctgttgcaccaccaacgttgagacccggcatccgaaatccgtggacgtgagcaggtccccgaggacgccgagctccaggtgctcgctccagtccgatatgccgaccgttagcggtgacttggggccgtccgctcgccggccgacgatcagcaggtccgacgccgggctagacttccggatggtgtccaccatctcgtcggagctacagaccaggttctcgctgtaggcgacgcggtggccgtcgacccaacggcggacgtactcctgcagcgcctcctcgtcgagccggtcctcctcggggtcgccgcccttgcgccactccggcggcggcaggaaccggaagacggtgaggccgatgggcgcgtcctcggccatgtgcgtggcgagcgcgagcgcctcccggtcgtccggcccgccgaggaagtagagcgcgacgcggtgagggaagccgtcggcgtcggctgtggccgcggggcccccggccacggcggacgatgcgacggagaggctgccccggtcgacgaggatggcgacggagcagggggagtagtggagcacgttgacgttggcggcctggacggagccggcgctggccgtcgtgttctcgacggagccgtcgatggcgaggcgctggtggaagggcacgacgatgagcatggcgcgcttctcgagcgccacggcgcagacgtcgtcgtgcatggtggcgtagggcgcgatgcagacgtaggggagcagcgacgcggaccccacgggccgctgctgcacgaagtactggaaggcgttgacgatgcgccccgagtcggtgcccccagacggcacgcagttccggtcgccgtacttgaaggcgcggagcacggagctggtgagccccacgagcggcgtgaggtggaggaggtagacggagacgggcgacacgggcgacgggctggcggcgtccagcagcgccagcatgggcgccacgtccgcctgcgagtgcacgcacgccagcatccgcagctcgtcgcccagcttcttgtgctgcaccgtgcgccgccggtacgccacgtacttctcctccgggtggtacaggtgcttgaccagcgacgacgtggcggcgcccagcagcaggatgttgagcatgaaggcggcgtacacctgctcgtcgaagatgtccgagtccacgaacgccgaggcgtaggcgacctcggtgatgcccttgaagttcatcatgaggccgacgatgaaggcctcccggggcgacatcccgcagtagatgcagggcagcatgcaggccgcctgcttggcggcgacgccgacgaggaggaagatctcgaggaggaggcacgtggaggcgtcggtgatcttgaagacgtccagcctgaggccgccctgcgcgaagagcagcggcatgagcaccccggcgacgaggcggtcgaggcgctcctcgagggtgaccccgagcggggcgccgccggggagcatgagacccagcatgaagggcccgtaggtggcgtgcaggcccaggacctcgctggcgaagctgcagacgatggtgatgagcagcacggcgacgaggcgcgcctcggagaggaggcctccctcggggacgtcgcgcatgaggcgcaggatggccgggcgcgccacgtaggtcaggaagcctatgaagatggcgaagatgacgagcgacaggaagccgatccgctggaccctctccaaggggctggacgcgaggaggtaggacgtgatgcccgcgacaaagatggtgttggcgaagtcgccgatgagcgccgcggacatagcgaggcgccccagcttggaggagaggaggttgaggtcgcccagcgtggagcagacgacgatgaaggccgagagcgaccaccacacgttgaggttggtgagcatgaagttggccttccacggcgccggcacgcgcgccccgagcgcggcggcggcggcgtacatggccatgtgcggcccgatggcgccgaagaaggcgatggccacggccttcttcccggacttgacgatcatccccaggtccgtcttcacgccgataacaaagatctgcagtgtgaaggcgtacgcgccgaccgtgttgagctgcagccacccctccggcgtcgcgaagggcgcgctggcgttcgggagcacccggcccaggagcgacgggccgagcagcgcgccggccacgatctgggagatgacgaggggcacgttggcgcggccgagcagggcgtgcacggcgcgggagagcgcgaagacggcgcagacatggtagaggaggagcgggaagtagaacttgagcgggtcgtcgccggcgaagacgccagaggaggtggcgactgagtcgttgagcgggaagcagaagatgctcttgttgacggtgacctccgcaagcagttgcggaccgggcggcgcctcacgcgacatgggcgg

SEQ ID NO: 39342 - DNA, 4175 bp, Zea Mays
cccacttctagccttctggaactctcccttccggttccttcatctccgcctccacggctccacctccaccgctgctccacacgggcacacctttgcctcgcccaaccgctgccttgctcgcgttcgccattccccagaccttgagagctaccgtctggtccgatcggacggatcccttcgcgcgccccagagatttcaggtaaggtgctgtaacagaagatgcaagggggaagaggtgggaggcagggcttattcggtttcggggacccttctggtggttccggtggctttggacaaccagggagccttatgcctggtttttttggtggcgcaaatccctttgacgaccctttcttcacaaacccctttggtagcatgatgcagactagtttctcagcccctttcagcggcatgatgcaacctagcttcatgaaccccttcggcagcatggtgcaacctagcttgcttggaccaagtatgtttgcgccccatggcaatctcaatggaggcatgtttggaagccagacacatctcggtcaaggtatcagcaatggcagtggtttcattcagcaggcccctgaaccaagcaggcctaaagggccaattatcaaggagttatcttcagatgatgaggatgatgtagatgatgatgaagaaggcgagaagaagaatggtaactttaggaagcatcaaagggaaagcaaagagccatatgtggaggacccagatgatgaagaagataataaaagacctaagcatggacaatttgggagggagttcagcagagttaacacatcacgtccacagcctcagacatttatgtttcagagttcaactgttacatatggtggtccaaatggagcatgttatacatcttcaacaactaggaggactggtgcagatggatttacgctggaagaaaataaagaggctgacacaactactggtaaagccactcacaggatttcacgtggcattggcattaagatgagcttggtggatttgaggaatcatggcaaagaaataccagggagaatatgcctggctgggatcctagaatgaacatgcttggcaatggaaatgttcgctctgacttccgagatgtgaatcaaatgcctgcacttccagccccagaactataccgtggcacgaattttcagaatggctcttccatgggccgtgcaccccgcacatgagttcctctgtggcatatgctggatcacagtgctcagtaccggtgacttgcactattatgcagaaaaatgttgaaacccaaactcagcttttgaaaaactactgtaacttgagacagttttaatagtcgagagctttccttagtttcagcagctctatccgagtactccaatcactgtagtttagtgctgcctgagatgcaactaaaatctgtttggatagggaggattatttcttgggaaatttactggtttttggtgaaatctgaagaaaatgaaccatcctgatcttacccatcacgtgttggtgatgtagcctgttaaaccttcatgaataaactgtgagcctcagggtctgtatgcttgtagtttttctcattctagctgccaataagctatgcaaagtacattcattacggttacatctagatagcagcagctaaacaaacaaaggtgcatatatacgtatatatagttgtgtcatcaaacgtggccgtcagattcaggtggcttcgccgcgttcttctccggcgaccggctgatctcaccggcggctgccctggtctgctgttgcaccaccaacgttgagacccggcatccgaaatccgtggacgtgagcaggtccccgaggacgccgagctccaggtgctcgctccagtccgatatgccgaccgttagcggtgacttggggccgtccgctcgccggccgacgatcagcaggtccgacgccgggctagacttccggatggtgtccaccatctcgtcggagctacagaccaggttctcgctgtaggcgacgcggtggccgtcgacccaacggcggacgtactcctgcagcgcctcctcgtcgagccggtcctcctcggggtcgccgcccttgcgccactccggcggcggcaggaaccggaagacggtgaggccgatgggcgcgtcctcggccatgtgcgtggcgagcgcgagcgcctcccggtcgtccggcccgccgaggaagtagagcgcgacgcggtgagggaagccgtcggcgtcggctgtggccgcggggcccccggccacggcggacgatgcgacggagaggctgccccggtcgacgaggatggcgacggagcagggggagtagtggagcacgttgacgttggcggcctggacggagccggcgctggccgtcgtgttctcgacggagccgtcgatggcgaggcgctggtggaagggcacgacgatgagcatggcgcgcttctcgagcgccacggcgcagacgtcgtcgtgcatggtggcgtagggcgcgatgcagacgtaggggagcagcgacgcggaccccacgggccgctgctgcacgaagtactggaaggcgttgacgatgcgccccgagtcggtgcccccagacggcacgcagttccggtcgccgtacttgaaggcgcggagcacggagctggtgagccccacgagcggcgtgaggtggaggaggtagacggagacgggcgacacgggcgacgggctggcggcgtccagcagcgccagcatgggcgccacgtccgcctgcgagtgcacgcacgccagcatccgcagctcgtcgcccagcttcttgtgctgcaccgtgcgccgccggtacgccacgtacttctcctccgggtggtacaggtgcttgaccagcgacgacgtggcggcgcccagcagcaggatgttgagcatgaaggcggcgtacacctgctcgtcgaagatgtccgagtccacgaacgccgaggcgtaggcgacctcggtgatgcccttgaagttcatcatgaggccgacgatgaaggcctcccggggcgacatcccgcagtagatgcagggcagcatgcaggccgcctgcttggcggcgacgccgacgaggaggaagatctcgaggaggaggcacgtggaggcgtcggtgatcttgaagacgtccagcctgaggccgccctgcgcgaagagcagcggcatgagcaccccggcgacgaggcggtcgaggcgctcctcgagggtgaccccgagcggggcgccgccggggagcatgagacccagcatgaagggcccgtaggtggcgtgcaggcccaggacctcgctggcgaagctgcagacgatggtgatgagcagcacggcgacgaggcgcgcctcggagaggaggcctccctcggggacgtcgcgcatgaggcgcaggatggccgggcgcgccacgtaggtcaggaagcctatgaagatggcgaagatgacgagcgacaggaagccgatccgctggaccctctccaaggggctggacgcgaggaggtaggacgtgatgcccgcgacaaagatggtgttggcgaagtcgccgatgagcgccgcggacatagcgaggcgccccagcttggaggagaggaggttgaggtcgcccagcgtggagcagacgacgatgaaggccgagagcgaccaccacacgttgaggttggtgagcatgaagttggccttccacggcgccggcacgcgcgccccgagcgcggcggcggcggcgtacatggccatgtgcggcccgatggcgccgaagaaggcgatggccacggccttcttcccggacttgacgatcatccccaggtccgtcttcacgccgataacaaagatctgcagtgtgaaggcgtacgcgccgaccgtgttgagctgcagccacccctccggcgtcgcgaagggcgcgctggcgttcgggagcacccggcccaggagcgacgggccgagcagcgcgccggccacgatctgggagatgacgaggggcacgttggcgcggccgagcagggcgtgcacggcgcgggagagcgcgaagacggcgcagacatggtagaggaggagcgggaagtagaacttgagcgggtcgtcgccggcgaagacgccagaggaggtggcgactgagtcgttgagcgggaagcagaagatgctcttgttgacggtgacctccgcaagcagttgcggaccgggcggcgcctcacgcgacatgggcgg

SEQ ID NO: 39343 - DNA, 4131 bp, Zea Mays
cagatatgatattgtagagttaatgtcattgctgccaatgagtttttgggcgccatgtttcatcccctaattcatgaaggtaaggtgctgtaacagaagatgcaagggggaagaggtgggaggcagggcttattcggtttcggggacccttctggtggttccggtggctttggacaaccagggagccttatgcctggtttttttggtggcgcaaatccctttgacgaccctttcttcacaaacccctttggtagcatgatgcagactagtttctcagcccctttcagcggcatgatgcaacctagcttcatgaaccccttcggcagcatggtgcaacctagcttgcttggaccaagtatgtttgcgccccatggcaatctcaatggaggcatgtttggaagccagacacatctcggtcaaggtatcagcaatggcagtggtttcattcagcaggcccctgaaccaagcaggcctaaagggccaattatcaaggagttatcttcagatgatgaggatgatgtagatgatgatgaagaaggcgagaagaagaatggtaactttaggaagcatcaaagggaaagcaaagagccatatgtggaggacccagatgatgaagaagataataaaagacctaagcatggacaatttgggagggagttcagcagagttaacacatcacgtccacagcctcagacatttatgtttcagagttcaactgttacatatggtggtccaaatggagcatgttatacatcttcaacaactaggaggactggtgcagatggatttacgctggaagaaaataaagaggctgacacaactactggtaaagccactcacaggatttcacgtggcattggcattaagggtcactcgttaacaagaaatcttaattctgatgggcgtgtgaacacccttcaaactttacacaacttgaatgaagatgagcttggtggatttgaggaatcatggcaaagaaataccagggagaatatgcctggctgggatcctagaatgaacatgcttggcaatggaaatgttcgctctgacttccgagatgtgaatcaaatgcctgcacttccagccccagaactataccgtggcacgaattttcagaatggctcttccatgggccgtgcaccccgcacatgagttcctctgtggcatatgctggatcacagtgctcagtaccggtgacttgcactattatgcagaaaaatgttgaaacccaaactcagcttttgaaaaactactgtaacttgagacagttttaatagtcgagagctttccttagtttcagcagctctatccgagtactccaatcactgtagtttagtgctgcctgagatgcaactaaaatctgtttggatagggaggattatttcttgggaaatttactggtttttggtgaaatctgaagaaaatgaaccatcctgatcttacccatcacgtgttggtgatgtagcctgttaaaccttcatgaataaactgtgagcctcagggtctgtatgcttgtagtttttctcattctagctgccaataagctatgcaaagtacattcattacggttacatctagatagcagcagctaaacaaacaaaggtgcatatatacgtatatatagttgtgtcatcaaacgtggccgtcagattcaggtggcttcgccgcgttcttctccggcgaccggctgatctcaccggcggctgccctggtctgctgttgcaccaccaacgttgagacccggcatccgaaatccgtggacgtgagcaggtccccgaggacgccgagctccaggtgctcgctccagtccgatatgccgaccgttagcggtgacttggggccgtccgctcgccggccgacgatcagcaggtccgacgccgggctagacttccggatggtgtccaccatctcgtcggagctacagaccaggttctcgctgtaggcgacgcggtggccgtcgacccaacggcggacgtactcctgcagcgcctcctcgtcgagccggtcctcctcggggtcgccgcccttgcgccactccggcggcggcaggaaccggaagacggtgaggccgatgggcgcgtcctcggccatgtgcgtggcgagcgcgagcgcctcccggtcgtccggcccgccgaggaagtagagcgcgacgcggtgagggaagccgtcggcgtcggctgtggccgcggggcccccggccacggcggacgatgcgacggagaggctgccccggtcgacgaggatggcgacggagcagggggagtagtggagcacgttgacgttggcggcctggacggagccggcgctggccgtcgtgttctcgacggagccgtcgatggcgaggcgctggtggaagggcacgacgatgagcatggcgcgcttctcgagcgccacggcgcagacgtcgtcgtgcatggtggcgtagggcgcgatgcagacgtaggggagcagcgacgcggaccccacgggccgctgctgcacgaagtactggaaggcgttgacgatgcgccccgagtcggtgcccccagacggcacgcagttccggtcgccgtacttgaaggcgcggagcacggagctggtgagccccacgagcggcgtgaggtggaggaggtagacggagacgggcgacacgggcgacgggctggcggcgtccagcagcgccagcatgggcgccacgtccgcctgcgagtgcacgcacgccagcatccgcagctcgtcgcccagcttcttgtgctgcaccgtgcgccgccggtacgccacgtacttctcctccgggtggtacaggtgcttgaccagcgacgacgtggcggcgcccagcagcaggatgttgagcatgaaggcggcgtacacctgctcgtcgaagatgtccgagtccacgaacgccgaggcgtaggcgacctcggtgatgcccttgaagttcatcatgaggccgacgatgaaggcctcccggggcgacatcccgcagtagatgcagggcagcatgcaggccgcctgcttggcggcgacgccgacgaggaggaagatctcgaggaggaggcacgtggaggcgtcggtgatcttgaagacgtccagcctgaggccgccctgcgcgaagagcagcggcatgagcaccccggcgacgaggcggtcgaggcgctcctcgagggtgaccccgagcggggcgccgccggggagcatgagacccagcatgaagggcccgtaggtggcgtgcaggcccaggacctcgctggcgaagctgcagacgatggtgatgagcagcacggcgacgaggcgcgcctcggagaggaggcctccctcggggacgtcgcgcatgaggcgcaggatggccgggcgcgccacgtaggtcaggaagcctatgaagatggcgaagatgacgagcgacaggaagccgatccgctggaccctctccaaggggctggacgcgaggaggtaggacgtgatgcccgcgacaaagatggtgttggcgaagtcgccgatgagcgccgcggacatagcgaggcgccccagcttggaggagaggaggttgaggtcgcccagcgtggagcagacgacgatgaaggccgagagcgaccaccacacgttgaggttggtgagcatgaagttggccttccacggcgccggcacgcgcgccccgagcgcggcggcggcggcgtacatggccatgtgcggcccgatggcgccgaagaaggcgatggccacggccttcttcccggacttgacgatcatccccaggtccgtcttcacgccgataacaaagatctgcagtgtgaaggcgtacgcgccgaccgtgttgagctgcagccacccctccggcgtcgcgaagggcgcgctggcgttcgggagcacccggcccaggagcgacgggccgagcagcgcgccggccacgatctgggagatgacgaggggcacgttggcgcggccgagcagggcgtgcacggcgcgggagagcgcgaagacggcgcagacatggtagaggaggagcgggaagtagaacttgagcgggtcgtcgccggcgaagacgccagaggaggtggcgactgagtcgttgagcgggaagcagaagatgctcttgttgacggtgacctccgcaagcagttgcggaccgggcggcgcctcacgcgacatgggcgg

SEQ ID NO: 39344 - DNA, 1078 bp, Zea Mays
aaattagaacagaaggagtattacataaaagcttgtgcgttttccacagtgattttgagcgaccttattgatcttatctgaaagatactcatccgtcgcgctcatcttttgctggttgaaccaaagagcccactaatggaaaaaaacaacacgcaaattcttgttccagaacatttccaaaacatatatcacaagtccaaatcctaaagcagaaacaagccaatttctgagatgttttatcttataccacaaaacaaaataatgaaattccatcagaaaaagcttcagtaaacgtgtaccgggccgaaacgtcccgagcccatgggcgaagcccaacaagcggcccagcacgaaacgtcggagccctagcgaaaatcctcagcgccgccgcgcactataagtagcgcctccaaaccctaggctgctacgcgcttcctctcgccctcgctcctccgccgccgccgccgccgcatcaagcccccgccccgccgtcgcctgaggtagacaccaatccgccgccatggggcgtatgcacagccgcgggaagggtatctcatcgtcggcgcttccctacaagaggacgcctcctacctggctcaagaccgctgcctccgacgtggaggagatgatcacaaaggcagcgaagaagggacagatgccgtcgcagatcggcgtcctgctccgtgaccagcacggtatcccccttgtcaagagcgtcaccggcagcaagatcctccgcatcctcaaggcccatgggctggcaccagaaatccccgaggacctgtacttcctcatcaagaaggcggtggcgataaggaagcaccttgagaggaacaggaaggacaaagactctaaattcaggctcattcttgtggagagcaggatccaccgccttgcccgctactacaagcgcacaaagaagcttccacccacctggaagtatgagtcaaccacagcgagcactctggtggcctaagtgtggtatcctccgacagcttgttctagatatgaatttgtgcaaaagaaaataattccggatattgctgagccgggatgcccttattccacagatctccct

SEQ ID NO: 39345 - DNA, 831 bp, Zea Mays
tccccctaaccgcgcaaagacgaaaatggcgacgggggttcctcttccccgaccagagcaagagtcagagtcagagccagagccagcgccagagccagagtcagggcgtgccatgtttctgtgccacagagagcaaagacgaaggcggcggcgttcctcatctcctcccggatcagagacagcgcgtgccatgcctgcgccttagatctcatgattggcatgcgcaccagacttctcatagatctacggtctccttgggcgttctggagctgaaaggtggcaccttccgccgagatacggtgggtctacgtgtattcaggtacttgacagcagtcatcctcctttggaagctgaataacgaagtagatctattcttatgaaatataattgaggatggagtctgttgaggcgaaggcgaagacgctacccttcacgcgaagccttcgtcgtttcgctgcaccaacgaaggcgagatggtcggcgcagttgccctttgtcatctccatcgcaagacgaaggccagattcagactccgacgtagtctgttagtcccgcgtcctcgtctcgcccggaggcccacgcggaatttggcccactgtaagtctgtaacgggccccgcgtggacaagcatattacgggcctcatctgtaatagcttttctgtaataacggtctgtaacctccttttatgagaatattatagggatagtccgggtatccgagggcataaacatccttgtcttgggacgttggacactcgggtacctataaatacccccgtacagtgcccttgagaggccagattaacagagcaattaccatcccacattaa

SEQ ID NO: 39346 - DNA, 815 bp, Zea Mays
tccccctaaccgcgcaaagacgaaaatggcgacgggggttcctcttccccgaccagagcaagagtcagagtcagagccagagccagcgccagagccagagtcagggcgtgccatgtttctgtgccacagagagcaaagacgaaggcggcggcgttcctcatctcctcccggatcagagacagcgcgtgccatgcctgcgccttagatctcatgattggcatgcgcaccagacttctcatagatctacggtctccttgggcgttctggagctgaaaggtggcaccttccgccgagatacggtgggtacttgacagcagtcatcctcctttggaagctgaataacgaagtagatctattcttatgaaatataattgaggatggagtctgttgaggcgaaggcgaagacgctacccttcacgcgaagccttcgtcgtttcgctgcaccaacgaaggcgagatggtcggcgcagttgccctttgtcatctccatcgcaagacgaaggccagattcagactccgacgtagtctgttagtcccgcgtcctcgtctcgcccggaggcccacgcggaatttggcccactgtaagtctgtaacgggccccgcgtggacaagcatattacgggcctcatctgtaatagcttttctgtaataacggtctgtaacctccttttatgagaatattatagggatagtccgggtatccgagggcataaacatccttgtcttgggacgttggacactcgggtacctataaatacccccgtacagtgcccttgagaggccagattaacagagcaattaccatcccacattaa

SEQ ID NO: 39347 - DNA, 811 bp, Zea Mays
tccccctaaccgcgcaaagacgaaaatggcgacgggggttcctcttccccgaccagagcaagagtcagagtcagagccagagccagcgccagagccagagtcagggcgtgccatgtttctgtgccacagagagcaaagacgaaggcggcggcgttcctcatctcctcccggatcagagacagcgcgtgccatgcctgcgccttagatctcatgattggcatgcgcaccagacttctcatagatctacggtctccttgggcgttctggagctgaaaggtggcaccttccgccgagatacggtacttgacagcagtcatcctcctttggaagctgaataacgaagtagatctattcttatgaaatataattgaggatggagtctgttgaggcgaaggcgaagacgctacccttcacgcgaagccttcgtcgtttcgctgcaccaacgaaggcgagatggtcggcgcagttgccctttgtcatctccatcgcaagacgaaggccagattcagactccgacgtagtctgttagtcccgcgtcctcgtctcgcccggaggcccacgcggaatttggcccactgtaagtctgtaacgggccccgcgtggacaagcatattacgggcctcatctgtaatagcttttctgtaataacggtctgtaacctccttttatgagaatattatagggatagtccgggtatccgagggcataaacatccttgtcttgggacgttggacactcgggtacctataaatacccccgtacagtgcccttgagaggccagattaacagagcaattaccatcccacattaa

SEQ ID NO: 39348 - DNA, 791 bp, Zea Mays
ggttcctcttccccgaccagagcaagagtcagagtcagagccagagccagcgccagagccagagtcagggcgtgccatgtttctgtgccacagagagcaaagacgaaggcggcggcgttcctcatctcctcccggatcagagacagcgcgtgccatgcctgcgccttagatctcatgattggcatgcgcaccagacttctcatagatctacggtctccttgggcgttctggagctgaaaggtggcaccttccgccgagatacggtctacgtgtattcaggtacttgacagcagtcatcctcctttggaagctgaataacgaagtagatctattcttatgaaatataattgaggatggagtctgttgaggcgaaggcgaagacgctacccttcacgcgaagccttcgtcgtttcgctgcaccaacgaaggcgagatggtcggcgcagttgccctttgtcatctccatcgcaagacgaaggccagattcagactccgacgtagtctgttagtcccgcgtcctcgtctcgcccggaggcccacgcggaatttggcccactgtaagtctgtaacgggccccgcgtggacaagcatattacgggcctcatctgtaatagcttttctgtaataacggtctgtaacctccttttatgagaatattatagggatagtccgggtatccgagggcataaacatccttgtcttgggacgttggacactcgggtacctataaatacccccgtacagtgcccttgagaggccagattaacagagcaattaccatcccacattaa

SEQ ID NO: 39349 - DNA, 1938 bp, Zea Mays
ccagcgtaccgaaaaaaaaaaggcaaaggggagcctgtctgaccgaggacgaaagaggcgcaggcgcacatcctccccctcccttgccgtcctccccctccccttgctggccgtcgcctgctgctgctgtcgcaggcgcgccagcgccaccgacccgccgatgagcgtctagctaggcatcatctccgcgacgagtcgacccaccacccacccacccactggcttgcctgcgaaccacccctgcgccgatccacctccgctgcctgtctgcctgcttctacatataatcgcgccggcctccgcctcgtcgcctgcgacccccaccacagaaccctccccctcacctccgctatcctcctccccggccgctccccgacagactccgatggccatcgtcgagactgccgctgccgctgcggctgccgctgccgctgccgaccacaccgcgccaccgcgcgaggaggaggcgccgggcgccgccgccgacgccggggagcgcgaaatgcgggatctggaggacctcctctccaagctcaaccccatggccgaggagttcgtccctccctccctcgcctcccccatctccggcgccggggccgggcacggggccctcacgcccgcgccgctctccccagccgcctacggcttctacccggtcaacgccggcttcgcggtcgcctcgccgggccaccgcggcgtcgtcagcttcccggcggtcgccgacgcccacgccggacgcggcatgaagaaggacggagccggagggttcggcggccacggccacggccaccccggcaggcggcggaccaacagccgcaccagcatggcgcagcgggacgaggccatccgccgcaccgtctacgtctccgacatcgatcaccaggttactgaagaaaacctcgcagcactatttataaattgcggacaggttgtggactgtcgcatgtgtggggacccaaattcagtccttaggtttgctttcatagagttcactgatgaggagggtgcaagagctgctctgaatctgtcaggaaccgtgcttggatattatcctgtcaaggttctgccgtcaaaaactgccattgcaccagtcaacgaaacattcctacccaggtctgacgatgaacgtgaaatgtgtgcaaggactatctactgcacaaacattgacaagaaggtcactcaagcagatctaaaattattctttgagtccatatgtggtgaggttggtcgttctttactccaaacacaatctcccttctgtacagctaaaggtttgcagaaatggcaattcaaccagcacaatatatcgttggctcatcgcaatggctgctaacaggtctttcggctgaggttgcttggcgactaccatcattctacccgcatcgcttttgtggaattcgtgatggtcagctaagcataccttcgccttcaaatttgcgcagcttcttttttttagggaagtattttttgcgcaaaagttgcctggcttttagcatcgtttgatgggcgaggacacacatcgcctccaaatactagaacgctagggatatttgttctctcaaataaagctttacctgtaagaagagctgttagtggctggagtgaatagaatttggttggtcggtgcctccaagttgtttggtctgccgttcaaatgcatgattattctgcgagctgttttaagactgggcctcaaatttttttttccaggcagaaagtgctactgctgctctcaactgtagcggtgtggtactgggatccttgccaataagggtgagcccgtccaagacgcccgtgcgtccccgcgtccctcgccacctgatgtcgtactaggtatacatacatgagttgattggctgcgtctggttgctactcaacaaacaagaacacaagctaaaacttggtgatcggagactaccttttgcttgcttcgatgct

SEQ ID NO: 39350 - DNA, 2065 bp, Zea Mays
ccagcgtaccgaaaaaaaaaaggcaaaggggagcctgtctgaccgaggacgaaagaggcgcaggcgcacatcctccccctcccttgccgtcctccccctccccttgctggccgtcgcctgctgctgctgtcgcaggcgcgccagcgccaccgacccgccgatgagcgtctagctaggcatcatctccgcgacgagtcgacccaccacccacccacccactggcttgcctgcgaaccacccctgcgccgatccacctccgctgcctgtctgcctgcttctacatataatcgcgccggcctccgcctcgtcgcctgcgacccccaccacagaaccctccccctcacctccgctatcctcctccccggccgctccccgacagactccgatggccatcgtcgagactgccgctgccgctgcggctgccgctgccgctgccgaccacaccgcgccaccgcgcgaggaggaggcgccgggcgccgccgccgacgccggggagcgcgaaatgcgggatctggaggacctcctctccaagctcaaccccatggccgaggagttcgtccctccctccctcgcctcccccatctccggcgccggggccgggcacggggccctcacgcccgcgccgctctccccagccgcctacggcttctacccggtcaacgccggcttcgcggtcgcctcgccgggccaccgcggcgtcgtcagcttcccggcggtcgccgacgcccacgccggacgcggcatgaagaaggacggagccggagggttcggcggccacggccacggccaccccggcaggcggcggaccaacagccgcaccagcatggcgcagcgggacgaggccatccgccgcaccgtctacgtctccgacatcgatcaccaggttactgaagaaaacctcgcagcactatttataaattgcggacaggttgtggactgtcgcatgtgtggggacccaaattcagtccttaggtttgctttcatagagttcactgatgaggtctgacgatgaacgtgaaatgtgtgcaaggactatctactgcacaaacattgacaagaaggtcactcaagcagatctaaaattattctttgagtccatatgtggtgaggttggtcgttctttactccaaacacaatctcccttctgtacagctaaaggtttgcagaaatggcaattcaaccagcacaatatatcgttggctcatcgcaatggctgctaacaggtctttcggctgaggttgcttggcgactaccatcattctacccgcatcgcttttgtggaattcgtgatggtcagctaagcataccttcgccttcaaatttgcgcagcttcttttttttagggaagtattttttgcgcaaaagttgcctggcttttagcatcgtttgatgggcgaggacacacatcgcctccaaatactagaacgctagggatatttgttctctcaaataaagctttacctgtaagaagagctgttagtggctggagtgaatagaatttggttggtcggtgcctccaagttgtttggtctgccgttcaaatgcatgattattctgcgagctgttttaagactgggcctcaaatttttttttccaggcagaaagtgctactgctgctctcaactgtagcggtgtggtactgggatccttgccaataagggtgagcccgtccaagacgcccgtgcgtccccgcgtccctcgccacctgatgtcgtactaggtatacatacatgaggtgctgacgatgccactgctcatatataagtaatagagatagacatgtatgaaaagggtcttttgtttttaagttgtgggctcggcctttttttctctctccttgattcaccgttggtcgaggctgttcttttttttaccttgcacatagaggagagcttcttactaagaaggaagaatgaagaaggaagcgcgtgggggtttttttttttaccttgatgcttttttaacctgtgttcagttgattggctgcgtctggttgctactcaacaaacaagaacacaagctaaaacttggtgatcggagactaccttttgcttgcttcgatgct

SEQ ID NO: 39351 - DNA, 2113 bp, Zea Mays
ccagcgtaccgaaaaaaaaaaggcaaaggggagcctgtctgaccgaggacgaaagaggcgcaggcgcacatcctccccctcccttgccgtcctccccctccccttgctggccgtcgcctgctgctgctgtcgcaggcgcgccagcgccaccgacccgccgatgagcgtctagctaggcatcatctccgcgacgagtcgacccaccacccacccacccactggcttgcctgcgaaccacccctgcgccgatccacctccgctgcctgtctgcctgcttctacatataatcgcgccggcctccgcctcgtcgcctgcgacccccaccacagaaccctccccctcacctccgctatcctcctccccggccgctccccgacagactccgatggccatcgtcgagactgccgctgccgctgcggctgccgctgccgctgccgaccacaccgcgccaccgcgcgaggaggaggcgccgggcgccgccgccgacgccggggagcgcgaaatgcgggatctggaggacctcctctccaagctcaaccccatggccgaggagttcgtccctccctccctcgcctcccccatctccggcgccggggccgggcacggggccctcacgcccgcgccgctctccccagccgcctacggcttctacccggtcaacgccggcttcgcggtcgcctcgccgggccaccgcggcgtcgtcagcttcccggcggtcgccgacgcccacgccggacgcggcatgaagaaggacggagccggagggttcggcggccacggccacggccaccccggcaggcggcggaccaacagccgcaccagcatggcgcagcgggacgaggccatccgccgcaccgtctacgtctccgacatcgatcaccaggttactgaagaaaacctcgcagcactatttataaattgcggacaggttgtggactgtcgcatgtgtggggacccaaattcagtccttaggtttgctttcatagagttcactgatgaggagggtgcaagagctgctctgaatctgtcaggaaccgtgcttggatattatcctgtcaaggttctgccgtcaaaaactgccattgcaccagtcaacgaaacattcctacccaggtctgacgatgaacgtgaaatgtgtgcaaggactatctactgcacaaacattgacaagaaggtcactcaagcagatctaaaattattctttgagtccatatgtggtgaggttggtcgttctttactccaaacacaatctcccttctgtacagctaaaggtctttcggctgaggttgcttggcgactaccatcattctacccgcatcgcttttgtggaattcgtgatggtcagctaagcataccttcgccttcaaatttgcgcagcttcttttttttagggaagtattttttgcgcaaaagttgcctggcttttagcatcgtttgatgggcgaggacacacatcgcctccaaatactagaacgctagggatatttgttctctcaaataaagctttacctgtaagaagagctgttagtggctggagtgaatagaatttggttggtcggtgcctccaagttgtttggtctgccgttcaaatgcatgattattctgcgagctgttttaagactgggcctcaaatttttttttccaggcagaaagtgctactgctgctctcaactgtagcggtgtggtactgggatccttgccaataagggtgagcccgtccaagacgcccgtgcgtccccgcgtccctcgccacctgatgtcgtactaggtatacatacatgaggtgctgacgatgccactgctcatatataagtaatagagatagacatgtatgaaaagggtcttttgtttttaagttgtgggctcggcctttttttctctctccttgattcaccgttggtcgaggctgttcttttttttaccttgcacatagaggagagcttcttactaagaaggaagaatgaagaaggaagcgcgtgggggtttttttttttaccttgatgcttttttaacctgtgttcagttgattggctgcgtctggttgctactcaacaaacaagaacacaagctaaaacttggtgatcggagactaccttttgcttgcttcgatgct

SEQ ID NO: 39352 - DNA, 2164 bp, Zea Mays
caacagcccaacttctcgtcgtgctgttcccatctttcctttcctcttcccttccccgtcgatctcgtcggcgacgccactacctcgccgtccggtcccaccacccgcctccgactcctgcgacccagccacggatcccgaggatacgggccgagtccggcgatgggggtggtggtagagcgggaggagtgggcactcagccccttcgcctacccgctcctctccgccgccgccctcgccgcggtgctcctcctcccttacctttccccgaggactgcggcgcacgccaccggaccctcgtcccccttcgacgtgggagccgcacccttcctccggttccgccgcgccttcctcgtcctcttctccctcgcgtccggtatccattccgtgtttggggaggatgagttcgtgcggtgtgggcttggcagagagcagacgaccgcgcgccttgcctctaccactgcagctgcgctgttccccggtgccatttctggcgtcatctccgacaaaataggaccacgaagggcttgcatattgtattgggtacttcagcttgcagtaggtgttgtgaagagtttcagtgcgcttcgctgttcatggatcaacaatttcattctggcttttgcctcttcagtgttctctttctgttttgagacgtggcttgtgctggagcatgagaagcaagaccagaagcaagatctgctgtttgataccttctggctgatgacattctttgaatcggtgtcccttgtcggaagtcaagaaatcacaaatgtattggttagtgatgatgacagtagattcttgcttccctatgcatttgcagccacactatcggtagtgggcattctgtatatcagaaatgcatcaagtacatgtcagcatgcatctgccattgggagctaccaaaaatcatttcttgctcatgtcctcagaggtgagtgttgagtcatcttgcttgctccagagctttctttctcatttctgttgataaaactccatctatattcaattttaccatatctagatacaactgagaaagaaatttagcacatgtagaattgctctagtcaaattttagagatgtttctaaattctaatttgaaaaatgcataaaaggaaacaacatttctatctctctcatcatgaactcgtgagtcgtggttgttgcaggctaaacttttcagtgcttgcatgttccagttccatttgtgactgcaattaatgtgtttcagacaaaagagtactgatcctggtcttagctcaagcaagcatccattttgctgtctcagccttttggtttctctgggcaccaaccatagtggctgacggaaggtatgctcaactgtcagtaatctacccctgtttcttggcatcaaggatgcttggaagtgctggttttccatggttttacggagccatagcccccttccggaacgaggacagcttgacaatagcttacgttggtgctggactcgctttgtcgattgtggcttatgattaccaggagattgcaccactggtgatagtgttctgcatcttccatgcctgtgtgggcttcattttgccgtcactggccagattgcgaacaatgtacctgccaaatgagctgcgagggggcatgatgagcttttcaatgtcactggcaaatgccgccaccttcgttttcttgatacagggcagcgcccaccatcgacacgttgcaaactcaaccatcctgagccttgcgtcctatggcctgttaggagctgggggctgcgtccatatgttgaggaggtggaggaagcacactcggctgaatgcccgtagtctgtaggagctggaggcacccaatgaatgctatacacactgcagggtgagcttgagagcggtttctgtagcatgctagtatctcacgttttgtttatctgactttttctggaaatatcaggaggtaggtgtaggatactacttttgttgttgttcaaagaaattgttgaaattgaaggttgacaaaaaatctgtgtacatgcgtcggggccatcaaactaacgtctgactttgatttttagcaattaaactcgaaagccaggaatctgtgtatgtatgtttggtttgtagtttttttttcaagtgttcgtttcatacattgtcttgatagtataaaaatcgctcgtaccataca

SEQ ID NO: 39353 - DNA, 2080 bp, Zea Mays
caacagcccaacttctcgtcgtgctgttcccatctttcctttcctcttcccttccccgtcgatctcgtcggcgacgccactacctcgccgtccggtcccaccacccgcctccgactcctgcgacccagccacggatcccgaggatacgggccgagtccggcgatgggggtggtggtagagcgggaggagtgggcactcagccccttcgcctacccgctcctctccgccgccgccctcgccgcggtgctcctcctcccttacctttccccgaggactgcggcgcacgccaccggaccctcgtcccccttcgacgtgggagccgcacccttcctccggttccgccgcgccttcctcgtcctcttctccctcgcgtccgtggttgaaggtatccattccgtgtttggggaggatgagttcgtgcggtgtgggcttggcagagagcagacgaccgcgcgccttgcctctaccactgcagctgcgctgttccccggtgccatttctggcgtcatctccgacaaaattttggatgatatatttggctggtaggaatttcagagtataatctgaaccttggtatgatttgtctttcttctctttcgtgtagttttttgttccataatctactcgtatccttggcagcagttactgttatgtgatgcagtctatgttttcttttatccttccagtagtagctataacttacaaattttccactgatgattatagaggaccacgaagggcttgcatattgtattgggtacttcagcttgcagtaggtgttgtgaagagtttcagtgcgcttcgctgttcatggatcaacaatttcattctggcttttgcctcttcagtgttctctttctgttttgagacgtggcttgtgctggagcatgagaagcaagaccagaagcaagatctgctgtttgataccttctggctgatgacattctttgaatcggtgtcccttgtcggaagtcaagaaatcacaaatgtattggttagtgatgatgacagtagattcttgcttccctatgcatttgcagccacactatcggtagtgggcattctgtatatcagaaatgcatcaagtacatgtcagcatgcatctgccattgggagctaccaaaaatcatttcttgctcatgtcctcagagacaaaagagtactgatcctggtcttagctcaagcaagcatccattttgctgtctcagccttttggtttctctgggcaccaaccatagtggctgacggaaggtatgctcaactgtcagtaatctacccctgtttcttggcatcaaggatgcttggaagtgctggttttccatggttttacggagccatagcccccttccggaacgaggacagcttgacaatagcttacgttggtgctggactcgctttgtcgattgtggcttatgattaccaggagattgcaccactggtgatagtgttctgcatcttccatgcctgtgtgggcttcattttgccgtcactggccagattgcgaacaatgtacctgccaaatgagctgcgagggggcatgatgagcttttcaatgtcactggcaaatgccgccaccttcgttttcttgatacagggcagcgcccaccatcgacacgttgcaaactcaaccatcctgagccttgcgtcctatggcctgttaggagctgggggctgcgtccatatgttgaggaggtggaggaagcacactcggctgaatgcccgtagtctgtaggagctggaggcacccaatgaatgctatacacactgcagggtgagcttgagagcggtttctgtagcatgctagtatctcacgttttgtttatctgactttttctggaaatatcaggaggtaggtgtaggatactacttttgttgttgttcaaagaaattgttgaaattgaaggttgacaaaaaatctgtgtacatgcgtcggggccatcaaactaacgtctgactttgatttttagcaattaaactcgaaagccaggaatctgtgtatgtatgtttggtttgtagtttttttttcaagtgttcgtttcatacattgtcttgatagtataaaaatcgctcgtaccataca

SEQ ID NO: 39354 - DNA, 2260 bp, Zea Mays
caacagcccaacttctcgtcgtgctgttcccatctttcctttcctcttcccttccccgtcgatctcgtcggcgacgccactacctcgccgtccggtcccaccacccgcctccgactcctgcgacccagccacggatcccgaggatacgggccgagtccggcgatgggggtggtggtagagcgggaggagtgggcactcagccccttcgcctacccgctcctctccgccgccgccctcgccgcggtgctcctcctcccttacctttccccgaggactgcggcgcacgccaccggaccctcgtcccccttcgacgtgggagccgcacccttcctccggttccgccgcgccttcctcgtcctcttctccctcgcgtccgtggttgaaggtatccattccgtgtttggggaggatgagttcgtgcggtgtgggcttggcagagagcagacgaccgcgcgccttgcctctaccactgcagctgcgctgttccccggtgccatttctggcgtcatctccgacaaaataggaccacgaagggcttgcatattgtattgggtacttcagcttgcagtaggtgttgtgaagagtttcagtgcgcttcgctgttcatggatcaacaatttcattctggcttttgcctcttcagtgttctctttctgttttgagacgtggcttgtgctggagcatgagaaggtttctgtatttcttgaaacacatatgtgctattactgtgttgtctatgttgtatgaatcatttagcgcttgatcctgaattttcagcaagaccagaagcaagatctgctgtttgataccttctggctgatgacattctttgaatcggtgtcccttgtcggaagtcaagaaatcacaaatgtattggttagtgatgatgacagtagattcttgcttccctatgcatttgcagccacactatcggtagtgggcattctgtatatcagaaatgcatcaagtacatgtcagcatgcatctgccattgggagctaccaaaaatcatttcttgctcatgtcctcagaggtgagtgttgagtcatcttgcttgctccagagctttctttctcatttctgttgataaaactccatctatattcaattttaccatatctagatacaactgagaaagaaatttagcacatgtagaattgctctagtcaaattttagagatgtttctaaattctaatttgaaaaatgcataaaaggaaacaacatttctatctctctcatcatgaactcgtgagtcgtggttgttgcaggctaaacttttcagtgcttgcatgttccagttccatttgtgactgcaattaatgtgtttcagacaaaagagtactgatcctggtcttagctcaagcaagcatccattttgctgtctcagccttttggtttctctgggcaccaaccatagtggctgacggaaggtatgctcaactgtcagtaatctacccctgtttcttggcatcaaggatgcttggaagtgctggttttccatggttttacggagccatagcccccttccggaacgaggacagcttgacaatagcttacgttggtgctggactcgctttgtcgattgtggcttatgattaccaggagattgcaccactggtgatagtgttctgcatcttccatgcctgtgtgggcttcattttgccgtcactggccagattgcgaacaatgtacctgccaaatgagctgcgagggggcatgatgagcttttcaatgtcactggcaaatgccgccaccttcgttttcttgatacagggcagcgcccaccatcgacacgttgcaaactcaaccatcctgagccttgcgtcctatggcctgttaggagctgggggctgcgtccatatgttgaggaggtggaggaagcacactcggctgaatgcccgtagtctgtaggagctggaggcacccaatgaatgctatacacactgcagggtgagcttgagagcggtttctgtagcatgctagtatctcacgttttgtttatctgactttttctggaaatatcaggaggtaggtgtaggatactacttttgttgttgttcaaagaaattgttgaaattgaaggttgacaaaaaatctgtgtacatgcgtcggggccatcaaactaacgtctgactttgatttttagcaattaaactcgaaagccaggaatctgtgtatgtatgtttggtttgtagtttttttttcaagtgttcgtttcatacattgtcttgatagtataaaaatcgctcgtaccataca

SEQ ID NO: 39355 - DNA, 1126 bp, Zea Mays
gtcaagtgtcaacttgcgttcagcccatggaggaacattccagtccggtccatccgggcccacttgtcatctgactcagtgtgtgtgagtgggctactaggcgtcttccactcttcctctcctttccagaccccagagccagagatcaaccacctgcggcggcgatggggatcggtgagcacttcgagggcgtgaagcagcactgggcgagcaacttcgccttcctcgactactacaagaaggtctacggccgcgccgagcccctccccaagtggtccgacgccgacgtcgacgagttcatcgcctccgacccggtctacgggccccagctcaaggccctgcgggagtcgaggaagtttgcgctcgccggggccttcgccggcgccgcccacctcggcggcgtcgcgctcaagtactccaaggcgccgcacggcgtcgtgctggcgaccgggttcggggcgatcacgggcgccgtgctggggtccgaggtggcggagcactggtaccagctctacaagatggacaagcagggggccaaccttaggttcatctactggtgggaggacaaggtctcaggacagaagagctgaaccatgttgaattgaatgatgcctatttgagcattccagtttgacaaaaacattgatgtctattatctgtaatccttattgttttgttttgtttcctagtttttctctaataaggtgcgtatcggttgtggaaaccaactggacgatgtatttttcatctctgtcagtagtgacatttatccttagtacttacaatgtttatggtcaatctggtgcaaacagcaaatcctctccgttttcaagtgggactgtgctaaaacgcccattctgctggtccgctaccaccatgcctacgtcaagcaaactactctgctctactatctgcatcaggaatgaaacctgaagtttgtaccacagagtgagctgacagttggaaaataccttttcctggagaatctcgttggcagctttcaacatgccttcctgcgtacacgcagacacttttagtgagcaccgtggtttcatgtttggggtcctggcagacatggacatggccaaagcttttaggaaggcaggggagagcagaggacatgatg

SEQ ID NO: 39356 - DNA, 985 bp, Zea Mays
tccatccgggcccacttgtcatctgactcagtgtgtgtgagtgggctactaggcgtcttccactcttcctctcctttccagaccccagagccagagatcaaccacctgcggcggcgatggggatcggtgagcacttcgagggcgtgaagcagcactgggcgagcaacttcgccttcctcgactactacaagaaggtctacggccgcgccgagcccctccccaagtggtccgacgccgacgtcgacgagttcatcgcctccgacccggtctacgggccccagctcaaggccctgcgggagtcgaggaagtttgcgctcgccggggccttcgccggcgccgcccacctcggcggcgtcgcgctcaagtactccaaggcgccgcacggcgtcgtgctggcgaccgggttcggggcgatcacgggcgccgtgctggggtccgaggtggcggagcactggtaccagctctacaagatggacaagcagggggccaaccttaggttcatctactggtgggaggacaaggtctcagaagagctgaaccatgttgaattgaatgatgcctatttgagcattccagtttgacaaaaacattgatgtctattatctgtaatccttattgttttgttttgtttcctagtttttctctaataaggtgcgtatcggttgtggaaaccaactggacgatgtatttttcatctctgtcagtagtgacatttatccttagtacttacaatgtttatggtcaatctggtgcaaacagcaaatcctctccgttttcaaggtatggtttctcaaactactattttcctgtcagtagttataacctcagaaataagaataccatgatcatgttgcaattattgttgtatctgtttcttatataaggctatgtatgtactgtcattgccccttgggtagacgtgtactcaactgcacggatgttgcaattatataaggctatgtatgattttttatttaaatgtatc

SEQ ID NO: 39357 - DNA, 879 bp, Zea Mays
tccatccgggcccacttgtcatctgactcagtgtgtgtgagtgggctactaggcgtcttccactcttcctctcctttccagaccccagagccagagatcaaccacctgcggcggcgatggggatcggtgagcacttcgagggcgtgaagcagcactgggcgagcaacttcgccttcctcgactactacaagaaggtctacggccgcgccgagcccctccccaagtggtccgacgccgacgtcgacgagttcatcgcctccgacccggtctacgggccccagctcaaggccctgcgggagtcgaggaagtttgcgctcgccggggccttcgccggcgccgcccacctcggcggcgtcgcgctcaagtactccaaggcgccgcacggcgtcgtgctggcgaccgggttcggggcgatcacgggcgccgtgctggggtccgaggtggcggagcactggtaccagctctacaagatggacaagcagggggccaaccttaggttcatctactggtgggaggacaaggtctcaggtccgtcctgtcccccgtgccatcttgtcctctctgacgatccagttcctgtttagtgtacgtggttaattctggacagaagagctgaaccatgttgaattgaatgatgcctatttgagcattccagtttgacaaaaacattgatgtctattatctgtaatccttattgttttgttttgtttcctagtttttctctaataaggtgcgtatcggttgtggaaaccaactggacgatgtatttttcatctctgtcagtagtgacatttatccttagtacttacaatgtttatggtcaatctggtgcaaacagcaaatcctctccgttttcaagtgggactgtgctaaaacgcc

SEQ ID NO: 39358 - DNA, 1304 bp, Zea Mays
acttactttgatacggcccttcgttcttatccacatccccttttgccagccactgctcccgtcccacccgccacaccgtccaccggcacgtccaccggctcccatggcgctccacgccgtctcctccgcggcggtctcctccccgttgcgcgccctctcacgcagcctcccccagcgcccaggctgtggttgtttaccaaagcagtccgtcatgatttactccacaaaatttgcaagacctcaggctggaccggtggacttcgctggcaggcctctggttcttggacgctcggacaagagttttgatgcatgccactattgaagaaatcgaagcggagaaatccctcatcgaagaccaagctaaagaaaagatggagaaggcaatcgaaacagtccaagctaacttcaacactgtgaggacaggacgtgcaaacccggccatgcttgaccggattgaggttgagtactacggaactccagtaaacttgaagagcattgcacagataagcactccagatgcaacttctcttcttattcaaccatatgataagtcaagcctcaagcttattgagaaaactatagttgctgcaaatcttggtgtgacaccaagcaatgatggagaagtaatacgagtgactgtcccaccattgacatctgatcgcagaaaggaattatcaaagacagtagctaaattagctgaagatggcaagtaagtgttttttttttgcaggttgctataaggaacataagaagagatgcaatcaaagcttatgataaactagagaaggaaaagaagctttctgaggacaatgtgaaagatttatcagctgatctacaaaaagtcacagatgagtacatgaaaaagatcgaatccatccagaagcagaaggaacaggaactgatgaaaatttagacctcaagctgactgtatggctggtgaggagtaaccgcctccgtgaagcatggacccctgcatatgttggtgtttctgaagcaatttgtttggttcatggctttggcgtctcggcgctgcgccagggatgcacgttttgaatcaggcgctttgctggaacttttgggtgcacacaagttgagactgctgctgctgctgtgtgtgtgttttgagattaagacaatgctgctgtgttttttctttgagattaagacaatgctgttgcgtgtgttcttctcgttttctgtaatgttcgtaaatagtctcttcgtcgccgtgttgtctgactgctacattgtcaatatttcaaaacatacgtctctgaatcaaatgtctggattggttctgccta

SEQ ID NO: 39359 - DNA, 1583 bp, Zea Mays
acttactttgatacggcccttcgttcttatccacatccccttttgccagccactgctcccgtcccacccgccacaccgtccaccggcacgtccaccggctcccatggcgctccacgccgtctcctccgcggcggtctcctccccgttgcgcgccctctcacgcagcctcccccagcgcccaggctgtggttgtttaccaaagcagtccgtcatgatttactccacaaaatttgcaagacctcaggctggaccggtggacttcgctggcaggcctctggttcttggacgctcggacaagagttttgatgcatgccactattgaagaaatcgaagcggagaaatccctcatcgaagaccaagctaaagaaaagatggagaaggcaatcgaaacagtccaagctaacttcaacactgtgaggacaggacgtgcaaacccggccatgcttgaccggattgaggtttcatggctcgtccttgttcttttttcttatatatgatgaagtgctaagtgttgcatgatcaaatatattcccctgtgttgggaacatcttccattttgcatgcttgtcatggtttcctgcttagctgaaactttgtacaatatagtgtttctcatagctcactaactgtaaatataaaaccttatctgattttagcaaagcagagtttagtggctgattcaactttagcgcacagagactactggaaatggttgtactgttctattcaactaagattcaataaatgtttcttacaggttgagtactacggaactccagtaaacttgaagagcattgcacagataagcactccagatgcaacttctcttcttattcaaccatatgataagtcaagcctcaagcttattgagaaaactatagttgctgcaaatcttggtgtgacaccaagcaatgatggagaagtaatacgagtgactgtcccaccattgacatctgatcgcagaaaggaattatcaaagacagtagctaaattagctgaagatggcaaggttgctataaggaacataagaagagatgcaatcaaagcttatgataaactagagaaggaaaagaagctttctgaggacaatgtgaaagatttatcagctgatctacaaaaagtcacagatgagtacatgaaaaagatcgaatccatccagaagcagaaggaacaggaactgatgaaaatttagacctcaagctgactgtatggctggtgaggagtaaccgcctccgtgaagcatggacccctgcatatgttggtgtttctgaagcaatttgtttggttcatggctttggcgtctcggcgctgcgccagggatgcacgttttgaatcaggcgctttgctggaacttttgggtgcacacaagttgagactgctgctgctgctgtgtgtgtgttttgagattaagacaatgctgctgtgttttttctttgagattaagacaatgctgttgcgtgtgttcttctcgttttctgtaatgttcgtaaatagtctcttcgtcgccgtgttgtctgactgctacattgtcaatatttcaaaacatacgtctctgaatcaaatgtctggattggttctgccta

SEQ ID NO: 39360 - DNA, 1282 bp, Zea Mays
acttactttgatacggcccttcgttcttatccacatccccttttgccagccactgctcccgtcccacccgccacaccgtccaccggcacgtccaccggctcccatggcgctccacgccgtctcctccgcggcggtctcctccccgttgcgcgccctctcacgcagcctcccccagcgcccaggctgtggttgtttaccaaagcagtccgtcatgatttactccacaaaatttgcaagacctcaggctggaccggtggacttcgctggcaggcctctggttcttggacgctcggacaagagagcagttttgatgcatgccactattgaagaaatcgaagcggagaaatccctcatcgaagaccaagctaaagaaaagatggagaaggcaatcgaaacagtccaagctaacttcaacactgtgaggacaggacgtgcaaacccggccatgcttgaccggattgaggttgagtactacggaactccagtaaacttgaagagcattgcacagataagcactccagatgcaacttctcttcttattcaaccatatgataagtcaagcttattgagaaaactatagttgctgcaaatcttggtgtgacaccaagcaatgatggagaagtaatacgagtgactgtcccaccattgacatctgatcgcagaaaggaattatcaaagacagtagctaaattagctgaagatggcaaggttgctataaggaacataagaagagatgcaatcaaagcttatgataaactagagaaggaaaagaagctttctgaggacaatgtgaaagatttatcagctgatctacaaaaagtcacagatgagtacatgaaaaagatcgaatccatccagaagcagaaggaacaggaactgatgaaaatttagacctcaagctgactgtatggctggtgaggagtaaccgcctccgtgaagcatggacccctgcatatgttggtgtttctgaagcaatttgtttggttcatggctttggcgtctcggcgctgcgccagggatgcacgttttgaatcaggcgctttgctggaacttttgggtgcacacaagttgagactgctgctgctgctgtgtgtgtgttttgagattaagacaatgctgctgtgttttttctttgagattaagacaatgctgttgcgtgtgttcttctcgttttctgtaatgttcgtaaatagtctcttcgtcgccgtgttgtctgactgctacattgtcaatatttcaaaacatacgtctctgaatcaaatgtctggattggttctgccta

SEQ ID NO: 39361 - DNA, 1207 bp, Zea Mays
acttactttgatacggcccttcgttcttatccacatccccttttgccagccactgctcccgtcccacccgccacaccgtccaccggcacgtccaccggctcccatggcgctccacgccgtctcctccgcggcggtctcctccccgttgcgcgccctctcacgcagcctcccccagcgcccaggctgtggttgtttaccaaagcagtccgtcatgatttactccacaaaatttgcaagacctcaggctggaccggtggacttcgctggcaggcctctggttcttggacgctcggacaagagagcagttttgatgcatgccactattgaagaaatcgaagcggagaaatccctcatcgaagaccaagctaaagaaaagatggagaaggcaatcgaaacagtccaagctaacttcaacactgtgaggacaggacgtgcaaacccggccatgcttgaccggattgaggttgagtactacggaactccagtaaacttgaagagcattgcacagataagcactccagatgcaacttctcttcttattcaaccatatgataagtcaagcctcaagcttattgagaaaactatagttgctgcaaatcttggtgtgacaccaagcaatgatggagaagtaatacgagtgactgtcccaccattgacatctgatcgcagaaaggaattatcaaagacagtagctaaattagctgaagatggcaagtaagtgttttttttttgcaggttgctataaggaacataagaagagatgcaatcaaagcttatgataaactagagaaggaaaagaagctttctgaggacaatgtgaaagatttatcagctgatctacaaaaagtcacagatgagtacatgaaaaagatcgaatccatccagaagcagaaggaacaggaactgatgaaaatttagacctcaagctgactgtatggctgggatgcacgttttgaatcaggcgctttgctggaacttttgggtgcacacaagttgagactgctgctgctgctgtgtgtgtgttttgagattaagacaatgctgctgtgttttttctttgagattaagacaatgctgttgcgtgtgttcttctcgttttctgtaatgttcgtaaatagtctcttcgtcgccgtgttgtctgactgctacattgtcaatatttcaaaacatacgtctctgaatcaaatgtctggattggttctgccta

SEQ ID NO: 39362 - DNA, 1544 bp, Zea Mays
aataaatctttgatgccgctgaggtatatggtcgtgtaaaagtttgaaatataaagggagagagaggagaggatgaaaagaaaaaacgaacaaaaagggtaatggatcaactcatatcaactgaccgagcgcttgtcaaaaaccaaacagaacaaggacccaggcaaaatccactgacggcaagagataggagggagatctcgtgatttccggtggcaagtttcggttttgatcccaaccccaggttcctcaccccgaggagaaaaggatccagattttcttcctctctagtaagttgcagttcgcggtggcgccgccccccgccgctgcctccgtgttgcgcggttccgatttggagtgagggggagcgcgtgccgtgggattcccgttcggatctacggagtgggcagctttcctgctccaattcggtcggccagcaacgaaggcccttgaatcttgttgatgcgcggccagatgcgggaagcgtactgggagaaggtttcttggaatcttcgtccgggctccgtggagtgaggtccctcgcccgccgggatcgccccgtcgtcctatgggctgcgtcagttccaagcaattccacggcggggacgaccatggggacggcaagccgcgccggcggccctcgagcaactcgctgaagcgcctggttagttacagttccagcaagaggcatgaggagttggaggaggaggatgaggtgggggcggctgtggcggccacgtcctcgagcggcggacgccgcgctgggaatgacgccagcacggcgaggctgatccggaagccgccagcactggtggtcgaggctgtgccggcattgtcggaggaggctgccactttggcggttggtgtagttgatgcagaaagggcggttgctgcagcgactgggaatcggaagcggcctcctgcagatgtacatatcaatggcgcggcagagcaaggactgagtagcgttggtgttagaacggagggggaggccaaaccaaggatcagggacgtgcccaatggcgtccagggggagcatgtggtggcagggtggccgagatggctcacagaggtggcggcagaggcggttcgtgggtggcaacctcggagggctgagtctttcgagaagctggacaagataggacaaggtacatatagcagcgtttataaagcacgtgatcttgagaatggaaaaattgtcgctctgaagaaagttcggtttgccaatatggaccctgagagtgtccgatttatggcaagggaaatccacatcttaagaaggcttgatcatccaaatgttatcaaacttgaaggtttggtgacgtcacgcatgtcaagcagcttgtatcttgtatttgaatacatggagcacgaccttgcaggacttgcagctacacctggcttaaaattctcagaacctcaggtcaagtgttacatgcaacagctactttctggacttgatcattgtcacaaccgtggtgttttgcatcgggatataaagggtgcaaatctcctacttgacaacaatggcattcttaaaatag

SEQ ID NO: 39363 - DNA, 1525 bp, Zea Mays
gttgcattcttgctgagttgctatcagggaagcctatcatgccaggacgaactgaggtggaacagttgcacaaaatttttaagctctgcggttcaccatcagaggagttttgggctaatttgaagttatcccgagctaccatattcaagcctcagcatccgtaccgccgatgtgtgaatgatgtatataaggactttcctactactgctttaacacttttggaccatctacttgccgtagaacctgggaataggggtaccgctgcatctgcccttgacagtgaattttttacaacaaagccatatgcctgcgatccatcaagtctacccaagtatcccccaagcaaggaatatgatgctaagcttcgagatgaagaagctaggaggcaaagagcagctgctaaaggacaggaagctgaagctggacggaggaagcaacctcctgcacctgatggtaatagtggattgcagcaccgccgagttcagatgaatcctaaaagcagcagttacaagttcactccaaaggaggatgctgtttctggatttccaattgatccgccagcaagagctgctgcagacaatggttaccctcagcgcgttcctctgatgcaagctggccgttcttcctccactctgggtagatcaagtgggatggatccaaaggcccaaagattccacacctcccaaattgtcactactgagatgtccggccaatctactgcatctgggcagcgaggcaatgctcctaagatgtctaacctcggggaaagtgccaggagacaatatcttcgagagcatcggtccagttcaagatacagtcaactcactgctgcggacccttctgacaggcctgaatggaaccatcaattccaagagcggccatcgtcttcccatcggaaggatgatgctgtggcaaacaaggagcatacggtggtgaacgggacaaagaagaacagaatccactattcggggccattgatgcctcctggagtgaacatggatgagattcttagagagcacgagcgacagatccaacaagcagtgcgaagagcgcgccttgacaagggaaagggaaagcacagcggtgagagagaccagtcggagtcactgctgtgtaccaccgggaatctcagggctgatcgctaagttcagtttgagcagtcatcagaagcaaagaaaacagcatcgaatcccttatattttttcggttcccccgccccaccccaaccgccaagcggagaggtttttgttctgccagaaactcaaactcctgatgcggtttggtacccaggaggtgggcagctgccaaaagaaaacctgttcctgtagagatttaccgccccagagtctagcatatgcggtctgaaatattttttccctgaagatttgttggttatccatagtcctcaattgtatatctcaaaagtactcacccccaaaaatgaaaaattgatccatacactcgtttttgcatacgacgtgacactccaaaatgaaaattccataaagattctcgatgaattaag

SEQ ID NO: 39364 - DNA, 1380 bp, Zea Mays
attcaagcctcagcatccgtaccgccgatgtgtgaatgatgtatataaggactttcctactactgctttaacacttttggaccatctacttgccgtagaacctgggaataggggtaccgctgcatctgcccttgacagtgaattttttacaacaaagccatatgcctgcgatccatcaagtctacccaagtatcccccaagcaaggaatatgatgctaagcttcgagatgaagaagctaggaggcaaagagcagctgctaaaggacaggaagctgaagctggacggaggaagcaacctcctgcacctgatggtaatagtggattgcagcaccgccgagttcagatgaatcctaaaagcagcagttacaagttcactccaaaggaggatgctgtttctggatttccaattgatccgccagcaagagctgctgcagacaatggttaccctcagcgcgttcctctgatgcaagctggccgttcttcctccactctgggtagatcaagtgggatggatccaaaggcccaaagattccacacctcccaaattgtcactactgagatgtccggccaatctactgcatctgggcagcgaggcaatgctcctaagatgtctaacctcggggaaagtgccaggagacaatatcttcgagagcatcggtccagttcaagatacagtcaactcactgctgcggacccttctgacaggcctgaatggaaccatcaattccaagagcggccatcgtcttcccatcggaaggatgatgctgtggcaaacaaggagcatacggtgaacgggacaaagaagaacagaatccactattcggggccattgatgcctcctggagtgaacatggatgagattcttagagagcacgagcgacagatccaacaagcagtgcgaagagcgcgccttgacaagggaaagggaaagcacagcggtgagagagaccagtcggagtcactgctgtgtaccaccgggaatctcagggctgatcgctaagttcagtttgagcagtcatcagaagcaaagaaaacagcatcgaatcccttatattttttcggttcccccgccccaccccaaccgccaagcggagaggtttttgttctgccagaaactcaaactcctgatgcggtttggtacccaggaggtgggcagctgccaaaagaaaacctgttcctgtagagatttaccgccccagagtctagcatatgcggtctgaaatattttttccctgaagatttgttggttatccatagtcctcaattgtatatctcaaaagtactcacccccaaaaatgaaaaattgatccatacactcgtttttgcatacgacgtgacactccaaaatgaaaattccataaagattctcgatgaattaag

SEQ ID NO: 39365 - DNA, 1364 bp, Zea Mays
tcaagcctcagcatccgtaccgccgatgtgtgaatgatgtatataaggactttcctactactgctttaacacttttggaccatctacttgccgtagaacctgggaataggggtaccgctgcatctgcccttgacagtgaattttttacaacaaagccatatgcctgcgatccatcaagtctacccaagtatcccccaagcaaggaatatgatgctaagcttcgagatgaagaagctaggaggcaaagagcagctgctaaaggacaggaagctgaagctggacggaggaagcaacctcctgcacctgatgcaccgccgagttcagatgaatcctaaaagcagcagttacaagttcactccaaaggaggatgctgtttctggatttccaattgatccgccagcaagagctgctgcagacaatggttaccctcagcgcgttcctctgatgcaagctggccgttcttcctccactctgggtagatcaagtgggatggatccaaaggcccaaagattccacacctcccaaattgtcactactgagatgtccggccaatctactgcatctgggcagcgaggcaatgctcctaagatgtctaacctcggggaaagtgccaggagacaatatcttcgagagcatcggtccagttcaagatacagtcaactcactgctgcggacccttctgacaggcctgaatggaaccatcaattccaagagcggccatcgtcttcccatcggaaggatgatgctgtggcaaacaaggagcatacggtggtgaacgggacaaagaagaacagaatccactattcggggccattgatgcctcctggagtgaacatggatgagattcttagagagcacgagcgacagatccaacaagcagtgcgaagagcgcgccttgacaagggaaagggaaagcacagcggtgagagagaccagtcggagtcactgctgtgtaccaccgggaatctcagggctgatcgctaagttcagtttgagcagtcatcagaagcaaagaaaacagcatcgaatcccttatattttttcggttcccccgccccaccccaaccgccaagcggagaggtttttgttctgccagaaactcaaactcctgatgcggtttggtacccaggaggtgggcagctgccaaaagaaaacctgttcctgtagagatttaccgccccagagtctagcatatgcggtctgaaatattttttccctgaagatttgttggttatccatagtcctcaattgtatatctcaaaagtactcacccccaaaaatgaaaaattgatccatacactcgtttttgcatacgacgtgacactccaaaatgaaaattccataaagattctcgatgaattaag

SEQ ID NO: 39366 - DNA, 1747 bp, Zea Mays
cgcccaacaaccctgaactgggccggccgtcgctgcattcccccttccgctgcccaacgacccttcccgtccgctggcaaccctcgcctccgcgtggcactccagggctccagaccccgccgccgccctaagccagacgctgaggcttgtggtctcttcgccggagacgagcaccaaccaggatgcaatgtttggtccggaatgtctgccgagccggaagccgtggagcggcggcgaggctcctggagcttgccgcggctggtccgggtgcgacgcagccatccgtggccgtcaaactcctcaggccgccttacgagttcacacgtccgatcggggtagttcaacccgtacgtgtgcagagccgggccgtttcgcgtgatggcctcgttcctgccgcggccacctccggttttggtctctgcgcacaagttatcgtcgcgatgaggggtctgtcgacggtggggagtgcggccgaggtcgcttctgattcggacgattccacctcccctgcggttgagcaccccccgcgcatcaagttcaagaggcccgacaagaccgccaggcacattatgaatgtatgtaagctgaatcctaaacaaagaggcggtcgaaaaggtccgctcggaaagggagattcctgatgtgcagcctggatgcatcattcagatgagattgcaagttcctgagaacaaacggcgtgagtcgacgctgaaggggattgtgataggaaggcgcaacgccgggatcaatacaaccttcagattgcgtagattagtggctggtgtcggagtcgagtctgtctttccactttactcgccaaacatcaaagaaatcaaggtattggacaggaagaaagtcaggagagctaagctgtattacctgagggacaggatgaacgcacttagaaaatgagtctttcagcttgtttcaaggaatttcgccgtgcggatcagcacggtttctgaagcgcaacggttgcagccctgagaattgcattgtctggttccacatcgttgcaaagccatagcctgtagttgtcgattgccatgcttggttttgagctgcaagtgctagcagatatatgttttccgacacaatcaaaaaaaattgcggttattcccttttcgatttacgacactgtagcttcatagcacaaaataacgtgctcagatctattacttccctccgcacctttactatctaggatgtatgtgttttttgacataagcaagctggaaagtgaaaactcttatgtgatgcttcctgatatcgagatcatgggcctcttctttcctgtccagctcgacctgctgtgtgagaagtggtataagctctaaggacacccattgaactgaactttgttggagtctttatggcttagtatgtgtggtgcggagtgattgtgagtaagtggtgtcgtaactaattctgagttttagaaacttacagctgataattggtagcccttgttgatttggggctatggagttgagacttgagagagagtggcatctatatcactcaagctcagctctttgtgatgaagtggtataaccgtataaaccagtctcacgccacaaacgtaatcatagactagccggttgtcctgctttgatatggttgttttatgtcatgtaaatatatattgagatatttattaaatataattattgtttatttttaaacactaaagtgtgtatggttgttttatatcatgtaaatagatattgagatatttattaaatat

SEQ ID NO: 39367 - DNA, 1805 bp, Zea Mays
cgcccaacaaccctgaactgggccggccgtcgctgcattcccccttccgctgcccaacgacccttcccgtccgctggcaaccctcgcctccgcgtggcactccagggctccagaccccgccgccgccctaagccagacgctgaggcttgtggtctcttcgccggagacgagcaccaaccagcaatttgaaaggcctcgattcgattcgcccgtggtttactgagcaaattcttcgcatggcacgggactcaggatgcaatgtttggtccggaatgtctgccgagccggaagccgtggagcggcggcgaggctcctggagcttgccgcggctggtccgggtgcgacgcagccatccgtggccgtcaaactcctcaggccgccttacgagttcacacgtccgatcggggtagttcaacccgtacgtgtgcagagccgggccgtttcgcgtgatggcctcgttcctgccgcggccacctccggttttggtctctgcgcacaagttatcgtcgcgatgaggggtctgtcgacggtggggagtgcggccgaggtcgcttctgattcggacgattccacctcccctgcggttgagcaccccccgcgcatcaagttcaagaggcccgacaagaccgccaggcacattatgaatatcctaaacaaagaggcggtcgaaaaggtccgctcggaaagggagattcctgatgtgcagcctggatgcatcattcagatgagattgcaagttcctgagaacaaacggcgtgagtcgacgctgaaggggattgtgataggaaggcgcaacgccgggatcaatacaaccttcagattgcgtagattagtggctggtgtcggagtcgagtctgtctttccactttactcgccaaacatcaaagaaatcaaggtattggacaggaagaaagtcaggagagctaagctgtattacctgagggacaggatgaacgcacttagaaaatgagtctttcagcttgtttcaaggaatttcgccgtgcggatcagcacggtttctgaagcgcaacggttgcagccctgagaattgcattgtctggttccacatcgttgcaaagccatagcctgtagttgtcgattgccatgcttggttttgagctgcaagtgctagcagatatatgttttccgacacaatcaaaaaaaattgcggttattcccttttcgatttacgacactgtagcttcatagcacaaaataacgtgctcagatctattacttccctccgcacctttactatctaggatgtatgtgttttttgacataagcaagctggaaagtgaaaactcttatgtgatgcttcctgatatcgagatcatgggcctcttctttcctgtccagctcgacctgctgtgtgagaagtggtataagctctaaggacacccattgaactgaactttgttggagtctttatggcttagtatgtgtggtgcggagtgattgtgagtaagtggtgtcgtaactaattctgagttttagaaacttacagctgataattggtagcccttgttgatttggggctatggagttgagacttgagagagagtggcatctatatcactcaagctcagctctttgtgatgaagtggtataaccgtataaaccagtctcacgccacaaacgtaatcatagactagccggttgtcctgctttgatatggttgttttatgtcatgtaaatatatattgagatatttattaaatataattattgtttatttttaaacactaaagtgtgtatggttgttttatatcatgtaaatagatattgagatatttattaaatat

SEQ ID NO: 39368 - DNA, 3274 bp, Zea Mays
tgctgcagcttctgggccgaccgggggggggggggggggggtgcgtttgacttccctttccttcctgcggtaggggcccacctcgttgccccgctaggccgctacccttctctcttcccccgcctccgtctcttcgactccagacacctccccttcccgctcgccggcgctcggcggcgatccggaaccggcagcggcgcgcatggcgggcccgtgggacacgcacgcgtcgacgagccgggcgcccgcgggccccgacggggaggcggagggcgcgtcgccggactcgctgcggaacacgccctccaacatcgcgcggctggaggacgcgatcgggcactgcgcggcgcgccgcaagtacctcgcgcacaccaagagcccctccgacggcgaggacgtccgctggtacttctgcaagcttcccctcgccgacaaagtgctctcttcttcggtaccacggacagagatagtcgggaaaggagactatttccggttcagcgagagggactctctggcactggaggcatctttcttggagagggaggaagagctgcttgcgtactggtggagggagtacgctgaatgcagtgcaggaccaagaggatccttggttgaaagtgatgattctgcatatctttataaggttgaggaagagcgggttggggttcctgtgaaaggtggactatatgaggttgatttgatgaggcggcattgcttccctgtgtactggaatggggaaaaccggcgtgtcttgagaggccactggtttgctcgcaaaggtggcgtcgactggattcccgtgcgcgaggatgtctctgaacaacttgagttagcgtataattgtcaggtctggcatcgtcggaaatttcaaccttcaggcctatttgcagcaagggttgaccttcaaggaagtacaccggtcctaagtttggtagcaacacaatcaaattaagacgcggatatttctgttctgaatctgcaagtacaaagccttcacaggatgaattgcgtcagaaaaaagaagaggaaatggatgattactgctctcaggttccagttggtcatctggtattcatggttcatggcattggacagaggctggagaaagctaatcttgttgatgatgttgttgatttccgtcgtgtaactgctaacctagctgaaagatacttaacttcgtatcaaagaagtacccagagggttctatttataccctgtcagtggaggaagggcttgaagctcagtggtgaaagtactgttgagaaactcactttggatggagttaagggccttcgagtcgcattaggtgccacagttcatgatgttttatattatatgagtcctatctactgtcagcatattattgactcggtctcgaaccagttgaacaaactgtacatgaaatttctaaagagaaatcctggttacagtggaaaggtttcattgtatggccactcgttaggaagtgttttgtcgtatgatatactttgtcatcaagaatccctttgggccccatttccaacagagtatctgaacatggaaacatctgatcgaaatcaaggagcaaaatcagccaatgaagctgatctgcatgattcaggcgcaaaggatcatgatacttctagtctagggtattcttgtgctgataatgaaaacagtgtcattgatgaagatagcaccagaactgacgtgtcatgtatggacagcatcctcccatcatgtgtgcttgaggattcaccaaataaccatgacactgtcgtgcctcgtggtgcggttgttgctgatcaaaatggagaagaaaagaaggttgagaattatcagtcggtgtatgctgaggaaggaacaacttcaggtgtaatcacaaaaaaggctgaaggatcaagcatttcaagatctgctaaggaagtccatgaagaggtcctcgacaaagaaaaattgatggtccttgccaaagacaaattgatcctttcactagaagaagaggttgatacattctttgctgttggatctcccttgggtgtcttcctttccctgcgtaatgtccgtattggtattggcaaaggacaagactattggcaagataagaacgtaattgaagagatgccatgctgccggcagatgttcaatatttttcatccttttgaccctgtagcatacaggtgggcttttatacagaattgaaccacttgtatgtgaagattatctaaagaagcgtcctgtaattgttccctaccatagaggcggaaagaggatacatgttggagtgcaggagttcagagaagatatttctgcacgttctcaagcaattgcccgtcaattgaagtcactgaaggtcaaagcagtagctgctatactagcattgagcagaaatgacacagaagaggatggtgagagtgctaatgagaaagaaaaatcatatggttccattatgatggaaaggttgaccagttcaccgaatggtcgaattgatcatgtgcttcaggagaaaacatttcagcatccatatctatctgctttgggagctcataccaactattggcgagatcatgatactgctctcttcattctcaaacatttgtatcgtgatatacccgaggatcctccaagcgatgtcattgaaaggatgcctattaaactattttatgagagagatccagttgaggaagaaacgcctgtgacgttttcagatcatgcagcaattaaggaattctgcagaaaggtgaaagcttactcaagaaaaatggaggatgatgccaactgccaagcctcgtgatggatttttagtctctcgttacggcctcacacgttcctgggcaagcagaagcaagatgcagacatgggaaggaagaacgaatcgtgatcccaagaaaagaatccacgagatgcagttccacgcttcacgccagaatcagagcacttggagaatgttgtacggagtagagtcggttgccttgctcgttcctacatttataatgcagtgttgtacatagaacgtccgactgtagttttgtgcatcttgaacgtaatgttatgctgcctgctttaaatgctacagaatatatttttgcttttgcatccctagtgtgcgtcaattgcaaagtggttagctcctacttatttagcatgtcttttcattatgtctatcatgggcaaaagtactacataaaaaaggactcgcttagggcccggttgattttttttttttgaaagtttaggtattacaaagacctagttttatagctaaagcgatgcaaaaccaccgtgatttcaaaag

SEQ ID NO: 39369 - DNA, 3485 bp, Zea Mays
tgctgcagcttctgggccgaccgggggggggggggggggggtgcgtttgacttccctttccttcctgcggtaggggcccacctcgttgccccgctaggccgctacccttctctcttcccccgcctccgtctcttcgactccagacacctccccttcccgctcgccggcgctcggcggcgatccggaaccggcagcggcgcgcatggcgggcccgtgggacacgcacgcgtcgacgagccgggcgcccgcgggccccgacggggaggcggagggcgcgtcgccggactcgctgcggaacacgccctccaacatcgcgcggctggaggacgcgatcgggcactgcgcggcgcgccgcaagtacctcgcgcacaccaagagcccctccgacggcgaggacgtccgctgtgctctcttcttcggtaccacggacagagatagtcgggaaaggagactatttccggttcagcgagagggactctctggcactggaggcatctttcttggagagggaggaagagctgcttgcgtactggtggagggagtacgctgaatgcagtgcaggaccaagaggatccttggttgaaagtgatgattctgcatatctttataaggttgaggaagagcgggttggggttcctgtgaaaggtggactatatgaggttgatttgatgaggcggcattgcttccctgtgtactggaatggggaaaaccggcgtgtcttgagaggccactggtttgctcgcaaaggtggcgtcgactggattcccgtgcgcgaggatgtctctgaacaacttgagttagcgtataattgtcaggtctggcatcgtcggaaatttcaaccttcaggcctatttgcagcaagggttgaccttcaaggaagtacaccggatttgcatgctctttttactggagaggatgatacttgggaagcttggcttgtctttgatacaggtcctaagtttggtagcaacacaatcaaattaagacgcggatatttctgttctgaatctgcaagtacaaagccttcacaggatgaattgcgtcagaaaaaagaagaggaaatggatgattactgctctcaggttccagttggtcatctggtattcatggttcatggcattggacagaggctggagaaagctaatcttgttgatgatgttgttgatttccgtcgtgtaactgctaacctagctgaaagatacttaacttcgtatcaaagaagtacccagagggttctatttataccctgtcagtggaggaagggcttgaagctcagtggtgaaagtactgttgagaaactcactttggatggagttaagggccttcgagtcgcattaggtgccacagttcatgatgttttatattatatgagtcctatctactgtcagcatattattgactcggtctcgaaccagttgaacaaactgtacatgaaatttctaaagagaaatcctggttacagtggaaaggtttcattgtatggccactcgttaggaagtgttttgtcgtatgatatactttgtcatcaagaatccctttgggccccatttccaacagagtatctgaacatggaaacatctgatcgaaatcaaggagcaaaatcagccaatgaagctgatctgcatgattcaggcgcaaaggatcatgatacttctagtctagggtattcttgtgctgataatgaaaacagtgtcattgatgaagatagcaccagaactgacgtgtcatgtatggacagcatcctcccatcatgtgtgcttgaggattcaccaaataaccatgacactgtcgtgcctcgtggtgcggttgttgctgatcaaaatggagaagaaaagaaggttgagaattatcagtcggtgtatgctgaggaaggaacaacttcaggtgtaatcacaaaaaaggctgaaggatcaagcatttcaagatctgctaaggaagtccatgaagaggtcctcgacaaagaaaaattgatggtccttgccaaagacaaattgatcctttcactagaagaagaggtgaaatgtcttaaagctaaactagatcagcttgaacaacataatcatctagtgactgaaaacaccagtggtgttgagtatcatgaagggcaaaattataatcatgccttgaactctggcaaacttttcgtggcacaagaaagtacaaaccagtcctactcaccgcaaatcaaatacacgaaactaaactttaaggttgatacattctttgctgttggatctcccttgggtgtcttcctttccctgcgtaatgtccgtattggtattggcaaaggacaagactattggcaagataagaacgtaattgaagagatgccatgctgccggcagatgttcaatatttttcatccttttgaccctgtagcatacagaattgaaccacttgtatgtgaagattatctaaagaagcgtcctgtaattgttccctaccatagaggcggaaagaggatacatgttggagtgcaggagttcagagaagatatttctgcacgttctcaagcaattgcccgtcaattgaagtcactgaaggtcaaagcagtagctgctatactagcattgagcagaaatgacacagaagaggatggtgagagtgctaatgagaaagaaaaatcatatggttccattatgatggaaaggttgaccagttcaccgaatggtcgaattgatcatgtgcttcaggagaaaacatttcagcatccatatctatctgctttgggagctcataccaactattggcgagatcatgatactgctctcttcattctcaaacatttgtatcgtgatatacccgaggatcctccaagcgatgtcattgaaaggatgcctattaaactattttatgagagagatccagttgaggaagaaacgcctgtgacgttttcagatcatgcagcaattaaggaattctgcagaaaggtgaaagcttactcaagaaaaatggaggatgatgccaactgccaagcctcgtgatggatttttagtctctcgttacggcctcacacgttcctgggcaagcagaagcaagatgcagacatgggaaggaagaacgaatcgtgatcccaagaaaagaatccacgagatgcagttccacgcttcacgccagaatcagagcacttggagaatgttgtacggagtagagtcggttgccttgctcgttcctacatttataatgcagtgttgtacatagaacgtccgactgtagttttgtgcatcttgaacgtaatgttatgctgcctgctttaaatgctacagaatatatttttgcttttgcatccctagtgtgcgtcaattgcaaagtggttagctcctacttatttagcatgtcttttcattatgtctatcatgggcaaaagtactacataaaaaaggactcgcttagggcccggttgattttttttttttgaaagtttaggtattacaaagacctagttttatagctaaagcgatgcaaaaccaccgtgatttcaaaag

SEQ ID NO: 39370 - DNA, 3469 bp, Zea Mays
tgctgcagcttctgggccgaccgggggggggggggggggggtgcgtttgacttccctttccttcctgcggtaggggcccacctcgttgccccgctaggccgctacccttctctcttcccccgcctccgtctcttcgactccagacacctccccttcccgctcgccggcgctcggcggcgatccggaaccggcagcggcgcgcatggcgggcccgtgggacacgcacgcgtcgacgagccgggcgcccgcgggccccgacggggaggcggagggcgcgtcgccggactcgctgcggaacacgccctccaacatcgcgcggctggaggacgcgatcgggcactgcgcggcgcgccgcaagtacctcgcgcacaccaagagcccctccgacggcgaggacgtccgctggtacttctgcaagcttcccctcgccgacaaagtgctctcttcttcggtaccacggacagagatagtcgggaaaggagactatttccggttcagcgagagggactctctggcactggaggcatctttcttggagagggaggaagagctgcttgcgtactggtggagggagtacgctgaatgcagtgcaggaccaagaggatccttggttgaaagtgatgattctgcatatctttataaggttgaggaagagcgggttggggttcctgtgaaaggtggactatatgaggttgatttgatgaggcggcattgcttccctgtgtactggaatggggaaaaccggcgtgtcttgagaggccactggtttgctcgcaaaggtggcgtcgactggattcccgtgcgcgaggatgtctctgaacaacttgagttagcgtataattgtcaggtctggcatcgtcggaaatttcaaccttcaggcctatttgcagcaagggttgaccttcaaggaagtacaccggtcctaagtttggtagcaacacaatcaaattaagacgcggatatttctgttctgaatctgcaagtacaaagccttcacaggatgaattgcgtcagaaaaaagaagaggaaatggatgattactgctctcaggttccagttggtcatctggtattcatggttcatggcattggacagaggctggagaaagctaatcttgttgatgatgttgttgatttccgtcgtgtaactgctaacctagctgaaagatacttaacttcgtatcaaagaagtacccagagggttctatttataccctgtcagtggaggaagggcttgaagctcagtggtgaaagtactgttgagaaactcactttggatggagttaagggccttcgagtcgcattaggtgccacagttcatgatgttttatattatatgagtcctatctactgtcagcatattattgactcggtctcgaaccagttgaacaaactgtacatgaaatttctaaagagaaatcctggttacagtggaaaggtttcattgtatggccactcgttaggaagtgttttgtcgtatgatatactttgtcatcaagaatccctttgggccccatttccaacagagtatctgaacatggaaacatctgatcgaaatcaaggagcaaaatcagccaatgaagctgatctgcatgattcaggcgcaaaggatcatgatacttctagtctagggtattcttgtgctgataatgaaaacagtgtcattgatgaagatagcaccagaactgacgtgtcatgtatggacagcatcctcccatcatgtgtgcttgaggattcaccaaataaccatgacactgtcgtgcctcgtggtgcggttgttgctgatcaaaatggagaagaaaagaaggttgagaattatcagtcggtgtatgctgaggaaggaacaacttcaggtgtaatcacaaaaaaggctgaaggatcaagcatttcaagatctgctaaggaagtccatgaagaggtcctcgacaaagaaaaattgatggtccttgccaaagacaaattgatcctttcactagaagaagaggtgaaatgtcttaaagctaaactagatcagcttgaacaacataatcatctagtgactgaaaacaccagtggtgttgagtatcatgaagggcaaaattataatcatgccttgaactctggcaaacttttcgtggcacaagaaagtacaaaccagtcctactcaccgcaaatcaaatacacgaaactaaactttaaggttgatacattctttgctgttggatctcccttgggtgtcttcctttccctgcgtaatgtccgtattggtattggcaaaggacaagactattggcaagataagaacgtaattgaagagatgccatgctgccggcagatgttcaatatttttcatccttttgaccctgtagcatacaggtgggcttttatacagaattgaaccacttgtatgtgaagattatctaaagaagcgtcctgtaattgttccctaccatagaggcggaaagaggatacatgttggagtgcaggagttcagagaagatatttctgcacgttctcaagcaattgcccgtcaattgaagtcactgaaggtcaaagcagtagctgctatactagcattgagcagaaatgacacagaagaggatggtgagagtgctaatgagaaagaaaaatcatatggttccattatgatggaaaggttgaccagttcaccgaatggtcgaattgatcatgtgcttcaggagaaaacatttcagcatccatatctatctgctttgggagctcataccaactattggcgagatcatgatactgctctcttcattctcaaacatttgtatcgtgatatacccgaggatcctccaagcgatgtcattgaaaggatgcctattaaactattttatgagagagatccagttgaggaagaaacgcctgtgacgttttcagatcatgcagcaattaaggaattctgcagaaaggtgaaagcttactcaagaaaaatggaggatgatgccaactgccaagcctcgtgatggatttttagtctctcgttacggcctcacacgttcctgggcaagcagaagcaagatgcagacatgggaaggaagaacgaatcgtgatcccaagaaaagaatccacgagatgcagttccacgcttcacgccagaatcagagcacttggagaatgttgtacggagtagagtcggttgccttgctcgttcctacatttataatgcagtgttgtacatagaacgtccgactgtagttttgtgcatcttgaacgtaatgttatgctgcctgctttaaatgctacagaatatatttttgcttttgcatccctagtgtgcgtcaattgcaaagtggttagctcctacttatttagcatgtcttttcattatgtctatcatgggcaaaagtactacataaaaaaggactcgcttagggcccggttgattttttttttttgaaagtttaggtattacaaagacctagttttatagctaaagcgatgcaaaaccaccgtgatttcaaaag

SEQ ID NO: 39371 - DNA, 3390 bp, Zea Mays
tgctgcagcttctgggccgaccgggggggggggggggggggtgcgtttgacttccctttccttcctgcggtaggggcccacctcgttgccccgctaggccgctacccttctctcttcccccgcctccgtctcttcgactccagacacctccccttcccgctcgccggcgctcggcggcgatccggaaccggcagcggcgcgcatggcgggcccgtgggacacgcacgcgtcgacgagccgggcgcccgcgggccccgacggggaggcggagggcgcgtcgccggactcgctgcggaacacgccctccaacatcgcgcggctggaggacgcgatcgggcactgcgcggcgcgccgcaagtacctcgcgcacaccaagagcccctccgacggcgaggacgtccgctggtacttctgcaagcttcccctcgccgacaaagtgctctcttcttcggtaccacggacagagatagtcgggaaaggagactatttccggttcagcgagagggactctctggcactggaggcatctttcttggagagggaggaagagctgcttgcgtactggtggagggagtacgctgaatgcagtgcaggaccaagaggatccttggttgaaagtgatgattctgcatatctttataaggttgaggaagagcgggttggggttcctgtgaaaggtggactatatgaggttgatttgatgaggcggcattgcttccctgtgtactggaatggggaaaaccggcgtgtcttgagaggccactggtttgctcgcaaaggtggcgtcgactggattcccgtgcgcgaggatgtctctgaacaacttgagttagcgtataattgtcaggtctggcatcgtcggaaatttcaaccttcaggcctatttgcagcaagggttgaccttcaaggaagtacaccggtcctaagtttggtagcaacacaatcaaattaagacgcggatatttctgttctgaatctgcaagtacaaagccttcacaggatgaattgcgtcagaaaaaagaagaggaaatggatgattactgctctcaggttccagttggtcatctggtattcatggttcatggcattggacagaggctggagaaagctaatcttgttgatgatgttgttgatttccgtcgtgtaactgctaacctagctgaaagatacttaacttcgtatcaaagaagtacccagagggttctatttataccctgtcagtggaggaagggcttgaagctcagtggtgaaagtactgttgagaaactcactttggatggagttaagggccttcgagtcgcattaggtgccacagttcatgatgttttatattatatgagtcctatctactgtcagcatattattgactcggtctcgaaccagttgaacaaactgtacatgaaatttctaaagagaaatcctggttacagtggaaaggtttcattgtatggccactcgttaggaagtgttttgtcgtatgatatactttgtcatcaagaatccctttgggccccatttccaacagagtatctgaacatggaaacatctgatcgaaatcaaggagcaaaatcagccaatgaagctgatctgcatgattcaggcgcaaaggatcatgatacttctagtctagggtattcttgtgctgataatgaaaacagtgtcattgatgaagatagcaccagaactgacgtgtcatgtatggacagcatcctcccatcatgtgtgcttgaggattcaccaaataaccatgacactgtcgtgcctcgtggtgcggttgttgctgatcaaaatggagaagaaaagaaggttgagaattatcagtcggtgtatgctgaggaaggaacaacttcaggtgtaatcacaaaaaaggctgaaggatcaagcatttcaagatctgctaaggaagtccatgaagaggtcctcgacaaagaaaaattgatggtccttgccaaagacaaattgatcctttcactagaagaagaggtgaaatgtcttaaagctaaactagatcagcttgaacaacataatcatctagtgactgaaaacaccagtggtgttgagtatcatgaagggcaaaattataatcatgccttgaactctggcaaacttttcgtggcacaagaaagtacaaaccagtcctactcaccgcaaatcaaatacacgaaactaaactttaaggttgatacattctttgctgttggatctcccttgggtgtcttcctttccctgcgtaatgtccgtattggtattggcaaaggacaagactattggcaagataagaacgtaattgaagagatgccatgctgccggcagatgttcaatatttttcatccttttgaccctgtagcatacagaggcggaaagaggatacatgttggagtgcaggagttcagagaagatatttctgcacgttctcaagcaattgcccgtcaattgaagtcactgaaggtcaaagcagtagctgctatactagcattgagcagaaatgacacagaagaggatggtgagagtgctaatgagaaagaaaaatcatatggttccattatgatggaaaggttgaccagttcaccgaatggtcgaattgatcatgtgcttcaggagaaaacatttcagcatccatatctatctgctttgggagctcataccaactattggcgagatcatgatactgctctcttcattctcaaacatttgtatcgtgatatacccgaggatcctccaagcgatgtcattgaaaggatgcctattaaactattttatgagagagatccagttgaggaagaaacgcctgtgacgttttcagatcatgcagcaattaaggaattctgcagaaaggtgaaagcttactcaagaaaaatggaggatgatgccaactgccaagcctcgtgatggatttttagtctctcgttacggcctcacacgttcctgggcaagcagaagcaagatgcagacatgggaaggaagaacgaatcgtgatcccaagaaaagaatccacgagatgcagttccacgcttcacgccagaatcagagcacttggagaatgttgtacggagtagagtcggttgccttgctcgttcctacatttataatgcagtgttgtacatagaacgtccgactgtagttttgtgcatcttgaacgtaatgttatgctgcctgctttaaatgctacagaatatatttttgcttttgcatccctagtgtgcgtcaattgcaaagtggttagctcctacttatttagcatgtcttttcattatgtctatcatgggcaaaagtactacataaaaaaggactcgcttagggcccggttgattttttttttttgaaagtttaggtattacaaagacctagttttatagctaaagcgatgcaaaaccaccgtgatttcaaaag

SEQ ID NO: 39372 - DNA, 3512 bp, Zea Mays
tgctgcagcttctgggccgaccgggggggggggggggggggtgcgtttgacttccctttccttcctgcggtaggggcccacctcgttgccccgctaggccgctacccttctctcttcccccgcctccgtctcttcgactccagacacctccccttcccgctcgccggcgctcggcggcgatccggaaccggcagcggcgcgcatggcgggcccgtgggacacgcacgcgtcgacgagccgggcgcccgcgggccccgacggggaggcggagggcgcgtcgccggactcgctgcggaacacgccctccaacatcgcgcggctggaggacgcgatcgggcactgcgcggcgcgccgcaagtacctcgcgcacaccaagagcccctccgacggcgaggacgtccgctggtacttctgcaagcttcccctcgccgacaaagtgctctcttcttcggtaccacggacagagatagtcgggaaaggagactatttccggttcagcgagagggactctctggcactggaggcatctttcttggagagggaggaagagctgcttgcgtactggtggagggagtacgctgaatgcagtgcaggaccaagaggatccttggttgaaagtgatgattctgcatatctttataaggttgaggaagagcgggttggggttcctgtgaaaggtggactatatgaggttgatttgatgaggcggcattgcttccctgtgtactggaatggggaaaaccggcgtgtcttgagaggccactggtttgctcgcaaaggtggcgtcgactggattcccgtgcgcgaggatgtctctgaacaacttgagttagcgtataattgtcaggtctggcatcgtcggaaatttcaaccttcaggcctatttgcagcaagggttgaccttcaaggaagtacaccggatttgcatgctctttttactggagaggatgatacttgggaagcttggcttgtctttgatacaggtcctaagtttggtagcaacacaatcaaattaagacgcggatatttctgttctgaatctgcaagtacaaagccttcacaggatgaattgcgtcagaaaaaagaagaggaaatggatgattactgctctcaggttccagttggtcatctggtattcatggttcatggcattggacagaggctggagaaagctaatcttgttgatgatgttgttgatttccgtcgtgtaactgctaacctagctgaaagatacttaacttcgtatcaaagaagtacccagagggttctatttataccctgtcaggaagggcttgaagctcagtggtgaaagtactgttgagaaactcactttggatggagttaagggccttcgagtcgcattaggtgccacagttcatgatgttttatattatatgagtcctatctactgtcagcatattattgactcggtctcgaaccagttgaacaaactgtacatgaaatttctaaagagaaatcctggttacagtggaaaggtttcattgtatggccactcgttaggaagtgttttgtcgtatgatatactttgtcatcaagaatccctttgggccccatttccaacagagtatctgaacatggaaacatctgatcgaaatcaaggagcaaaatcagccaatgaagctgatctgcatgattcaggcgcaaaggatcatgatacttctagtctagggtattcttgtgctgataatgaaaacagtgtcattgatgaagatagcaccagaactgacgtgtcatgtatggacagcatcctcccatcatgtgtgcttgaggattcaccaaataaccatgacactgtcgtgcctcgtggtgcggttgttgctgatcaaaatggagaagaaaagaaggttgagaattatcagtcggtgtatgctgaggaaggaacaacttcaggtgtaatcacaaaaaaggctgaaggatcaagcatttcaagatctgctaaggaagtccatgaagaggtcctcgacaaagaaaaattgatggtccttgccaaagacaaattgatcctttcactagaagaagaggtgaaatgtcttaaagctaaactagatcagcttgaacaacataatcatctagtgactgaaaacaccagtggtgttgagtatcatgaagggcaaaattataatcatgccttgaactctggcaaacttttcgtggcacaagaaagtacaaaccagtcctactcaccgcaaatcaaatacacgaaactaaactttaaggttgatacattctttgctgttggatctcccttgggtgtcttcctttccctgcgtaatgtccgtattggtattggcaaaggacaagactattggcaagataagaacgtaattgaagagatgccatgctgccggcagatgttcaatatttttcatccttttgaccctgtagcatacagaattgaaccacttgtatgtgaagattatctaaagaagcgtcctgtaattgttccctaccatagaggcggaaagaggatacatgttggagtgcaggagttcagagaagatatttctgcacgttctcaagcaattgcccgtcaattgaagtcactgaaggtcaaagcagtagctgctatactagcattgagcagaaatgacacagaagaggatggtgagagtgctaatgagaaagaaaaatcatatggttccattatgatggaaaggttgaccagttcaccgaatggtcgaattgatcatgtgcttcaggagaaaacatttcagcatccatatctatctgctttgggagctcataccaactattggcgagatcatgatactgctctcttcattctcaaacatttgtatcgtgatatacccgaggatcctccaagcgatgtcattgaaaggatgcctattaaactattttatgagagagatccagttgaggaagaaacgcctgtgacgttttcagatcatgcagcaattaaggaattctgcagaaaggtgaaagcttactcaagaaaaatggaggatgatgccaactgccaagcctcgtgatggatttttagtctctcgttacggcctcacacgttcctgggcaagcagaagcaagatgcagacatgggaaggaagaacgaatcgtgatcccaagaaaagaatccacgagatgcagttccacgcttcacgccagaatcagagcacttggagaatgttgtacggagtagagtcggttgccttgctcgttcctacatttataatgcagtgttgtacatagaacgtccgactgtagttttgtgcatcttgaacgtaatgttatgctgcctgctttaaatgctacagaatatatttttgcttttgcatccctagtgtgcgtcaattgcaaagtggttagctcctacttatttagcatgtcttttcattatgtctatcatgggcaaaagtactacataaaaaaggactcgcttagggcccggttgattttttttttttgaaagtttaggtattacaaagacctagttttatagctaaagcgatgcaaaaccaccgtgatttcaaaag

SEQ ID NO: 39373 - DNA, 3509 bp, Zea Mays
tgctgcagcttctgggccgaccgggggggggggggggggggtgcgtttgacttccctttccttcctgcggtaggggcccacctcgttgccccgctaggccgctacccttctctcttcccccgcctccgtctcttcgactccagacacctccccttcccgctcgccggcgctcggcggcgatccggaaccggcagcggcgcgcatggcgggcccgtgggacacgcacgcgtcgacgagccgggcgcccgcgggccccgacggggaggcggagggcgcgtcgccggactcgctgcggaacacgccctccaacatcgcgcggctggaggacgcgatcgggcactgcgcggcgcgccgcaagtacctcgcgcacaccaagagcccctccgacggcgaggacgtccgctggtacttctgcaagcttcccctcgccgacaaagtgctctcttcttcggtaccacggacagagatagtcgggaaaggagactatttccggttcagcgagagggactctctggcactggaggcatctttcttggagagggaggaagagctgcttgcgtactggtggagggagtacgctgaatgcagtgcaggaccaagaggatccttggttgaaagtgatgattctgcatatctttataaggttgaggaagagcgggttggggttcctgtgaaaggtggactatatgaggttgatttgatgaggcggcattgcttccctgtgtactggaatggggaaaaccggcgtgtcttgagaggccactggtttgctcgcaaaggtggcgtcgactggattcccgtgcgcgaggatgtctctgaacaacttgagttagcgtataattgtcaggtctggcatcgtcggaaatttcaaccttcaggcctatttgcagcaagggttgaccttcaaggaagtacaccggatttgcatgctctttttactggagaggatgatacttgggaagcttggcttgtctttgatacaggtcctaagtttggtagcaacacaatcaaattaagacgcggatatttctgttctgaatctgcaagtacaaagccttcacaggatgaattgcgtcagaaaaaagaagaggaaatggatgattactgctctcaggttccagttggtcatctggtattcatggttcatggcattggacagaggctggagaaagctaatcttgttgatgatgttgttgatttccgtcgtgtaactgctaacctagctgaaagatacttaacttcgtatcaaagaagtacccagagggttctatttataccctgtcagtggaggaagggcttgaagctcagtggtgaaagtactgttgagaaactcactttggatggagttaagggccttcgagtcgcattaggtgccacagttcatgatgttttatattatatgagtcctatctactgtcagcatattattgactcggtctcgaaccagttgaacaaactgtacatgaaatttctaaagagaaatcctggttacagtggaaaggtttcattgtatggccactcgttaggaagtgttttgtcgtatgatatactttgtcatcaagaatccctttgggccccatttccaacagagtatctgaacatggaaacatctgatcgaaatcaaggagcaaaatcagccaatgaagctgatctgcatgattcaggcgcaaaggatcatgatacttctagtctagggtattcttgtgctgataatgaaaacagtgtcattgatgaagatagcaccagaactgacgtgtcatgtatggacagcatcctcccatcatgtgtgcttgaggattcaccaaataaccatgacactgtcgtgcctcgtggtgcggttgttgctgatcaaaatggagaagaaaagaaggttgagaattatcagtcggtgtatgctgaggaaggaacaacttcaggtgtaatcacaaaaaaggctgaaggatcaagcatttcaagatctgctaaggaagtccatgaagaggtcctcgacaaagaaaaattgatggtccttgccaaagacaaattgatcctttcactagaagaagaggtgaaatgtcttaaagctaaactagatcagcttgaacaacataatcatctagtgactgaaaacaccagtggtgttgagtatcatgaagggcaaaattataatcatgccttgaactctggcaaacttttcgtggcacaagaaagtacaaaccagtcctactcaccgcaaatcaaatacacgaaactaaactttaaggttgatacattctttgctgttggatctcccttgggtgtcttcctttccctgcgtaatgtccgtattggtattggcaaaggacaagactattggcaagataagaacgtaattgaagagatgccatgctgccggcagatgttcaatatttttcatccttttgaccctgtagcatacagaattgaaccacttgtatgtgaagattatctaaagaagcgtcctgtaattgttccctaccatagaggcggaaagaggatacatgttggagtgcagagaagatatttctgcacgttctcaagcaattgcccgtcaattgaagtcactgaaggtcaaagcagtagctgctatactagcattgagcagaaatgacacagaagaggatggtgagagtgctaatgagaaagaaaaatcatatggttccattatgatggaaaggttgaccagttcaccgaatggtcgaattgatcatgtgcttcaggagaaaacatttcagcatccatatctatctgctttgggagctcataccaactattggcgagatcatgatactgctctcttcattctcaaacatttgtatcgtgatatacccgaggatcctccaagcgatgtcattgaaaggatgcctattaaactattttatgagagagatccagttgaggaagaaacgcctgtgacgttttcagatcatgcagcaattaaggaattctgcagaaaggtgaaagcttactcaagaaaaatggaggatgatgccaactgccaagcctcgtgatggatttttagtctctcgttacggcctcacacgttcctgggcaagcagaagcaagatgcagacatgggaaggaagaacgaatcgtgatcccaagaaaagaatccacgagatgcagttccacgcttcacgccagaatcagagcacttggagaatgttgtacggagtagagtcggttgccttgctcgttcctacatttataatgcagtgttgtacatagaacgtccgactgtagttttgtgcatcttgaacgtaatgttatgctgcctgctttaaatgctacagaatatatttttgcttttgcatccctagtgtgcgtcaattgcaaagtggttagctcctacttatttagcatgtcttttcattatgtctatcatgggcaaaagtactacataaaaaaggactcgcttagggcccggttgattttttttttttgaaagtttaggtattacaaagacctagttttatagctaaagcgatgcaaaaccaccgtgatttcaaaag

SEQ ID NO: 39374 - DNA, 2520 bp, Zea Mays
atgaattgcgtcagaaaaaagaagaggaaatggatgattactgctctcaggatgaattgcgtcagaaaaaagaagaggaaatggatgattactgctctcaggttccagttggtcatctggtattcatggttcatggcattggacagaggctggagaaagctaatcttgttgatgatgttgttgatttccgtcgtgtaactgctaacctagctgaaagatacttaacttcgtatcaaagaagtacccagagggttctatttataccctgtcagtggaggaagggcttgaagctcagtggtgaaagtactgttgagaaactcactttggatggagttaagggccttcgagtcgcattaggtgccacagttcatgatgttttatattatatgagtcctatctactgtcagcatattattgactcggtctcgaaccagttgaacaaactgtacatgaaatttctaaagagaaatcctggttacagtggaaaggtttcattgtatggccactcgttaggaagtgttttgtcgtatgatatactttgtcatcaagaatccctttgggccccatttccaacagagtatctgaacatggaaacatctgatcgaaatcaaggagcaaaatcagccaatgaagctgatctgcatgattcaggcgcaaaggatcatgatacttctagtctagggtattcttgtgctgataatgaaaacagtgtcattgatgaagatagcaccagaactgacgtgtcatgtatggacagcatcctcccatcatgtgtgcttgaggattcaccaaataaccatgacactgtcgtgcctcgtggtgcggttgttgctgatcaaaatggagaagaaaagaaggttgagaattatcagtcggtgtatgctgaggaaggaacaacttcaggtgtaatcacaaaaaaggctgaaggatcaagcatttcaagatctgctaaggaagtccatgaagaggtcctcgacaaagaaaaattgatggtccttgccaaagacaaattgatcctttcactagaagaagaggtgaaatgtcttaaagctaaactagatcagcttgaacaacataatcatctagtgactgaaaacaccagtggtgttgagtatcatgaagggcaaaattataatcatgccttgaactctggcaaacttttcgtggcacaagaaagtacaaaccagtcctactcaccgcaaatcaaatacacgaaactaaactttaaggttgatacattctttgctgttggatctcccttgggtgtcttcctttccctgcgtaatgtccgtattggtattggcaaaggacaagactattggcaagataagaacgtaattgaagagatgccatgctgccggcagatgttcaatatttttcatccttttgaccctgtagcatacaggtgggcttttatacagaattgaaccacttgtatgtgaagattatctaaagaagcgtcctgtaattgttccctaccatagaggcggaaagaggatacatgttggagtgcaggagttcagagaagatatttctgcacgttctcaagcaattgcccgtcaattgaagtcactgaaggtcaaagcagtagctgctatactagcattgagcagaaatgacacagaagaggatggtgagagtgctaatgagaaagaaaaatcatatggttccattatgatggaaaggttgaccagttcaccgaatggtcgaattgatcatgtgcttcaggagaaaacatttcagcatccatatctatctgctttgggagctcataccaactattggcgagatcatgatactgctctcttcattctcaaacatttgtatcgtgatatacccgaggatcctccaagcgatgtcattgaaaggatgcctattaaactattttatgagagagatccagttgaggaagaaacgcctgtgacgttttcagatcatgcagcaattaaggaattctgcagaaaggtgaaagcttactcaagaaaaatggaggatgatgccaactgccaagcctcgtgatggatttttagtctctcgttacggcctcacacgttcctgggcaagcagaagcaagatgcagacatgggaaggaagaacgaatcgtgatcccaagaaaagaatccacgagatgcagttccacgcttcacgccagaatcagagcacttggagaatgttgtacggagtagagtcggttgccttgctcgttcctacatttataatgcagtgttgtacatagaacgtccgactgtagttttgtgcatcttgaacgtaatgttatgctgcctgctttaaatgctacagaatatatttttgcttttgcatccctagtgtgcgtcaattgcaaagtggttagctcctacttatttagcatgtcttttcattatgtctatcatgggcaaaagtactacataaaaaaggactcgcttagggcccggttgattttttttttttgaaagtttaggtattacaaagacctagttttatagctaaagcgatgcaaaaccaccgtgatttcaaaag

SEQ ID NO: 39375 - DNA, 2559 bp, Zea Mays
attgcgtcagaaaaaagaagaggaaatggatgattactgctctcaggcatcattttggacattttgcattgggattggactgattgcaaatgactgcatacacaaaactgtatagttcgatggagcacttattctactatcaatcttacaccgaaggttccagttggtcatctggtattcatggttcatggcattggacagaggctggagaaagctaatcttgttgatgatgttgttgatttccgtcgtgtaactgctaacctagctgaaagatacttaacttcgtatcaaagaagtacccagagggttctatttataccctgtcagtggaggaagggcttgaagctcagtggtgaaagtactgttgagaaactcactttggatggagttaagggccttcgagtcgcattaggtgccacagttcatgatgttttatattatatgagtcctatctactgtcagcatattattgactcggtctcgaaccagttgaacaaactgtacatgaaatttctaaagagaaatcctggttacagtggaaaggtttcattgtatggccactcgttaggaagtgttttgtcgtatgatatactttgtcatcaagaatccctttgggccccatttccaacagagtatctgaacatggaaacatctgatcgaaatcaaggagcaaaatcagccaatgaagctgatctgcatgattcaggcgcaaaggatcatgatacttctagtctagggtattcttgtgctgataatgaaaacagtgtcattgatgaagatagcaccagaactgacgtgtcatgtatggacagcatcctcccatcatgtgtgcttgaggattcaccaaataaccatgacactgtcgtgcctcgtggtgcggttgttgctgatcaaaatggagaagaaaagaaggttgagaattatcagtcggtgtatgctgaggaaggaacaacttcaggtgtaatcacaaaaaaggctgaaggatcaagcatttcaagatctgctaaggaagtccatgaagaggtcctcgacaaagaaaaattgatggtccttgccaaagacaaattgatcctttcactagaagaagaggtgaaatgtcttaaagctaaactagatcagcttgaacaacataatcatctagtgactgaaaacaccagtggtgttgagtatcatgaagggcaaaattataatcatgccttgaactctggcaaacttttcgtggcacaagaaagtacaaaccagtcctactcaccgcaaatcaaatacacgaaactaaactttaaggttgatacattctttgctgttggatctcccttgggtgtcttcctttccctgcgtaatgtccgtattggtattggcaaaggacaagactattggcaagataagaacgtaattgaagagatgccatgctgccggcagatgttcaatatttttcatccttttgaccctgtagcatacagaattgaaccacttgtatgtgaagattatctaaagaagcgtcctgtaattgttccctaccatagaggcggaaagaggatacatgttggagtgcaggagttcagagaagatatttctgcacgttctcaagcaattgcccgtcaattgaagtcactgaaggtcaaagcagtagctgctatactagcattgagcagaaatgacacagaagaggatggtgagagtgctaatgagaaagaaaaatcatatggttccattatgatggaaaggttgaccagttcaccgaatggtcgaattgatcatgtgcttcaggagaaaacatttcagcatccatatctatctgctttgggagctcataccaactattggcgagatcatgatactgctctcttcattctcaaacatttgtatcgtgatatacccgaggatcctccaagcgatgtcattgaaaggatgcctattaaactattttatgagagagatccagttgaggaagaaacgcctgtgacgttttcagatcatgcagcaattaaggaattctgcagaaaggtgaaagcttactcaagaaaaatggaggatgatgccaactgccaagcctcgtgatggatttttagtctctcgttacggcctcacacgttcctgggcaagcagaagcaagatgcagacatgggaaggaagaacgaatcgtgatcccaagaaaagaatccacgagatgcagttccacgcttcacgccagaatcagagcacttggagaatgttgtacggagtagagtcggttgccttgctcgttcctacatttataatgcagtgttgtacatagaacgtccgactgtagttttgtgcatcttgaacgtaatgttatgctgcctgctttaaatgctacagaatatatttttgcttttgcatccctagtgtgcgtcaattgcaaagtggttagctcctacttatttagcatgtcttttcattatgtctatcatgggcaaaagtactacataaaaaaggactcgcttagggcccggttgattttttttttttgaaagtttaggtattacaaagacctagttttatagctaaagcgatgcaaaaccaccgtgatttcaaaag

SEQ ID NO: 39376 - DNA, 2499 bp, Zea Mays
ttgcgtcagaaaaaagaagaggaaatggatgattactgctctcaggatgaattgcgtcagaaaaaagaagaggaaatggatgattactgctctcaggttccagttggtcatctggtattcatggttcatggcattggacagaggctggagaaagctaatcttgttgatgatgttgttgatttccgtcgtgtaactgctaacctagctgaaagatacttaacttcgtatcaaagaagtacccagagggttctatttataccctgtcagtggaggaagggcttgaagctcagtggtgaaagtactgttgagaaactcactttggatggagttaagggccttcgagtcgcattaggtgccacagttcatgatgttttatattatatgagtcctatctactgtcagcatattattgactcggtctcgaaccagttgaacaaactgtacatgaaatttctaaagagaaatcctggttacagtggaaaggtttcattgtatggccactcgttaggaagtgttttgtcgtatgatatactttgtcatcaagaatccctttgggccccatttccaacagagtatctgaacatggaaacatctgatcgaaatcaaggagcaaaatcagccaatgaagctgatctgcatgattcaggcgcaaaggatcatgatacttctagtctagggtattcttgtgctgataatgaaaacagtgtcattgatgaagatagcaccagaactgacgtgtcatgtatggacagcatcctcccatcatgtgtgcttgaggattcaccaaataaccatgacactgtcgtgcctcgtggtgcggttgttgctgatcaaaatggagaagaaaagaaggttgagaattatcagtcggtgtatgctgaggaaggaacaacttcaggtgtaatcacaaaaaaggctgaaggatcaagcatttcaagatctgctaaggaagtccatgaagaggtcctcgacaaagaaaaattgatggtccttgccaaagacaaattgatcctttcactagaagaagaggtgaaatgtcttaaagctaaactagatcagcttgaacaacataatcatctagtgactgaaaacaccagtggtgttgagtatcatgaagggcaaaattataatcatgccttgaactctggcaaacttttcgtggcacaagaaagtacaaaccagtcctactcaccgcaaatcaaatacacgaaactaaactttaaggttgatacattctttgctgttggatctcccttgggtgtcttcctttccctgcgtaatgtccgtattggtattggcaaaggacaagactattggcaagataagaacgtaattgaagagatgccatgctgccggcagatgttcaatatttttcatccttttgaccctgtagcatacagaattgaaccacttgtatgtgaagattatctaaagaagcgtcctgtaattgttccctaccatagaggcggaaagaggatacatgttggagtgcaggagttcagagaagatatttctgcacgttctcaagcaattgcccgtcaattgaagtcactgaaggtcaaagcagtagctgctatactagcattgagcagaaatgacacagaagaggatggtgagagtgctaatgagaaagaaaaatcatatggttccattatgatggaaaggttgaccagttcaccgaatggtcgaattgatcatgtgcttcaggagaaaacatttcagcatccatatctatctgctttgggagctcataccaactattggcgagatcatgatactgctctcttcattctcaaacatttgtatcgtgatatacccgaggatcctccaagcgatgtcattgaaaggatgcctattaaactattttatgagagagatccagttgaggaagaaacgcctgtgacgttttcagatcatgcagcaattaaggaattctgcagaaaggtgaaagcttactcaagaaaaatggaggatgatgccaactgccaagcctcgtgatggatttttagtctctcgttacggcctcacacgttcctgggcaagcagaagcaagatgcagacatgggaaggaagaacgaatcgtgatcccaagaaaagaatccacgagatgcagttccacgcttcacgccagaatcagagcacttggagaatgttgtacggagtagagtcggttgccttgctcgttcctacatttataatgcagtgttgtacatagaacgtccgactgtagttttgtgcatcttgaacgtaatgttatgctgcctgctttaaatgctacagaatatatttttgcttttgcatccctagtgtgcgtcaattgcaaagtggttagctcctacttatttagcatgtcttttcattatgtctatcatgggcaaaagtactacataaaaaaggactcgcttagggcccggttgattttttttttttgaaagtttaggtattacaaagacctagttttatagctaaagcgatgcaaaaccaccgtgatttcaaaag

SEQ ID NO: 39377 - DNA, 2302 bp, Zea Mays
gcgtcagaaaaaagaagaggaaatggatgattactgctctcaggatgaattgcgtcagaaaaaagaagaggaaatggatgattactgctctcaggttccagttggtcatctggtattcatggttcatggcattggacagaggctggagaaagctaatcttgttgatgatgttgttgatttccgtcgtgtaactgctaacctagctgaaagatacttaacttcgtatcaaagaagtacccagagggttctatttataccctgtcagtggaggaagggcttgaagctcagtggtgaaagtactgttgagaaactcactttggatggagttaagggccttcgagtcgcattaggtgccacagttcatgatgttttatattatatgagtcctatctactgtcagcatattattgactcggtctcgaaccagttgaacaaactgtacatgaaatttctaaagagaaatcctggttacagtggaaaggtttcattgtatggccactcgttaggaagtgttttgtcgtatgatatactttgtcatcaagaatccctttgggccccatttccaacagagtatctgaacatggaaacatctgatcgaaatcaaggagcaaaatcagccaatgaagctgatctgcatgattcaggcgcaaaggatcatgatacttctagtctagggtattcttgtgctgataatgaaaacagtgtcattgatgaagatagcaccagaactgacgtgtcatgtatggacagcatcctcccatcatgtgtgcttgaggattcaccaaataaccatgacactgtcgtgcctcgtggtgcggttgttgctgatcaaaatggagaagaaaagaaggttgagaattatcagtcggtgtatgctgaggaaggaacaacttcaggtgtaatcacaaaaaaggctgaaggatcaagcatttcaagatctgctaaggaagtccatgaagaggtcctcgacaaagaaaaattgatggtccttgccaaagacaaattgatcctttcactagaagaagaggttgatacattctttgctgttggatctcccttgggtgtcttcctttccctgcgtaatgtccgtattggtattggcaaaggacaagactattggcaagataagaacgtaattgaagagatgccatgctgccggcagatgttcaatatttttcatccttttgaccctgtagcatacagaattgaaccacttgtatgtgaagattatctaaagaagcgtcctgtaattgttccctaccatagaggcggaaagaggatacatgttggagtgcaggagttcagagaagatatttctgcacgttctcaagcaattgcccgtcaattgaagtcactgaaggtcaaagcagtagctgctatactagcattgagcagaaatgacacagaagaggatggtgagagtgctaatgagaaagaaaaatcatatggttccattatgatggaaaggttgaccagttcaccgaatggtcgaattgatcatgtgcttcaggagaaaacatttcagcatccatatctatctgctttgggagctcataccaactattggcgagatcatgatactgctctcttcattctcaaacatttgtatcgtgatatacccgaggatcctccaagcgatgtcattgaaaggatgcctattaaactattttatgagagagatccagttgaggaagaaacgcctgtgacgttttcagatcatgcagcaattaaggaattctgcagaaaggtgaaagcttactcaagaaaaatggaggatgatgccaactgccaagcctcgtgatggatttttagtctctcgttacggcctcacacgttcctgggcaagcagaagcaagatgcagacatgggaaggaagaacgaatcgtgatcccaagaaaagaatccacgagatgcagttccacgcttcacgccagaatcagagcacttggagaatgttgtacggagtagagtcggttgccttgctcgttcctacatttataatgcagtgttgtacatagaacgtccgactgtagttttgtgcatcttgaacgtaatgttatgctgcctgctttaaatgctacagaatatatttttgcttttgcatccctagtgtgcgtcaattgcaaagtggttagctcctacttatttagcatgtcttttcattatgtctatcatgggcaaaagtactacataaaaaaggactcgcttagggcccggttgattttttttttttgaaagtttaggtattacaaagacctagttttatagctaaagcgatgcaaaaccaccgtgatttcaaaag

SEQ ID NO: 39378 - DNA, 2461 bp, Zea Mays
gttcgatggagcacttattctactatcaatcttacaccgaaggttccagttggtcatctggtattcatggttcatggcattggacagaggctggagaaagctaatcttgttgatgatgttgttgatttccgtcgtgtaactgctaacctagctgaaagatacttaacttcgtatcaaagaagtacccagagggttctatttataccctgtcagtggaggaagggcttgaagctcagtggtgaaagtactgttgagaaactcactttggatggagttaagggccttcgagtcgcattaggtgccacagttcatgatgttttatattatatgagtcctatctactgtcagcatattattgactcggtctcgaaccagttgaacaaactgtacatgaaatttctaaagagaaatcctggttacagtggaaaggtttcattgtatggccactcgttaggaagtgttttgtcgtatgatatactttgtcatcaagaatccctttgggccccatttccaacagagtatctgaacatggaaacatctgatcgaaatcaaggagcaaaatcagccaatgaagctgatctgcatgattcaggcgcaaaggatcatgatacttctagtctagggtattcttgtgctgataatgaaaacagtgtcattgatgaagatagcaccagaactgacgtgtcatgtatggacagcatcctcccatcatgtgtgcttgaggattcaccaaataaccatgacactgtcgtgcctcgtggtgcggttgttgctgatcaaaatggagaagaaaagaaggttgagaattatcagtcggtgtatgctgaggaaggaacaacttcaggtgtaatcacaaaaaaggctgaaggatcaagcatttcaagatctgctaaggaagtccatgaagaggtcctcgacaaagaaaaattgatggtccttgccaaagacaaattgatcctttcactagaagaagaggtgaaatgtcttaaagctaaactagatcagcttgaacaacataatcatctagtgactgaaaacaccagtggtgttgagtatcatgaagggcaaaattataatcatgccttgaactctggcaaacttttcgtggcacaagaaagtacaaaccagtcctactcaccgcaaatcaaatacacgaaactaaactttaaggttgatacattctttgctgttggatctcccttgggtgtcttcctttccctgcgtaatgtccgtattggtattggcaaaggacaagactattggcaagataagaacgtaattgaagagatgccatgctgccggcagatgttcaatatttttcatccttttgaccctgtagcatacaggtgggcttttatacagaattgaaccacttgtatgtgaagattatctaaagaagcgtcctgtaattgttccctaccatagaggcggaaagaggatacatgttggagtgcaggagttcagagaagatatttctgcacgttctcaagcaattgcccgtcaattgaagtcactgaaggtcaaagcagtagctgctatactagcattgagcagaaatgacacagaagaggatggtgagagtgctaatgagaaagaaaaatcatatggttccattatgatggaaaggttgaccagttcaccgaatggtcgaattgatcatgtgcttcaggagaaaacatttcagcatccatatctatctgctttgggagctcataccaactattggcgagatcatgatactgctctcttcattctcaaacatttgtatcgtgatatacccgaggatcctccaagcgatgtcattgaaaggatgcctattaaactattttatgagagagatccagttgaggaagaaacgcctgtgacgttttcagatcatgcagcaattaaggaattctgcagaaaggtgaaagcttactcaagaaaaatggaggatgatgccaactgccaagcctcgtgatggatttttagtctctcgttacggcctcacacgttcctgggcaagcagaagcaagatgcagacatgggaaggaagaacgaatcgtgatcccaagaaaagaatccacgagatgcagttccacgcttcacgccagaatcagagcacttggagaatgttgtacggagtagagtcggttgccttgctcgttcctacatttataatgcagtgttgtacatagaacgtccgactgtagttttgtgcatcttgaacgtaatgttatgctgcctgctttaaatgctacagaatatatttttgcttttgcatccctagtgtgcgtcaattgcaaagtggttagctcctacttatttagcatgtcttttcattatgtctatcatgggcaaaagtactacataaaaaaggactcgcttagggcccggttgattttttttttttgaaagtttaggtattacaaagacctagttttatagctaaagcgatgcaaaaccaccgtgatttcaaaag

SEQ ID NO: 39379 - DNA, 2349 bp, Zea Mays
aaaaaagaatcgcaggagcagaaaagaaaccaatttttttttgttttctcttacagaagagaacaaacaaaggcttgagagcggtgtacagctagcgcctgcgtcttgacgatacgcgttagcaagtagcaagactcaagactcaagagggatcccttagcaaaaccggtctcgcaaagggacacaattccctaggaaccgcacaaaagcttcctgcaatccggcggctttggcgttgaacctccccccttgatcagtagtagaatcggctgctaaagatttctatttttatttttttctcggttcggaaggtgccgtgcggcgagcgaaataaatcgctgcggcgagaatcctgtggagatgagttgcgttaggtggcaggaccactcataaattctgcctgttcattcagatctgctccgtgctgtgcttcttctgctgctgccttgcagcgaccagcgagaagaaatccattcgctaggccggcccacccacccacgatagcggttgtggtcactcatgcgtcgtcgccggagtccaatctcgccgctcggagtttcttgacttttctggtcggagtttccatttcctcctggaggagattatttctttctcctctttcaccccgagaatctcgtctcgggtcgcgctggtttgattcctcctcgcctgagtccaccgctttcgcttccagtggagaagcttgtccgtgaagcagcgctcgtctcctgcttaaaatttcttccttctgccttggtttctttgctcgcgcccgccgatttgcttgctgcccagtccacactcctccgttcgtgtctcgcggctttccgcactcgttttcccggtctcggatttcgttaccaatgggcaacgcgttcgcgtgcatgccgcgcaaggagcagcgaggcgcggccgcggtgtcgcgcagcaagcggatggggagcgcgcggtcggcgcgcggcgggcccaagctgacgcccgcggaggaggagctcctccaccgccaggctctggccatggccatccaccagcacctcgacgccggcggctccatgtcgcgccgcatcgacgccggggcctccctgtcccggcgcatggccccgggctccaccagctcccgccgccgcggcgacctgccggactccgtcacgaatgccaagcccgccccaattgttctggagaatttggaaacaaagaaaattgtccttgttcatggagaagggttcggtgcttggtgttggtacaagaccatctcacacttggaggaagctggtctagatcctgttgccttagatctcacaggctctggcatagaccatactgatacaaacagcatagctacgttagcagattactccaagccattgattgattacctcgacagacttcctgaagatgagaaggtcattttggtcggccatagttgcggaggtgcgagtgtctcgtatgcactggagcagtacccccgaaagatctcaaaggcggtgtttcttactgctacaatggggctcacgttgacctacattcgacagctccggtcggcggatgttttcttgcaagagtcacagtttctagtctatggaaatgggaaggacaagcctcctactgggctgatgttcgataagcagcagatcaaggggctgtatttcaaccaaaccccttccaaggatatggcactagcagcggtgtccatgaggcctatccctctagccccaatcatggagaagctctccctcaccccggagaactacggctccgtccgtcgctacttcatccaggcactcgacgaccacatgctgtcgccggatgcccaggagaagctggtccgcgagaaccctcccgacggcatcttcaagatcaagggcggcgaccactgccccttcttctcaaagccgcagtccctcaacaagatcctgctggagatcgcgcagatccaagctcctgcggcgctgctcaaggcgagctcccccgaggagaccgccgccgccatggtgacagggccagccaagtcatgactgcatgtatgtagtgtacacgaaaagagaaatgagtaagcacataggttgcaaaagggagggggaggaggtctggggattaactgaagccaagctgtgtcggataataatgtagggaggtcaaagtgtttctttctttcttctgtgatcagatcagatcatatagagaatgagaggtggtcagcagataattgcatttcttttttcctttttaccttgtgaatgaatgagatattcagtgaccaatgtcaacgcggaaagcctttgtggtgatgcttactaattcatcagcaatcattatttaggtaattataataacgtcaatgcaagtaac

SEQ ID NO: 39380 - DNA, 1605 bp, Zea Mays
tggtaatgaaggctcaatcagacagacatgtatttgataccctcatcagatgtagtactttcaataacatggaaatcttgaccatgagcggacaacccacggaaaggggagataaacacccatggcatcttagtcatgcaaactctactctaggcagatgcccctccttgttgtaccttgaacatatcacaggatttgagcaacctccagcgatatgccccacttaccacatctaggacatatgttctctccaaccctgggctcgtctcttttcacttctctgtccaccatctcaaccactctgttttccaatccttcagtagtgactacctgattagcgttgttcacagacgcatcagcatcagcagctccatcattcacctccaagtgagcctccactgcaggccccaattgttctggagaatttggaaacaaagaaaattgtccttgttcatggagaagggttcggtgcttggtgttggtacaagaccatctcacacttggaggaagctggtctagatcctgttgccttagatctcacaggctctggcatagaccatactgatacaaacagcatagctacgttagcagattactccaagccattgattgattacctcgacagacttcctgaagatgagaaggtcattttggtcggccatagttgcggaggtgcgagtgtctcgtatgcactggagcagtacccccgaaagatctcaaaggcggtgtttcttactgctacaatggtaaaggatggccagaggccctttgacgtgttctcggaggaactccggtcggcggatgttttcttgcaagagtcacagtttctagtctatggaaatgggaaggacaagcctcctactgggctgatgttcgataagcagcagatcaaggggctgtatttcaaccaaaccccttccaaggatatggcactagcagcggtgtccatgaggcctatccctctagccccaatcatggagaagctctccctcaccccggagaactacggctccgtccgtcgctacttcatccaggcactcgacgaccacatgctgtcgccggatgcccaggagaagctggtccgcgagaaccctcccgacggcatcttcaagatcaagggcggcgaccactgccccttcttctcaaagccgcagtccctcaacaagatcctgctggagatcgcgcagatccaagctcctgcggcgctgctcaaggcgagctcccccgaggagaccgccgccgccatggtgacagggccagccaagtcatgactgcatgtatgtagtgtacacgaaaagagaaatgagtaagcacataggttgcaaaagggagggggaggaggtctggggattaactgaagccaagctgtgtcggataataatgtagggaggtcaaagtgtttctttctttcttctgtgatcagatcagatcatatagagaatgagaggtggtcagcagataattgcatttcttttttcctttttaccttgtgaatgaatgagatattcagtgaccaatgtcaacgcggaaagcctttgtggtgatgcttactaattcatcagcaatcattatttaggtaattataataacgtcaatgcaagtaac

SEQ ID NO: 39381 - DNA, 1569 bp, Zea Mays
tggtaatgaaggctcaatcagacagacatgtatttgataccctcatcagatgtagtactttcaataacatggaaatcttgaccatgagcggacaacccacggaaaggggagataaacacccatggcatcttagtcatgcaaactctactctaggcagatgcccctccttgttgtaccttgaacatatcacaggatttgagcaacctccagcgatatgccccacttaccacatctaggacatatgttctctccaaccctgggctcgtctcttttcacttctctgtccaccatctcaaccactctgttttccaatccttcagtagtgactacctgattagcgttgttcacagacgcatcagcatcagcagctccatcattcacctccaagtgagcctccactgcaggccccaattgttctggagaatttggaaacaaagaaaattgtccttgttcatggagaagggttcggtgcttggtgttggtacaagaccatctcacacttggaggaagctggtctagatcctgttgccttagatctcacaggctctggcatagaccatactgatacaaacagcatagctacgttagcagattactccaagccattgattgattacctcgacagacttcctgaagatgagaaggtcattttggtcggccatagttgcggaggtgcgagtgtctcgtatgcactggagcagtacccccgaaagatctcaaaggcggtgtttcttactgctacaatggtaaaggatggccagaggccctttgacgtgttctcggaggaatttctagtctatggaaatgggaaggacaagcctcctactgggctgatgttcgataagcagcagatcaaggggctgtatttcaaccaaaccccttccaaggatatggcactagcagcggtgtccatgaggcctatccctctagccccaatcatggagaagctctccctcaccccggagaactacggctccgtccgtcgctacttcatccaggcactcgacgaccacatgctgtcgccggatgcccaggagaagctggtccgcgagaaccctcccgacggcatcttcaagatcaagggcggcgaccactgccccttcttctcaaagccgcagtccctcaacaagatcctgctggagatcgcgcagatccaagctcctgcggcgctgctcaaggcgagctcccccgaggagaccgccgccgccatggtgacagggccagccaagtcatgactgcatgtatgtagtgtacacgaaaagagaaatgagtaagcacataggttgcaaaagggagggggaggaggtctggggattaactgaagccaagctgtgtcggataataatgtagggaggtcaaagtgtttctttctttcttctgtgatcagatcagatcatatagagaatgagaggtggtcagcagataattgcatttcttttttcctttttaccttgtgaatgaatgagatattcagtgaccaatgtcaacgcggaaagcctttgtggtgatgcttactaattcatcagcaatcattatttaggtaattataataacgtcaatgcaagtaac

SEQ ID NO: 39382 - DNA, 1518 bp, Zea Mays
gtgacgtcacctcttctaaggcccctgtggtgccaattcagatgggctccaggatgaggccaggcccatgggggcacgattcggccttttcttgtcttgctcgtcaaaagaataaaatcccaacccataggaaagcgtagcatagcaggggaggccgggaggggagaaaggcgaactcgaattgggggaagagagcgagagacgaatcgcatcgagccggagaggaagtcagagacagggaggagggcggcggaatcggcgccggcgggaggcaggcatggaggacctgagcgtggaggagctcgcctccaacctctccacctacaaagagcagctacgcgaggtcaagaagcttatcaaggagaagaaggatgatgctggaatttctgaatatattgatatggagaaggagcttcaagaggagccatgcccagcaaggtagcatgaaaaggccgcttgcaacagaagatttgttttggggaatttagatttttgtaaccttgaaaggtcataacgttaaccgaagagattttggcaactgcaaagcaaactgagagtgcccagaatgttgcaggtctatcaccgccaagctattcagctggagtgcagtctgagggactggatgacctttcacattcccataagtttgccgttggtactagagttcaagctgtgtggagtgaagatggagaatggtataatgcaaccgttgaagctttgacaccaaatggatactatgtagcctacgatggctggggaaacagtgaagaggtggacccagataatgtgaggctgcttgaggaagaagcagctgatgccttgggacaagctgaaaaggaagctgaagctacaaaaatggcaataaagaggaaaattgaacaagcagcaacatctgattttcaggcgcgtagcttgccggccaaacttcgtatcgaaccaagtgaccctgaggatgttaaagctgcaaagcgtaagaaaatacatgctttcaaatcaaaatcccgctttgagcagcttgaatttgcccaaaacaaaaggcagaatgcatggcagcagtttcaaaccaaggggaaagccaaaaaggtggggttcttctccggtcgcaagaaggagagcatcttcaagtcaccggacgaccacagaggtaaggtgggtgtcactgggagtggcaagggcctgaccgacttccagaggagggagaagcatctgcaccttaaaggtgggtccggggatgcagcggatgatgacgaggagtaaactgaagaaccgagcctctgtttgtatcccgccgaacagacatttccatacctgttctttagcgccgacatggcctcgaggggactcttgacttaaaccagaaaatttcaatgtttgtcccattctcattgttgaatgtcgctgccgttttggagctgcattctggtggcgaggtcacgctgctagaggagggcgtcctgagcgtacagatcgacttgtcttgctagtctgtagtgaagtattaatccttaaacgtttact

SEQ ID NO: 39383 - DNA, 1686 bp, Zea Mays
gtgacgtcacctcttctaaggcccctgtggtgccaattcagatgggctccaggatgaggccaggcccatgggggcacgattcggccttttcttgtcttgctcgtcaaaagaataaaatcccaacccataggaaagcgtagcatagcaggggaggccgggaggggagaaaggcgaactcgaattgggggaagagagcgagagacgaatcgcatcgagccggagaggaagtcagagacagggaggagggcggcggaatcggcgccggcgggaggcaggcatggaggacctgagcgtggaggagctcgcctccaacctctccacctacaaagagcagctacgcgaggtcaagaagcttatcaaggagaagaaggatgatgctggaatttctgaatatattgatatggagaaggagcttcaagaggtcagttcatttcttattttatcctgtaatgtgatccctcatgctcgtgtagctacacgtcagatacatcggattaatgattttcacaaatggatgcttgatttctcctctgatttttggggcatgttgctatcgattcctctcttctttgttacaaggagccatgcccagcaaggtagcatgaaaaggccgcttgcaacagaagatttgttttggggaatttagatttttgtaaccttgaaaggtcataacgttaaccgaagagattttggcaactgcaaagcaaactgagagtgcccagaatgttgcaggtctatcaccgccaagctattcagctggagtgcagtctgagggactggatgacctttcacattcccataagtttgccgttggtactagagttcaagctgtgtggagtgaagatggagaatgctgaattgccaggtataatgcaaccgttgaagctttgacaccaaatggatactatgtagcctacgatggctggggaaacagtgaagaggtggacccagataatgtgaggctgcttgaggaagaagcagctgatgccttgggacaagctgaaaaggaagctgaagctacaaaaatggcaataaagaggaaaattgaacaagcagcaacatctgattttcaggcgcgtagcttgccggccaaacttcgtatcgaaccaagtgaccctgaggatgttaaagctgcaaagcgtaagaaaatacatgctttcaaatcaaaatcccgctttgagcagcttgaatttgcccaaaacaaaaggcagaatgcatggcagcagtttcaaaccaaggggaaagccaaaaagggggttcttctccggtcgcaagaaggagagcatcttcaagtcaccggacgaccacagaggtaaggtgggtgtcactgggagtggcaagggcctgaccgacttccagaggagggagaagcatctgcaccttaaaggtgggtccggggatgcagcggatgatgacgaggagtaaactgaagaaccgagcctctgtttgtatcccgccgaacagacatttccatacctgttctttagcgccgacatggcctcgaggggactcttgacttaaaccagaaaatttcaatgtttgtcccattctcattgttgaatgtcgctgccgttttggagctgcattctggtggcgaggtcacgctgctagaggagggcgtcctgagcgtacagatcgacttgtcttgctagtctgtagtgaagtattaatccttaaacgtttact

SEQ ID NO: 39384 - DNA, 1676 bp, Zea Mays
gtgacgtcacctcttctaaggcccctgtggtgccaattcagatgggctccaggatgaggccaggcccatgggggcacgattcggccttttcttgtcttgctcgtcaaaagaataaaatcccaacccataggaaagcgtagcatagcaggggaggccgggaggggagaaaggcgaactcgaattgggggaagagagcgagagacgaatcgcatcgagccggagaggaagtcagagacagggaggagggcggcggaatcggcgccggcgggaggcaggcatggaggacctgagcgtggaggagctcgcctccaacctctccacctacaaagagcagctacgcgaggtcaagaagcttatcaaggagaagaaggatgatgctggaatttctgaatatattgatatggagaaggagcttcaagaggagccatgcccagcaaggtagcatgaaaaggccgcttgcaacagaagatttgttttggggaatttagatttttgtaaccttgaaaggtgagaaggttaattatggcaatggtttgtactactacaaatttcggtgttgctgctgctgttctaagttggatcttgaaatatgggcacatgtttaatactactgggaggttgcttgtgtttatgatgcttaatatcattttttgtgtttgctgcaggtcataacgttaaccgaagagattttggcaactgcaaagcaaactgagagtgcccagaatgttgcaggtctatcaccgccaagctattcagctggagtgcagtctgagggactggatgacctttcacattcccataagtttgccgttggtactagagttcaagctgtgtggagtgaagatggagaatggtataatgcaaccgttgaagctttgacaccaaatggatactatgtagcctacgatggctggggaaacagtgaagaggtggacccagataatgtgaggctgcttgaggaagaagcagctgatgccttgggacaagctgaaaaggaagctgaagctacaaaaatggcaataaagaggaaaattgaacaagcagcaacatctgattttcaggcgcgtagcttgccggccaaacttcgtatcgaaccaagtgaccctgaggatgttaaagctgcaaagcgtaagaaaatacatgctttcaaatcaaaatcccgctttgagcagcttgaatttgcccaaaacaaaaggcagaatgcatggcagcagtttcaaaccaaggggaaagccaaaaaggtggggttcttctccggtcgcaagaaggagagcatcttcaagtcaccggacgaccacagaggtaaggtgggtgtcactgggagtggcaagggcctgaccgacttccagaggagggagaagcatctgcaccttaaaggtgggtccggggatgcagcggatgatgacgaggagtaaactgaagaaccgagcctctgtttgtatcccgccgaacagacatttccatacctgttctttagcgccgacatggcctcgaggggactcttgacttaaaccagaaaatttcaatgtttgtcccattctcattgttgaatgtcgctgccgttttggagctgcattctggtggcgaggtcacgctgctagaggagggcgtcctgagcgtacagatcgacttgtcttgctagtctgtagtgaagtattaatccttaaacgtttact

SEQ ID NO: 39385 - DNA, 1732 bp, Zea Mays
accagatccagtgacggcgaacgccagccaaatcgcgaactgcgaatcgcgatggcgacgagccgacgagggattgtttttttttctttctgcaacttgcacttctcaaaggcaagccgaagctgcccttgcccactcttcttctcctctcccccctctttctactaaaaaaatactcctccccacactaaactagtgccaaattgcttccgcattccctccctgcattcccctcctccgagtatccgacccatcggcggtcctctccctcgtggcgacggccgctccaccgccgctgccgagtgggtcttggccggcgacgaccgcccaccggatacagcagcagggtgtatgtttgggagccttatttggatcctgaaaaacacacaacaataatggggcacgaccatatgtctcgtataaagatgcatatggcagaaggttcttttggtgacaggaaccggtgccagcaacctgggtgcaatgaggttgtcgatggaagggtagtgtactgcaaaactcacagcggagagttgtcatgccaacagttcagtcacctccagagcggactggagagctcagtaccatgcactgagcaagagttacatgtcaagcacgaaggggatgatcgaggcatgttttgcaagaacgatagctgcagcaagcaagcacatgagaactcaatctactgtaagttgcatagcggtgttagcaagggctgcatggtccgaggctgtacaagaggtgcacatggaggcacacctctgtgcattgggcatggaggcgggaaacggtgtgtgatccctggatgcccaaatgccgcgtgtggtcaaggcctcagtgaccgctgtgtgaggcatggtggtggcaggagatgtagattcgaagggtgtgcgaagggcgcacaggggaacaccgattactgcataaggcacggtgggggaaggcggtgcaagtttgaaggttgcacgaagagtgcgcagggacggacagatttctgcattaagcatggtggtggcagccggtgcaagttccaaggatgcggcacgagcgcaaaatggggaacagatttctgctctatccacaggaaggctttgttgggaggcgacaatgccgccgtccctgaagctttgcctgccgcttcagaaaaacgacgtcgtgccaagaagcccaagaaggcggcgaaactgtctgaggcctcccaagagaatgccacagcagcagcagctattgctggtaacagcactcaacatatgggcggtcttctcatagctatccctgttgctaaccgtgacatgttaaccaaagccgtggcagcgacggggcaagctgcaatagcctccgcacagatagtggcgccgctgtccatgaaatcgccgacgccatctggagcagcggcggctaccttgactgggagggaggcgggagcaagcagggagatgctgggtctgtagaaagatggtggcagtgcataattcgggaggcttggcgacaccccttgcccagatagttctctgattattgccttctttttagactgagaaaaacctcgaaactttaggagggttgtgcattttgacagactcgggccgtcgactgactctagtgatgttctgtgcctttctcgtttgtaaattgcaatgttctcgtgtattttctcttgtgaccatttggacagtaagcaataatattggtgttctaatctcagaccattatttgtgaaatatcggtg

SEQ ID NO: 39386 - DNA, 1639 bp, Zea Mays
ctttctgcaacttgcacttctcaaaggcaagccgaagctgcccttgcccactcttcttctcctctcccccctctttctactaaaaaaatactcctccccacactaaactagtgccaaattgcttccgcattccctccctgcattcccctcctccgagtatccgacccatcggcggtcctctccctcgtggcgacggccgctccaccgccgctgccgagtgggtcttggccggcgacgaccgcccaccggatacagcagcaggctttatgctggaaacttctgcagaaaaacacacaacaataatggggcacgaccatatgtctcgtataaagatgcatatggcagaaggttcttttggtgacaggaaccggtgccagcaacctgggtgcaatgaggttgtcgatggaagggtagtgtactgcaaaactcacagcggagagttgtcatgccaacagttcagtcacctccagagcggactggagagctcagtaccatgcactgagcaagagttacatgtcaagcacgaaggggatgatcgaggcatgttttgcaagaacgatagctgcagcaagcaagcacatgagaactcaatctactgtaagttgcatagcggtgttagcaagggctgcatggtccgaggctgtacaagaggtgcacatggaggcacacctctgtgcattgggcatggaggcgggaaacggtgtgtgatccctggatgcccaaatgccgcgtgtggtcaaggcctcagtgaccgctgtgtgaggcatggtggtggcaggagatgtagattcgaagggtgtgcgaagggcgcacaggggaacaccgattactgcataaggcacggtgggggaaggcggtgcaagtttgaaggttgcacgaagagtgcgcagggacggacagatttctgcattaagcatggtggtggcagccggtgcaagttccaaggatgcggcacgagcgcaaaatggggaacagatttctgctctatccacaggaaggctttgttgggaggcgacaatgccgccgtccctgaagctttgcctgccgcttcagaaaaacgacgtcgtgccaagaagcccaagaaggcggcgaaactgtctgaggcctcccaagagaatgccacagcagcagcagctattgctggtaacagcactcaacatatgggcggtcttctcatagctatccctgttgctaaccgtgacatgttaaccaaagccgtggcagcgacggggcaagctgcaatagcctccgcacagatagtggcgccgctgtccatgaaatcgccgacgccatctggagcagcggcggctaccttgactgggagggaggcgggagcaagcagggagatgctgggtctgtagaaagatggtggcagtgcataattcgggaggcttggcgacaccccttgcccagatagttctctgattattgccttctttttagactgagaaaaacctcgaaactttaggagggttgtgcattttgacagactcgggccgtcgactgactctagtgatgttctgtgcctttctcgtttgtaaattgcaatgttctcgtgtattttctcttgtgaccatttggacagtaagcaataatattggtgttctaatctcagaccattatttgtgaaatatcggtg

SEQ ID NO: 39387 - DNA, 1623 bp, Zea Mays
ctcaaaggcaagccgaagctgcccttgcccactcttcttctcctctcccccctctttctactaaaaaaatactcctccccacactaaactagtgccaaattgcttccgcattccctccctgcattcccctcctccgagtatccgacccatcggcggtcctctccctcgtggcgacggccgctccaccgccgctgccgagtgggtcttggccggcgacgaccgcccaccggatacagcagcaggctttatgctggaaacttctgcagaaaaacacacaacaataatggggcacgaccatatgtctcgtataaagatgcatatggcagaaggttcttttggtgacaggaaccggtgccagcaacctgggtgcaatgaggttgtcgatggaagggtagtgtactgcaaaactcacagcggagagttgtcatgccaacagttcagtcacctccagagcggactggagagctcagcagtaccatgcactgagcaagagttacatgtcaagcacgaaggggatgatcgaggcatgttttgcaagaacgatagctgcagcaagcaagcacatgagaactcaatctactgtaagttgcatagcggtgttagcaagggctgcatggtccgaggctgtacaagaggtgcacatggaggcacacctctgtgcattgggcatggaggcgggaaacggtgtgtgatccctggatgcccaaatgccgcgtgtggtcaaggcctcagtgaccgctgtgtgaggcatggtggtggcaggagatgtagattcgaagggtgtgcgaagggcgcacaggggaacaccgattactgcataaggcacggtgggggaaggcggtgcaagtttgaaggttgcacgaagagtgcgcagggacggacagatttctgcattaagcatggtggtggcagccggtgcaagttccaaggatgcggcacgagcgcaaaatggggaacagatttctgctctatccacaggaaggctttgttgggaggcgacaatgccgccgtccctgaagctttgcctgccgcttcagaaaaacgacgtcgtgccaagaagcccaagaaggcggcgaaactgtctgaggcctcccaagagaatgccacagcagcagcagctattgctggtaacagcactcaacatatgggcggtcttctcatagctatccctgttgctaaccgtgacatgttaaccaaagccgtggcagcgacggggcaagctgcaatagcctccgcacagatagtggcgccgctgtccatgaaatcgccgacgccatctggagcagcggcggctaccttgactgggagggaggcgggagcaagcagggagatgctgggtctgtagaaagatggtggcagtgcataattcgggaggcttggcgacaccccttgcccagatagttctctgattattgccttctttttagactgagaaaaacctcgaaactttaggagggttgtgcattttgacagactcgggccgtcgactgactctagtgatgttctgtgcctttctcgtttgtaaattgcaatgttctcgtgtattttctcttgtgaccatttggacagtaagcaataatattggtgttctaatctcagaccattatttgtgaaatatcggtg

SEQ ID NO: 39388 - DNA, 2032 bp, Zea Mays
aagccgaagctgcccttgcccactcttcttctcctctcccccctctttctactaaaaaaatactcctccccacactaaactagtgccaaattgcttccgcattccctccctgcattcccctcctccgagtatccgacccatcggcggtcctctccctcgtggcgacggccgctccaccgccgctgccgagtgggtcttggccggcgacgaccgcccaccggatacagcagcaggactagtagccaagaacaaagaggctagctagcggtgataaagttttcataggtacaacaataaaactgaaatttgtggtatgcaaataatacagttatctttcttcatatgtattgcacttagagcaaccaatcatagtgattaaacatggccaatttaacccaattctcaagcactcaaattgtgctatttcacaaaactacctgatcatcaaactgtctgcttgtttgttttaacatatccttttacactccattcaggtgtatgtttgggagccttatttggatcctggtatcttctatcagtcatatatctactgttgctgatattgtatctctgtttcattatctgacagctttatgctggaaacttctgcagaaaaacacacaacaataatggggcacgaccatatgtctcgtataaagatgcatatggcagaaggttcttttggtgacaggaaccggtgccagcaacctgggtgcaatgaggttgtcgatggaagggtagtgtactgcaaaactcacagcggagagttgtcatgccaacagttcagtcacctccagagcggactggagagctcagtaccatgcactgagcaagagttacatgtcaagcacgaaggggatgatcgaggtaaactaaaggatagttctgggtacactttgggtcagactgcacaatttgtcttccctggggcaggcatgttttgcaagaacgatagctgcagcaagcaagcacatgagaactcaatctactgtaagttgcatagcggtgttagcaagggctgcatggtccgaggctgtacaagaggtgcacatggaggcacacctctgtgcattgggcatggaggcgggaaacggtgtgtgatccctggatgcccaaatgccgcgtgtggtcaaggcctcagtgaccgctgtgtgaggcatggtggtggcaggagatgtagattcgaagggtgtgcgaagggcgcacaggggaacaccgattactgcataaggcacggtgggggaaggcggtgcaagtttgaaggttgcacgaagagtgcgcagggacggacagatttctgcattaagcatggtggtggcagccggtgcaagttccaaggatgcggcacgagcgcaaaatggggaacagatttctgctctatccacaggaaggctttgttgggaggcgacaatgccgccgtccctgaagctttgcctgccgcttcagaaaaacgacgtcgtgccaagaagcccaagaaggcggcgaaactgtctgaggcctcccaagagaatgccacagcagcagcagctattgctggtaacagcactcaacatatgggcggtcttctcatagctatccctgttgctaaccgtgacatgttaaccaaagccgtggcagcgacggggcaagctgcaatagcctccgcacagatagtggcgccgctgtccatgaaatcgccgacgccatctggagcagcggcggctaccttgactgggagggaggcgggagcaagcagggagatgctgggtctgtagaaagatggtggcagtgcataattcgggaggcttggcgacaccccttgcccagatagttctctgattattgccttctttttagactgagaaaaacctcgaaactttaggagggttgtgcattttgacagactcgggccgtcgactgactctagtgatgttctgtgcctttctcgtttgtaaattgcaatgttctcgtgtattttctcttgtgaccatttggacagtaagcaataatattggtgttctaatctcagaccattatttgtgaaatatcggtg

SEQ ID NO: 39389 - DNA, 1733 bp, Zea Mays
aagccgaagctgcccttgcccactcttcttctcctctcccccctctttctactaaaaaaatactcctccccacactaaactagtgccaaattgcttccgcattccctccctgcattcccctcctccgagtatccgacccatcggcggtcctctccctcgtggcgacggccgctccaccgccgctgccgagtgggtcttggccggcgacgaccgcccaccggatacagcagcaggactagtagccaagaacaaagaggctagctagcggtgataaagttttcataggtctttatgctggaaacttctgcagaaaaacacacaacaataatggggcacgaccatatgtctcgtataaagatgcatatggcagaaggttcttttggtgacaggaaccggtgccagcaacctgggtgcaatgaggttgtcgatggaagggtagtgtactgcaaaactcacagcggagagttgtcatgccaacagttcagtcacctccagagcggactggagagctcagcagtaccatgcactgagcaagagttacatgtcaagcacgaaggggatgatcgaggtaaactaaaggatagttctgggtacactttgggtcagactgcacaatttgtcttccctggggcaggcatgttttgcaagaacgatagctgcagcaagcaagcacatgagaactcaatctactgtaagttgcatagcggtgttagcaagggctgcatggtccgaggctgtacaagaggtgcacatggaggcacacctctgtgcattgggcatggaggcgggaaacggtgtgtgatccctggatgcccaaatgccgcgtgtggtcaaggcctcagtgaccgctgtgtgaggcatggtggtggcaggagatgtagattcgaagggtgtgcgaagggcgcacaggggaacaccgattactgcataaggcacggtgggggaaggcggtgcaagtttgaaggttgcacgaagagtgcgcagggacggacagatttctgcattaagcatggtggtggcagccggtgcaagttccaaggatgcggcacgagcgcaaaatggggaacagatttctgctctatccacaggaaggctttgttgggaggcgacaatgccgccgtccctgaagctttgcctgccgcttcagaaaaacgacgtcgtgccaagaagcccaagaaggcggcgaaactgtctgaggcctcccaagagaatgccacagcagcagcagctattgctggtaacagcactcaacatatgggcggtcttctcatagctatccctgttgctaaccgtgacatgttaaccaaagccgtggcagcgacggggcaagctgcaatagcctccgcacagatagtggcgccgctgtccatgaaatcgccgacgccatctggagcagcggcggctaccttgactgggagggaggcgggagcaagcagggagatgctgggtctgtagaaagatggtggcagtgcataattcgggaggcttggcgacaccccttgcccagatagttctctgattattgccttctttttagactgagaaaaacctcgaaactttaggagggttgtgcattttgacagactcgggccgtcgactgactctagtgatgttctgtgcctttctcgtttgtaaattgcaatgttctcgtgtattttctcttgtgaccatttggacagtaagcaataatattggtgttctaatctcagaccattatttgtgaaatatcggtg

SEQ ID NO: 39390 - DNA, 1622 bp, Zea Mays
aagccgaagctgcccttgcccactcttcttctcctctcccccctctttctactaaaaaaatactcctccccacactaaactagtgccaaattgcttccgcattccctccctgcattcccctcctccgagtatccgacccatcggcggtcctctccctcgtggcgacggccgctccaccgccgctgccgagtgggtcttggccggcgacgaccgcccaccggatacagcagcagggtgtatgtttgggagccttatttggatcctgaaaaacacacaacaataatggggcacgaccatatgtctcgtataaagatgcatatggcagaaggttcttttggtgacaggaaccggtgccagcaacctgggtgcaatgaggttgtcgatggaagggtagtgtactgcaaaactcacagcggagagttgtcatgccaacagttcagtcacctccagagcggactggagagctcagcagtaccatgcactgagcaagagttacatgtcaagcacgaaggggatgatcgaggcatgttttgcaagaacgatagctgcagcaagcaagcacatgagaactcaatctactgtaagttgcatagcggtgttagcaagggctgcatggtccgaggctgtacaagaggtgcacatggaggcacacctctgtgcattgggcatggaggcgggaaacggtgtgtgatccctggatgcccaaatgccgcgtgtggtcaaggcctcagtgaccgctgtgtgaggcatggtggtggcaggagatgtagattcgaagggtgtgcgaagggcgcacaggggaacaccgattactgcataaggcacggtgggggaaggcggtgcaagtttgaaggttgcacgaagagtgcgcagggacggacagatttctgcattaagcatggtggtggcagccggtgcaagttccaaggatgcggcacgagcgcaaaatggggaacagatttctgctctatccacaggaaggctttgttgggaggcgacaatgccgccgtccctgaagctttgcctgccgcttcagaaaaacgacgtcgtgccaagaagcccaagaaggcggcgaaactgtctgaggcctcccaagagaatgccacagcagcagcagctattgctggtaacagcactcaacatatgggcggtcttctcatagctatccctgttgctaaccgtgacatgttaaccaaagccgtggcagcgacggggcaagctgcaatagcctccgcacagatagtggcgccgctgtccatgaaatcgccgacgccatctggagcagcggcggctaccttgactgggagggaggcgggagcaagcagggagatgctgggtctgtagaaagatggtggcagtgcataattcgggaggcttggcgacaccccttgcccagatagttctctgattattgccttctttttagactgagaaaaacctcgaaactttaggagggttgtgcattttgacagactcgggccgtcgactgactctagtgatgttctgtgcctttctcgtttgtaaattgcaatgttctcgtgtattttctcttgtgaccatttggacagtaagcaataatattggtgttctaatctcagaccattatttgtgaaatatcggtg

SEQ ID NO: 39391 - DNA, 1958 bp, Zea Mays
aagccgaagctgcccttgcccactcttcttctcctctcccccctctttctactaaaaaaatactcctccccacactaaactagtgccaaattgcttccgcattccctccctgcattcccctcctccgagtatccgacccatcggcggtcctctccctcgtggcgacggccgctccaccgccgctgccgagtgggtcttggccggcgacgaccgcccaccggatacagcagcaggctttatgctggaaacttctgcagaaaaacacacaacaataatggggcacgaccatatgtctcgtataaagatgcatatggcagaaggttcttttggtggtatgtctgccccatgcctcaatgtttccatagcttgtgatctcgcaaggacgcatctctattttggaattttaagaagacatgctgttacatattttatgttccactgagctggtgaattcagatgatgctgattttctgacacattccatgtgctactgttggttgatagatatcttttatcatgaattctggagctaatatatgttatgttggtgtaaccaattacttttactttgttgtgttttgctatcagtttttttcctttgtttggtgttttgtttcatatttatatcaattgtattgtgtttgatacatttctaatatactaatttcctgtaaaacagacaggaaccggtgccagcaacctgggtgcaatgaggttgtcgatggaagggtagtgtactgcaaaactcacagcggagagttgtcatgccaacagttcagtcacctccagagcggactggagagctcagtaccatgcactgagcaagagttacatgtcaagcacgaaggggatgatcgaggcatgttttgcaagaacgatagctgcagcaagcaagcacatgagaactcaatctactgtaagttgcatagcggtgttagcaagggctgcatggtccgaggctgtacaagaggtgcacatggaggcacacctctgtgcattgggcatggaggcgggaaacggtgtgtgatccctggatgcccaaatgccgcgtgtggtcaaggcctcagtgaccgctgtgtgaggcatggtggtggcaggagatgtagattcgaagggtgtgcgaagggcgcacaggggaacaccgattactgcataaggcacggtgggggaaggcggtgcaagtttgaaggttgcacgaagagtgcgcagggacggacagatttctgcattaagcatggtggtggcagccggtgcaagttccaaggatgcggcacgagcgcaaaatggggaacagatttctgctctatccacaggaaggctttgttgggaggcgacaatgccgccgtccctgaagctttgcctgccgcttcagaaaaacgacgtcgtgccaagaagcccaagaaggcggcgaaactgtctgaggcctcccaagagaatgccacagcagcagcagctattgctggtaacagcactcaacatatgggcggtcttctcatagctatccctgttgctaaccgtgacatgttaaccaaagccgtggcagcgacggggcaagctgcaatagcctccgcacagatagtggcgccgctgtccatgaaatcgccgacgccatctggagcagcggcggctaccttgactgggagggaggcgggagcaagcagggagatgctgggtctgtagaaagatggtggcagtgcataattcgggaggcttggcgacaccccttgcccagatagttctctgattattgccttctttttagactgagaaaaacctcgaaactttaggagggttgtgcattttgacagactcgggccgtcgactgactctagtgatgttctgtgcctttctcgtttgtaaattgcaatgttctcgtgtattttctcttgtgaccatttggacagtaagcaataatattggtgttctaatctcagaccattatttgtgaaatatcggtg

SEQ ID NO: 39392 - DNA, 1989 bp, Zea Mays
aagccgaagctgcccttgcccactcttcttctcctctcccccctctttctactaaaaaaatactcctccccacactaaactagtgccaaattgcttccgcattccctccctgcattcccctcctccgagtatccgacccatcggcggtcctctccctcgtggcgacggccgctccaccgccgctgccgagtgggtcttggccggcgacgaccgcccaccggatacagcagcaggctttatgctggaaacttctgcagaaaaacacacaacaataatggggcacgaccatatgtctcgtataaagatgcatatggcagaaggttcttttggtggtatgtctgccccatgcctcaatgtttccatagcttgtgatctcgcaaggacgcatctctattttggaattttaagaagacatgctgttacatattttatgttccactgagctggtgaattcagatgatgctgattttctgacacattccatgtgctactgttggttgatagatatcttttatcatgaattctggagctaatatatgttatgttggtgtaaccaattacttttactttgttgtgttttgctatcagtttttttcctttgtttggtgttttgtttcatatttatatcaattgtattgtgtttgatacatttctaatatactaatttcctgtaaaacagacaggaaccggtgccagcaacctgggtgcaatgaggttgtcgatggaagggtagtgtactgcaaaactcacagcggagagttgtcatgccaacataccatgcactgagcaagagttacatgtcaagcacgaaggggatgatcgaggtaaactaaaggatagttctgggtacactttgggtcagactgcacaatttgtcttccctggggcaggcatgttttgcaagaacgatagctgcagcaagcaagcacatgagaactcaatctactgtaagttgcatagcggtgttagcaagggctgcatggtccgaggctgtacaagaggtgcacatggaggcacacctctgtgcattgggcatggaggcgggaaacggtgtgtgatccctggatgcccaaatgccgcgtgtggtcaaggcctcagtgaccgctgtgtgaggcatggtggtggcaggagatgtagattcgaagggtgtgcgaagggcgcacaggggaacaccgattactgcataaggcacggtgggggaaggcggtgcaagtttgaaggttgcacgaagagtgcgcagggacggacagatttctgcattaagcatggtggtggcagccggtgcaagttccaaggatgcggcacgagcgcaaaatggggaacagatttctgctctatccacaggaaggctttgttgggaggcgacaatgccgccgtccctgaagctttgcctgccgcttcagaaaaacgacgtcgtgccaagaagcccaagaaggcggcgaaactgtctgaggcctcccaagagaatgccacagcagcagcagctattgctggtaacagcactcaacatatgggcggtcttctcatagctatccctgttgctaaccgtgacatgttaaccaaagccgtggcagcgacggggcaagctgcaatagcctccgcacagatagtggcgccgctgtccatgaaatcgccgacgccatctggagcagcggcggctaccttgactgggagggaggcgggagcaagcagggagatgctgggtctgtagaaagatggtggcagtgcataattcgggaggcttggcgacaccccttgcccagatagttctctgattattgccttctttttagactgagaaaaacctcgaaactttaggagggttgtgcattttgacagactcgggccgtcgactgactctagtgatgttctgtgcctttctcgtttgtaaattgcaatgttctcgtgtattttctcttgtgaccatttggacagtaagcaataatattggtgttctaatctcagaccattatttgtgaaatatcggtg

SEQ ID NO: 39393 - DNA, 1469 bp, Zea Mays
caacaataaaactgaaatttgtgctttatgctggaaacttctgcagaaaaacacacaacaataatggggcacgaccatatgtctcgtataaagatgcatatggcagaaggttcttttggtgacaggaaccggtgccagcaacctgggtgcaatgaggttgtcgatggaagggtagtgtactgcaaaactcacagcggagagttgtcatgccaacagttcagtcacctccagagcggactggagagctcaggtttatcggtgcgtcctgtaactcctgttaatgacagccagtttaagggatctgtttccattgcagcagtaccatgcactgagcaagagttacatgtcaagcacgaaggggatgatcgaggcatgttttgcaagaacgatagctgcagcaagcaagcacatgagaactcaatctactgtaagttgcatagcggtgttagcaagggctgcatggtccgaggctgtacaagaggtgcacatggaggcacacctctgtgcattgggcatggaggcgggaaacggtgtgtgatccctggatgcccaaatgccgcgtgtggtcaaggcctcagtgaccgctgtgtgaggcatggtggtggcaggagatgtagattcgaagggtgtgcgaagggcgcacaggggaacaccgattactgcataaggcacggtgggggaaggcggtgcaagtttgaaggttgcacgaagagtgcgcagggacggacagatttctgcattaagcatggtggtggcagccggtgcaagttccaaggatgcggcacgagcgcaaaatggggaacagatttctgctctatccacaggaaggctttgttgggaggcgacaatgccgccgtccctgaagctttgcctgccgcttcagaaaaacgacgtcgtgccaagaagcccaagaaggcggcgaaactgtctgaggcctcccaagagaatgccacagcagcagcagctattgctggtaacagcactcaacatatgggcggtcttctcatagctatccctgttgctaaccgtgacatgttaaccaaagccgtggcagcgacggggcaagctgcaatagcctccgcacagatagtggcgccgctgtccatgaaatcgccgacgccatctggagcagcggcggctaccttgactgggagggaggcgggagcaagcagggagatgctgggtctgtagaaagatggtggcagtgcataattcgggaggcttggcgacaccccttgcccagatagttctctgattattgccttctttttagactgagaaaaacctcgaaactttaggagggttgtgcattttgacagactcgggccgtcgactgactctagtgatgttctgtgcctttctcgtttgtaaattgcaatgttctcgtgtattttctcttgtgaccatttggacagtaagcaataatattggtgttctaatctcagaccattatttgtgaaatatcggtg

SEQ ID NO: 39394 - DNA, 1939 bp, Zea Mays
aaatttttggatatgaactatgaagatatggaggctcacatggccaaattcaaggatgattggaaggaatatggtgttactgtcatgtgtgattcatggacaggtcctaccatgatgtgtatcattaattttatggtatattgcaatggaaggatgttttttcacaagtctataaatgcaactggccgtgttcaaaatgctgaatttatttatgattgtattagagaggtggttgttgatgagattggggtgaagaatgtcattcaaattgttacagataatgggtccaactataagaaggcatgtcgacagctcattactcggtatccgcacattacatggcagccctgtgcagctcatacaattaatttgatgctgaaagatataagtcgcttttctgaggtctctcaagtagtggacgatgcaaaaagaatttgtagattcttctataaccataacaggcttcatgctatgatgagggagaaaattggtggagagttgattaggtggaatgctactaggttcggcaccgtctttatcttccttcagagtttctgggatagacaagataagtttatgcaatggatggtgtctgatgattggaaaaacaacgcatggaaagatgaagcagatcatgcatttacttatgattgtttgttaaatagaagatggtggagtgacatggaattggtgttgaatgctgtcacaccaatttatactgtgcttcgctatgctgatcaacaaaaaaatgcaactatagctggatttcttccaaagataatgacagccatggctcaaatacgtggtaatttaagtaaagagaaagatcttcttgatagaatagttggagtgatcaagaagagactaaaatatatggttgatgatactctcattgttgcagctggtgcacttgatcctaaaacattatatatgactaagctttcaagaaaatcatctactagacatgcagttacattggctcttaagaagcttgcaagctcatctaagattgcatctgctgcaattgagcaatatgcttttttctgtgaaaaaagaggattatttgcaggggaggaagccgaacgttcagcaactaatggacgcatgagtgcagctgaatggtggagtgcatatggaggagagcacaaagaactacaaatgcttgcacgtcggattgtttcacaatgtctatcctctagtggatgcgagcgaaactggagcacatttgcattggtccataccaaactgagaaatcgtttgggttatgagaagctccacaaattggtttatgtccactacaatttgaaattacgcatccaacatttcgagaatgacatgcaaagtcttcaagaaatgcaagtcttcaaagatactgagttagatccatatagtgttatgatagattgtgctatgtatgatgaaggtaacccaatcatggattggttgtgcaactcaaggagtgagtctacgcctattcttgatgagtatgatgacaatgagcttgaatccccaatcccatctagagttctcatggatgagttaggaatggatgtagaagtgaccgcattgaagaggaagcttgattttaatacaagagaaggtaagaagaaaagaaaggcaggacttgttgatattgaggaagaaattgaggatgatgttgagtcagattcttcagatggtagcccaataaatgttgaattatgtgatagcagttcagatgatgatggcacagtaggtgatgagtttggtgacgaatgggaatttagaggacctagtggtggtggagcatgtgaagttggacctagtggtggtggagcatgtgatgttggacctagtggtgatggatcaagggatggtgctatgcatgagcaagcagctccaaatcctccacttcgtccaagatcaacaaggctaaagaaagtccctgtgaaggaacttt

SEQ ID NO: 39395 - DNA, 2087 bp, Zea Mays
aaatttttggatatgaactatgaagatatggaggctcacatggccaaattcaaggatgattggaaggaatatggtgttactgtcatgtgtgattcatggacaggtcctaccatgatgtgtatcattaattttatggtatattgcaatggaaggatgttttttcacaagtctataaatgcaactggccgtgttcaaaatgctgaatttatttatgattgtattagagaggtggttgttgatgagattggggtgaagaatgtcattcaaattgttacagataatgggtccaactataagaaggcatgtcgacagctcattactcggtatccgcacattacatggcagccctgtgcagctcatacaattaatttgatgctgaaagatataagtcgcttttctgaggtctctcaagtagtggacgatgcaaaaagaatttgtagattcttctataaccataacaggcttcatgctatgatgagggagaaaattggtggagagttgattaggtggaatgctactaggttcggcaccgtctttatcttccttcagagtttctgggatagacaagataagtttatgcaatggatggtgtctgatgattggaaaaacaacgcatggaaagatgaagcagatcatgcatttacttatgattgtttgttaaatagaagatggtggagtgacatggaattggtgttgaatgctgtcacaccaatttatactgtgcttcgctatgctgatcaacaaaaaaatgcaactatagctggatttcttccaaagataatgacagccatggctcaaatacgtggtaatttaagtaaagagaaagatcttcttgatagaatagttggagtgatcaagaagagactaaaatatatggttgatgatactctcattgttgcagctggtgcacttgatcctaaaacattatatatgactaagctttcaagaaaatcatctactagacatgcagttacattggctcttaagaagcttgcaagctcatctaagattgcatctgctgcaattgagcaatatgcttttttctgtgaaaaaagaggattatttgcaggggaggaagccgaacgttcagcaactaatggacgcatgagtgcagctgaatggtggagtgcatatggaggagagcacaaagaactacaaatgcttgcacgtcggattgtttcacaatgtctatcctctagtggatgcgagcgaaactggagcacatttgcattggtccataccaaactgagaaatcgtttgggttatgagaagctccacaaattggtttatgtccactacaatttgaaattacgcatccaacatttcgagaatgacatgcaaagtcttcaagaaatgcaagtcttcaaagatactgagttagatccatatagtgttatgatagattgtgctatgtatgatgaaggtaacccaatcatggattggttgtgcaactcaaggagtgagtctacgcctattcttgatgagtatgatgacaatgagcttgaatccccaatcccatctagagttctcatggatgagttaggaatggatgtagaagtgaccgcattgaagaggaagcttgattttaatacaagagaaggtaagaagaaaagaaaggcaggacttgttgatattgaggaagaaattgaggatgatgttgagtcagattcttcagatggtagcccaataaatgttgaattatgtgatagcagttcagatgatgatggcacaggtgatgagtttggtgacgaatgggaatttagaggacctagtggtggtggagcatgtgaagttggacctagtggtggtggagcatgtgatgttggacctagtggtgatggatcaagggatggtgctatgcatgagcaagcagctccaaatcctccacttcgtccaagatcaacaaggctaaagaaagtccctgtgaaggaactttataagtgacaagtgatcaaagcctctccaaagactatggaggatttcattgtcatattttcagcacatgtctttgccttattttggacttttgattcatgtgtgaactatgaatggactatgaatgtgtgaaactgtgaactatgaatgtg

SEQ ID NO: 39396 - DNA, 1747 bp, Zea Mays
tccgtctagacgccggcactccgcagctggttcattccgtcgcggccgggtcggcggtccccagttctcctccgcttcttcctccacgctcccgtccccgccgcgcgaggaacttcccacttccaggcccagcttgtctggttaggattagggtcgtcgcttcgcacgtgtccggtgtgccgccgtcggagatgtcgcggacgctggtgcagccggtggggcagaaacacctcaccagcgtggccgcgcacctatcggccgcgagctaaacgaggatcctaaccttaaccctgggcaggtaccaagcctatgagctgatccatgccatataggccatgcttggtgccgctggcgctgtcatcctagaggcctgcaacaagtttggcgctaactgcgacccttaggccgtttcgttcaagactgatactctactcctggatgacaatactaaactacttcggcaacaacattcccatcaacggatctatgtctggctgtcatcgcgaagatcatcctcgtcatcggtgccccagtgggccctttaacatcctaggcctggccaacgacccctaccaaactgccatcctcaaggtgaaggagatcaagaacggccgactgaccatgttctccatgttcgccttcttcatctaagcctatgtcaccgacgaaggcccccgtgtagaacctcgccaagcagaaggttcttcttgagggtgttgagacgtacaacaagttgcaaaacgaccatattacagcaaaagaacgactttagtaagagcatggtactaatatggcatgttgtgtttagtggaaacctccctatcttgaggtttcttcttgatcatggtgatgatctccatgaagaaggcagcctggaaggtcatgacaggttcaccgttctacatatagctacagagaaagatataatgtagactcatattttctattatttatgttgcttattctgttaatcaataaactgcatgcaattttttgtttataactatttttagaaaaaaacatacttcatgtgcaaaacattgcctggcgaattttcatgctttacttgtatatttgtggatcatactatgttcttgtaactacagtttaatgtcagtggaacacaaacacatgaagttgttctgataacgataatccttcttgaataattcctatatgtaagttagcatagcatgtgtgtgggtgtttgttttcttagtagtggcaatggtttattcttttttttgccatcctgttagtattttgtagttcattatcaagtatcaacctatctctttgctttgtctaatccgagatcaaggacttccttctgaccgtgaggaggaaggatgcccgatcagtgaaggtcaagaggatcaaggatgttgttaaattcaaggatgtgcaagggagggtcgaggtgctgtctgtctcagcgcacacagaacatctctactgaaagccagcgcaagcagcatagaaggtcacaaaaagagtgcaaaagatagacccacgaggtcatctttgaaagaacaaaggacgtggtggagtgaagaacaatgagctcgaatcagtagtatctatctatagcaggtaagcaatgaatgcattacgccgctggactagagtttttacaagatcggactcggtttaataagcggtgcacaaggcctttggcggcagctgcaggtcggcggcgttgctctccagcatctcaaggacttggcccatggacggccgactgtcc

SEQ ID NO: 39397 - DNA, 3885 bp, Zea Mays
tccgtctagacgccggcactccgcagctggttcattccgtcgcggccgggtcggcggtccccagttctcctccgcttcttcctccacgctcccgtccccgccgcgcgaggaacttcccacttccaggcccagcttgtctggttaggattagggtcgtcgcttcgcacgtgtccggtgtgccgccgtcggagatgtcgcggacgctggtgcagccggtggggcagaaacacctcaccagcgtggccgcgcacctatcggccgcgagctaaacgaggatcctaaccttaaccctgggcagactgatactctactcctggatgacaatactaaactacttcggcaacaacattcccatcaacggatctatgtctggctgtcatcgcgaagatcatcctcgtcatcggtgccccagtgggccctttaacatcctaggcctggccaacgacccctaccaaactgccatcctcaaggtgaaggagatcaagaacggccgactgaccatgttctccatgttcgccttcttcatctaagcctatgtcaccgacgaaggcccccgtgtagaacctcgccaagcagaaggttcttcttgagggtgttgagacgtacaacaagttgcaaaacgaccatattacagcaaaagaacgactttagtaagagcatggtactaatatggcatgttgtgtttagtggaaacctccctatcttgaggtttcttcttgatcatggtgatgatctccatgaagaaggcagcctggaaggtcatgacaggttcaccgttctacatatagctacagagaaagatataatgtagactcatattttctattatttatgttgcttattctgttaatcaataaactgcatgcaattttttgtttataactatttttagaaaaaaacatacttcatgtgcaaaacattgcctggcgaattttcatgctttacttgtatatttgtggatcatactatgttcttgtaactacagtttaatgtcagtggaacacaaacacatgaagttgttctgataacgataatccttcttgaataattcctatatgtaagttagcatagcatgtgtgtgggtgtttgttttcttagtagtggcaatggtttattcttttttttgccatcctgttagtattttgtagttcattatcaagtatcaacctatctctttgctttgtctaatccgagatcaaggacttccttctgaccgtgaggaggaaggatgcccgatcagtgaaggtcaagaggatcaaggatgttgttaaattcaaggtatgttgatccaagtacttgtacaccctctacgtctttgatgctgagaaagcaaacaagttgaagcaatctcttcccttagatagcgcagctttaattgacatgatattgtttctattctggtatatgaaaacttcattttggtagtattgtctttttggttggattggtgtcattttctttgttttaagtttctgtcaattagcggttccagtgaaatatgtgattggcttaaggaagactggttttagcttcaagtcaactaacatgtcattctcgattaatgggtggcttgtggctaaaactaattttgagaaccatccatgatggccaataatagctatgagatccgagggacttgtatgatcacttttttcagtttcttttctgaatcaattttgagaaccatccatgatggccaataatagctgtgagatccgaggtgttagtcatagacgtcgcttgtgccagcggctcttgtcgaagtaagaggagcgtgtagcagtttgttgtactacgctgacggctccaacgaagaacctcgacagctagcgtcgcgccgacgatagcggcagccaccacgggcggtggcactagcaaatctgaatcaagctaaccaacacaaatatctgacattactatgataagagtatctaagtgcactattaaattgatctatgtttgaataaatatcttatttaaacaatatttatttgtgcctctgcagttacccaaatggtgcattgcctgatatcataattggacataagtttcagagatatcgtctaagtcttctggttggtttaaactgtcactggcataaggccataacacctctgttgtctgaatgtttatatttcattcacctatatactatttattgactcaatcattgtagcaaaaaaaattaattgcattggcaaatatgattttcttatattctctagcagatgtttaaggtatgtaaacctaaacttttaaaagatgctaacgagagcatatagcgataaatagtgcttttgtacctcaatgtatctttattacattttggttagctccgtagcaaagcacgggcatatacctagttcttgatatatgtcatgatttctggcgatagtgtctttcagtagtagcagcttgtgtagcacaattctgtagagaattctttcttcggtgtttagacctaatcacctaacaactgcctggatgcaaattttttatggaatttgtaatggtgccatattgctaataggatgggtgaccgttctaggtttacaacagtacagcactgaattcatcatcacacacaacataaagctagcattgttatggtttacatggtcattaattttgtacgtaatacaccttgattttgaatttggatatttcaacaaatgattattggttgtatgtttatatagcatagtagttaaaaacttgtcagcattacctgcatatggaacattgtaattgctgtaaggctactttggccagttaaagttcctctagctagcatctcgctctatttttcttctgtttctaaaagttatcaggagctatagagcataaagagcctggacagttaggggcgtgattggtagcctgaatacaggttggtctttgatctgggtaactactttgtggcatgctctgtaagttaaaactactttagtcttgtaggctgtaaaagttattaagaagcccacagagcacttacccataaagcgggcaccacttagggcgcggttcactgcaccaaaacccaattttccaggtcttatgggtaagatcggcgaatggaatgctattgtcattttcaaaggatgaattgagcactactcagccttctattgtaagtctactggttcttgttctctgtggttattcctacatcacatgatggttgtgaattggtaattttcgtatggaatttgtactcggtgttccctttttcacttgagcaattccaggggaaaaaatataggaaaacaatgtcatatagtgggtaaaaggttgttgtgagtgtgtgttgagggtgaatggtgggggtggggggcagcgcacacaatgtcagagggagtgtaaaaggttttgggtatcatctttgttctgtatcacgtagcttagaggcttgggtgcctactcaaatgtgtgggggaaaaaatcatggtctccagtttgtgtgggaggtatctctgcctgatcgtaggaagaataggtggataatgttttatttactcgtgtaaggagcggttgaaggatgtgcaagggagggtcgaggtgctgtctgtctcagcgcacacagaacatctctactgaaagccagcgcaagcagcatagaaggtcacaaaaagagtgcaaaagatagacccacgaggtcatctttgaaagaacaaaggacgtggtggagtgaagaacaatgagctcgaatcagtagtatctatctatagcaggtaagcaatgaatgcattacgccgctggactagagtttttacaagatcggactcggtttaataagcggtgcacaaggcctttggcggcagctgcaggtcggcggcgttgctctccagcatctcaaggacttggcccatggacggccgactgtcc

SEQ ID NO: 39398 - DNA, 1880 bp, Zea Mays
tccgtctagacgccggcactccgcagctggttcattccgtcgcggccgggtcggcggtccccagttctcctccgcttcttcctccacgctcccgtccccgccgcgcgaggaacttcccacttccaggcccagcttgtctggttaggattagggtcgtcgcttcgcacgtgtccggtgtgccgccgtcggagatgtcgcggacgctggtgcagccggtggggcagaaacacctcaccagcgtggccgcgcacctatcggccgcgagctaaacgaggatcctaaccttaaccctgggcagactgatactctactcctggatgacaatactaaactacttcggcaacaacattcccatcaacggatctatgtctggctgtcatcgcgaagatcatcctcgtcatcggtgccccagtgggccctttaacatcctaggcctggccaacgacccctaccaaactgccatcctcaaggtgaaggagatcaagaacggccgactgaccatgttctccatgttcgccttcttcatctaagcctatgtcaccgacgaaggcccccgtgtagaacctcgccaagcagaaggttcttcttgagggtgttgagacgtacaacaagttgcaaaacgaccatattacagcaaaagaacgactttagtaagtttgatccatttatatattatgagttagcttcgatcgacaaaattgtgtgcttatatttgcaggtaagagcatggtactaatatggcatgttgtgtttagtggaaacctccctatcttgaggtttcttcttgatcatggtgatgatctccatgaagaaggcagcctggaaggtcatgacaggttcaccgttctacatatagctacagagaaagatataatgacttccttctgaccgtgaggaggaaggatgcccgatcagtgaaggtcaagaggatcaaggatgttgttaaattcaaggctgtaaaagttattaagaagcccacagagcacttacccataaagcgggcaccacttagggcgcggttcactgcaccaaaacccaattttccaggtcttatgggtaagatcggcgaatggaatgctattgtcattttcaaaggatgaattgagcactactcagccttctattgtaagtctactggttcttgttctctgtggttattcctacatcacatgatggttgtgaattggtaattttcgtatggaatttgtactcggtgttccctttttcacttgagcaattccaggggaaaaaatataggaaaacaatgtcatatagtgggtaaaaggttgttgtgagtgtgtgttgagggtgaatggtgggggtggggggcagcgcacacaatgtcagagggagtgtaaaaggttttgggtatcatctttgttctgtatcacgtagcttagaggcttgggtgcctactcaaatgtgtgggggaaaaaatcatggtctccagtttgtgtgggaggtatctctgcctgatcgtaggaagaataggtggataatgttttatttactcgtgtaaggagcggttgaaggatgtgcaagggagggtcgaggtgctgtctgtctcagcgcacacagaacatctctactgaaagccagcgcaagcagcatagaaggtcacaaaaagagtgcaaaagatagacccacgaggtcatctttgaaagaacaaaggacgtggtggagtgaagaacaatgagctcgaatcagtagtatctatctatagcaggtaagcaatgaatgcattacgccgctggactagagtttttacaagatcggactcggtttaataagcggtgcacaaggcctttggcggcagctgcaggtcggcggcgttgctctccagcatctcaaggacttggcccatggacggccgactgtcc

SEQ ID NO: 39399 - DNA, 3129 bp, Zea Mays
cgatttttttggaagtgaaccgacctcgcgctagggttactcgcgcacgctccatccgtcaaccacaagagccccacgcgctggccttgcctctgcccctcgccctcgcctcgcctccaggatcttgtcctcccccatctcctcgggccaaggaatcgttctcatccggcgacctacctccgttacgtctcaggtcttgttctgtatcacaagcaaagcaaaggatcggaggctactccattcggcagcaagctgactctgaagtctgaacgttggagtagaacaaggtgcttgttcaaaattgttagttgcatggagatgggaatgactcctgaagtaatgtatggacaaaatgttttcgttcctgctactgcaaatccctaccaatatggctatacagaagttggatcaccaatggaatggtatagtcacccgaactcttcaggatatgctagccaagatattttctattcggctgaaggcatgcaatgcgtatactatgcagccccagacaatggatctatgcatcctacctacattccttatccttcagatccttctttcgtacccgatggctcatttatgcctcaggagtatgttgctgaccctgctaactccacatgccaaataggcccgtcatcctattacattccagctgttcttccttatgcacaagatagtgtcccgggaagcgcaaccacacctctttactcctccaatgttgcatttcttcctggcataccaggttatgctgcaacatctgcaaatgcagcatttcctttaattgctcccgtcaccacaaaaagtgacatcgttgtgcatccacctgtacagtctactattgtacctttgaagcagttgcaggaccatgcaaaaccgccaaaagttcaactgcacaattcggttccacagaagcaagagttgccagatagattgtatttgtgattaattcttacatataggagggattattgacttccttggaccactataagattctcgtcttttcgggtatcagcacatttgtctggaaacaattgccttggatgtgctgctggatctgatcttcataagtgggctgccgccgagaaattccagccatcttcaaagtcaagtggtcatctaaatggtactggccaaaaggtgcatagcttagttgattctgagaaaccaagcaatcagagctttgccatgattgtgaaatctcacacattaaggctccctgtcggtaatccggatgggacaatcattataagaaccgaccagtacaacagagatgatctccgagttgactatatgtatgcaaagttctttgttatcaagtcaattggtgaggcagatgtgcacaaatcgataaagtatggtgtatggtcaagttcctccaatggaaacatcaagctagatagcgcattcagggatgctgacaggatatcaaggaggcattctactaagtgtccagtattcttgttcttctctgtgaatgggagtgggcacttctgtggcatggctgagatggttggtcctgttgattttcacaaggacatggacttctggtgtcaggataaatggaccggctgctttcctgtgagatggcacattgttaaagatataccgaatggttttttgcagcatatcacactgcagaataatgaaaacaagcctgtgacgcacagcagagatacacaggaaataccatacctccctggaatatctgtgatcaagatcttcaaagacatcaaagtgagggactgcctgtttgatgattttatgagatatgaggcagaagaggcgcaaatgaagccgcacagaagatgcaagctgagttacgatgctccagattttgtacctgtctcccagcgcactgagcagacgaagtccagcagtgtgctggtagacagaacatctgagatacaaaatgtgtctgagaagccgcatgatgctaaggtgatcaatcctcaggagccgcgtgcctctgataagcaggcgagtgaggctgagaaagagaatgaactacaggaaagtcattgcagcggcagtcagaaccaagaggatgcagcgaaaactgcaaccaaccatccaccaggtccaagcttgaaggcggcaggtgcggatgggaaacagcagtactggaagaaggtcgaaaatccaaagcagcatgcagacagcggtgctgcccagggctcactgaaagcacctgaaaagcggctaaatggagtcagcggctctgcgagcacagttccagttccagagggtggcgagcagcagagggtcactgccaaacttgggtctctcaagataagctccaaggcagtggaggctgaccgtaagactagcacagctggtatggagaagcagctaaatggagtcagtggctctgggagcgcagttcctgagggtggcgaggagcagaaggtcaaaatcagttccaaggtagtggaggctgaccggaagacgagcaaagctggtgtggtgacaatcggctcgatgccggtccgggttgacagttatgccgtctagtggccagcgggggggagcttttgtttttatcttttttgcccttctggggtaatctttggtgccccggcttttcatcttcctttctggtagaagaatgcttgtcctggttggtggttctttcctagcttctatatggtatcaaaaaaagaaaaaaaaaagagacgacgaatagttagattcttttttcgttgggggtgaaaagctagttttgcaggcaggcagcattctcatggtggtggtttcgtttgtggaaaagagagaagatactataatatgtgttcgttttcatgacattctattaagaaagaaaaagggaggagattagtaacctgggctcgggtgtgaattcttgcttgttctatctccccttgttttctttgtgttgtggcaggatcaggatcttatatgagcgttgctacaaaaggtggcttattttataatattattaaactctgatgtggcgtgcaagagagcattgttcaaagtaggatcggagtacgagtagtgtggtgttttggacattcagtagtgaattcggtcgtcctctctgaaggctgaaggagtgctatacttttcctatattattaattattaattcttgtttttgtaata

SEQ ID NO: 39400 - DNA, 3016 bp, Zea Mays
ttactcgcgcacgctccatccgtcaaccacaagagccccacgcgctggccttgcctctgcccctcgccctcgcctcgcctccaggatcttgtcctcccccatctcctcgggccaaggaatcgttctcatccggcgacctacctccgttacgtctcaggtcttgttctgtatcacaagcaaagcaaaggatcggaggctactccattcggcagcaagctgactctgaagtctgaacgttggagtagaacaaggtgcttgttcaaaattgttagttgcatggagatgggaatgactcctgaagtaatgtatggacaaaatgttttcgttcctgctactgcaaatccctaccaatatggctatacagaagttggatcaccaatggaatggtatagtcacccgaactcttcaggatatgctagccaagatattttctattcggctgaaggcatgcaatgcgtatactatgcagccccagacaatggatctatgcatcctacctacattccttatccttcagatccttctttcgtacccgatggctcatttatgcctcaggagtatgttgctgaccctgctaactccacatgccaaataggcccgtcatcctattacattccagctgttcttccttatgcacaagatagtgtcccgggaagcgcaaccacacctctttactcctccaatgttgcatttcttcctggcataccaggttatgctgcaacatctgcaaatgcagcatttcctttaattgctcccgtcaccacaaaaagtgacatcgttgtgcatccacctgtacagtctactattgtacctttgaagcagttgcaggaccatgcaaaaccgccaaaagttcaactgcacaattcggttccacagaagcaagagttgccagatagatgtatcagcacatttgtctggaaacaattgccttggatgtgctgctggatctgatcttcataagtgggctgccgccgagaaattccagccatcttcaaagtcaagtggtcatctaaatggtactggccaaaaggtgcatagcttagttgattctgagaaaccaagcaatcagagctttgccatgattgtgaaatctcacacattaaggctccctgtcggtaatccggatgggacaatcattataagaaccgaccagtacaacagagatgatctccgagttgactatatgtatgcaaagttctttgttatcaagtcaattggtgaggcagatgtgcacaaatcgataaagtatggtgtatggtcaagttcctccaatggaaacatcaagctagatagcgcattcagggatgctgacaggatatcaaggaggcattctactaagtgtccagtattcttgttcttctctgtgaatgggagtgggcacttctgtggcatggctgagatggttggtcctgttgattttcacaaggacatggacttctggtgtcaggataaatggaccggctgctttcctgtgagatggcacattgttaaagatataccgaatggttttttgcagcatatcacactgcagaataatgaaaacaagcctgtgacgcacagcagagatacacaggaaataccatacctccctggaatatctgtgatcaagatcttcaaagacatcaaagtgagggactgcctgtttgatgattttatgagatatgaggcagaagaggcgcaaatgaagccgcacagaagatgcaagctgagttacgatgctccagattttgtacctgtctcccagcgcactgagcagacgaagtccagcagtgtgctggtagacagaacatctgagatacaaaatgtgtctgagaagccgcatgatgctaaggtgatcaatcctcaggagccgcgtgcctctgataagcaggcgagtgaggctgagaaagagaatgaactacaggaaagtcattgcagcggcagtcagaaccaagaggatgcagcgaaaactgcaaccaaccatccaccaggtccaagcttgaaggcggcaggtgcggatgggaaacagcagtactggaagaaggtcgaaaatccaaagcagcatgcagacagcggtgctgcccagggctcactgaaagcacctgaaaagcggctaaatggagtcagcggctctgcgagcacagttccagttccagagggtggcgagcagcagagggtcactgccaaacttgggtctctcaagataagctccaaggcagtggaggctgaccgtaagactagcacagctggtatggagaagcagctaaatggagtcagtggctctgggagcgcagttcctgagggtggcgaggagcagaaggtcaaaatcagttccaaggtagtggaggctgaccggaagacgagcaaagctggtgtggtgacaatcggctcgatgccggtccgggttgacagttatgccgtctagtggccagcgggggggagcttttgtttttatcttttttgcccttctggggtaatctttggtgccccggcttttcatcttcctttctggtagaagaatgcttgtcctggttggtggttctttcctagcttctatatggtatcaaaaaaagaaaaaaaaaagagacgacgaatagttagattcttttttcgttgggggtgaaaagctagttttgcaggcaggcagcattctcatggtggtggtttcgtttgtggaaaagagagaagatactataatatgtgttcgttttcatgacattctattaagaaagaaaaagggaggagattagtaacctgggctcgggtgtgaattcttgcttgttctatctccccttgttttctttgtgttgtggcaggatcaggatcttatatgagcgttgctacaaaaggtggcttattttataatattattaaactctgatgtggcgtgcaagagagcattgttcaaagtaggatcggagtacgagtagtgtggtgttttggacattcagtagtgaattcggtcgtcctctctgaaggctgaaggagtgctatacttttcctatattattaattattaattcttgtttttgtaata

SEQ ID NO: 39401 - DNA, 3081 bp, Zea Mays
cgtacagatatatacctatgtgttacaataaaaatgaaacatgataggttgtcatagcagatgttcgcagcagatgatataaataagagatttataccgtgataaataaaaaaatatagagaatattatttgtagaatgaagtttaaaatataggatgaaatagttataggaccgtaatccatctgtgggacatcgcatgctgggaccgcgggtgtgggatagggacggatgacaaagcaagagcagaaaaaagaactttcaccatcctccctatcaatacaagattcatctacacaaattataatatactccgtgcgaaggaaagatcaaattagagattcattcgatcaattctgattgtttccttccattccaaaccaccttcaattctgatttctgcgggtgtgggatatcgtccccccttgccattccaaatcctcctctgcaattttctcatggcagctgacgtttccatcccaactcgatccgcgtcaaccgcccgctaattcctcctagttctagtcccctctctcctgcgccgactcatctttttcctcgtgtcactcccctgctgctgctgctgccgggaagatcaaatcccgtcaaaaggctccaaaggatcagagttctgtcaagatggcatgcccaagaggaaggacaccatttcccctttgtttctttctgatgatttgcctcatggctcagctgggagcttccaatgttgtactcatggcgaacaacactaccttgtcgttggatgatgtcgaggcaacttttagtgggtgttacacattattacactatctccatgtatctctgtacatgtcaattaaaaatctggttagctgttgtttttatcaaacacaaaagtaggttgcatgccattatattaagaagatgaaaaacagtataagaaacccggtcattaaacacactctccagtacattgttagttacctgttgatgttatgatctgttttctttaataccaagttgccctgtttttagtgattattgaatgacaggtcttcatctttttttgcgctgttagttagatgtctcctccagtttcttcttatatagttgcatcattcttgtatctttatgatccataatgtgcaatgttactttggtgcctgaaccaatctatctggttaatgcaaggcttatctgacccttttcattcttcctgcagctccagcagtggaaggttcaggtgtaagtggcgttctttatgctgtggaacctaaggatgcatgcagtccattgagagcgaaagcgattcaaggctctgtctcaccttttgcgttgattataagaggcggttgccaatttgatgacaaaattagaaatgcacagaatgctggattcaaggctgctgtagtatataataatgaagataatgacatccttgtttcaatggctggaagctcgcttggtgtccagatatatgcagtgttcatctctaaggcatcaggggaggagctgaagaaatattcaggccaaactgatgcagagttatggataataccaacatatgagaactcagcttggccaatcatggcaatttcattcgtatcactgcttgctatgtctgctatcctagttgcatgtttctttgcgaggagacaccagatcagacgggacagggcaagacttccccgagctcaggagtcccatggaatgagcagtcaattagttaaggcaataccaagccttattttcacaaaagtgcaagaagacaactgtacatcagcaacatgcgccatttgcttggaagactacagtgttggagaaaagataagagtgctaccttgtcgacacaagttccatgcggcttgtgtggacctatggctcacctcatggagaacattctgccctgtatgcaagcgggacgcaagtgctggaacgtcagacccccctgtatcagagtctacccctttgctttcatcatccgccacacgcttgccggaatcaactgtgttggcttccttgcggtctacagcagcagcgtctccccccaggacgatcagccggcatcctttgttgcggtcaatatcccgcaattactctgtttcaggttccagtatccttcgcacccccgactctaggtttgatgcaaactcatctatctgcacaagtggaagcaacttggaccttgcaaatgtaccatccccatggtctggcacttggcaccgtgcgtctgctcactctttgtgcaggggctacttgtccccaccgatcggcatcaggaatacctcagcacatgtctcgcgttctgccaatggatctcccagtcgttacgtaggctcatcacgcatgtcccatggatcttcagggcagcagcatcctcacctgaggcactgcacattgtcaggcccgagcctgttcaccatggtgccccagtcaccgcaacagaaccagttgcagcatggtggatactcggaaacaaatctgtcggctgccgcatcggctcaatcattccgtcagctctacctgcagcattgccctgattctgacacgtcgtctcagtcacttccagggtgctgatctcttgctgcaatattcactgattcttgcgcccatgagaaatcttgcctggtgctgaattgacatgtggattttgagctcgtcagcatagttcaccatgatgataaaaaaaagagaaagaagtttggagtagttttacatgtggaaacaaaactgcttgtaagaagagagaatgtgcagccccagagtgtgagcaattttacatgcttgagtgtacaggggtttggagtagtcttggacttgcttattttgaggcatgtattgcagtcataggttacttctgctcaatagtttatgtgttgcctctgtctggtttctcaagcgtttagcttttaccgatactagaaaaggaggcgcgcttcgcggcgccctacctccattagtcaaatgcaataacaaactttatttagtacgattcaaagtagacatttgctatttcgtttggccgctaataagtgcatgcgaattatgaaggtgctaacaatcaccagcttattaacaatgtctcaagtgccggtcagcagttgaat

SEQ ID NO: 39402 - DNA, 2684 bp, Zea Mays
cgtacagatatatacctatgtgttacaataaaaatgaaacatgataggttgtcatagcagatgttcgcagcagatgatataaataagagatttataccgtgataaataaaaaaatatagagaatattatttgtagaatgaagtttaaaatataggatgaaatagttataggaccgtaatccatctgtgggacatcgcatgctgggaccgcgggtgtgggatagggacggatgacaaagcaagagcagaaaaaagaactttcaccatcctccctatcaatacaagattcatctacacaaattataatatactccgtgcgaaggaaagatcaaattagagattcattcgatcaattctgattgtttccttccattccaaaccaccttcaattctgatttctgcgggtgtgggatatcgtccccccttgccattccaaatcctcctctgcaattttctcatggcagctgacgtttccatcccaactcgatccgcgtcaaccgcccgctaattcctcctagttctagtcccctctctcctgcgccgactcatctttttcctcgtgtcactcccctgctgctgctgctgccgggaagatcaaatcccgtcaaaagtaccttctgttcgattgcaggctccaaaggatcagagttctgtcaagatggcatgcccaagaggaaggacaccatttcccctttgtttctttctgatgatttgcctcatggctcagctgggagcttccaatgttgtactcatggcgaacaacactaccttgtcgttggatgatgtcgaggcaacttttactccagcagtggaaggttcaggtgtaagtggcgttctttatgctgtggaacctaaggatgcatgcagtccattgagagcgaaagcgattcaaggctctgtctcaccttttgcgttgattataagaggcggttgccaatttgatgacaaaattagaaatgcacagaatgctggattcaaggctgctgtagtatataataatgaagataatgacatccttgtttcaatggctggaagctcgcttggtgtccagatatatgcagtgttcatctctaaggcatcaggggaggagctgaagaaatattcaggccaaactgatgcagagttatggataataccaacatatgagaactcagcttggccaatcatggcaatttcattcgtatcactgcttgctatgtctgctatcctagttgcatgtttctttgcgaggagacaccagatcagacgggacagggcaagacttccccgagctcaggagtcccatggaatgagcagtcaattagttaaggcaataccaagccttattttcacaaaagtgcaagaagacaactgtacatcagcaacatgcgccatttgcttggaagactacagtgttggagaaaagataagagtgctaccttgtcgacacaagttccatgcggcttgtgtggacctatggctcacctcatggagaacattctgccctgtatgcaagcgggacgcaagtgctggaacgtcagacccccctgtatcagagtctacccctttgctttcatcatccgccacacgcttgccggaatcaactgtgttggcttccttgcggtctacagcagcagcgtctccccccaggacgatcagccggcatcctttgttgcggtcaatatcccgcaattactctgtttcaggttccagtatccttcgcacccccgactctaggtttgatgcaaactcatctatctgcacaagtggaagcaacttggaccttgcaaatgtaccatccccatggtctggcacttggcaccgtgcgtctgctcactctttgtgcaggggctacttgtccccaccgatcggcatcaggaatacctcagcacatgtctcgcgttctgccaatggatctcccagtcgttacgtaggctcatcacgcatgtcccatggatcttcagggcagcagcatcctcacctgaggcactgcacattgtcaggcccgagcctgttcaccatggtgccccagtcaccgcaacagaaccagttgcagcatggtggatactcggaaacaaatctgtcggctgccgcatcggctcaatcattccgtcagctctacctgcagcattgccctgattctgacacgtcgtctcagtcacttccagggtgctgatctcttgctgcaatattcactgattcttgcgcccatgagaaatcttgcctggtgctgaattgacatgtggattttgagctcgtcagcatagttcaccatgatgataaaaaaaagagaaagaagtttggagtagttttacatgtggaaacaaaactgcttgtaagaagagagaatgtgcagccccagagtgtgagcaattttacatgcttgagtgtacaggggtttggagtagtcttggacttgcttattttgaggcatgtattgcagtcataggttacttctgctcaatagtttatgtgttgcctctgtctggtttctcaagcgtttagcttttaccgatactagaaaaggaggcgcgcttcgcggcgccctacctccattagtcaaatgcaataacaaactttatttagtacgattcaaagtagacatttgctatttcgtttggccgctaataagtgcatgcgaattatgaaggtgctaacaatcaccagcttattaacaatgtctcaagtgccggtcagcagttgaat

SEQ ID NO: 39403 - DNA, 3304 bp, Zea Mays
cgtacagatatatacctatgtgttacaataaaaatgaaacatgataggttgtcatagcagatgttcgcagcagatgatataaataagagatttataccgtgataaataaaaaaatatagagaatattatttgtagaatgaagtttaaaatataggatgaaatagttataggaccgtaatccatctgtgggacatcgcatgctgggaccgcgggtgtgggatagggacggatgacaaagcaagagcagaaaaaagaactttcaccatcctccctatcaatacaagattcatctacacaaattataatatactccgtgcgaaggaaagatcaaattagagattcattcgatcaattctgattgtttccttccattccaaaccaccttcaattctgatttctgcgggtgtgggatatcgtccccccttgccattccaaatcctcctctgcaattttctcatggcagctgacgtttccatcccaactcgatccgcgtcaaccgcccgctaattcctcctagttctagtcccctctctcctgcgccgactcatctttttcctcgtgtcactcccctgctgctgctgctgccgggaagatcaaatcccgtcaaaaggccaatgcactttccgtacccctggagacgactctggatttcgggccatggaagtgctcttttcccatgactgggggaaagaaatccctccttttttgaaagcaggctgtgaaaagaaacgaaatcactttgacctgtgatttggttactctaggcctctctaccatttactctgctacctgagtgatgatgcaactgcgcagactgttcgtgttgctgtgaagctccaaaggatcagagttctgtcaagatggcatgcccaagaggaaggacaccatttcccctttgtttctttctgatgatttgcctcatggctcagctgggagcttccaatgttgtactcatggcgaacaacactaccttgtcgttggatgatgtcgaggcaacttttagtgggtgttacacattattacactatctccatgtatctctgtacatgtcaattaaaaatctggttagctgttgtttttatcaaacacaaaagtaggttgcatgccattatattaagaagatgaaaaacagtataagaaacccggtcattaaacacactctccagtacattgttagttacctgttgatgttatgatctgttttctttaataccaagttgccctgtttttagtgattattgaatgacaggtcttcatctttttttgcgctgttagttagatgtctcctccagtttcttcttatatagttgcatcattcttgtatctttatgatccataatgtgcaatgttactttggtgcctgaaccaatctatctggttaatgcaaggcttatctgacccttttcattcttcctgcagctccagcagtggaaggttcaggtgtaagtggcgttctttatgctgtggaacctaaggatgcatgcagtccattgagagcgaaagcgattcaaggctctgtctcaccttttgcgttgattataagaggcggttgccaatttgatgacaaaattagaaatgcacagaatgctggattcaaggctgctgtagtatataataatgaagataatgacatccttgtttcaatggctggaagctcgcttggtgtccagatatatgcagtgttcatctctaaggcatcaggggaggagctgaagaaatattcaggccaaactgatgcagagttatggataataccaacatatgagaactcagcttggccaatcatggcaatttcattcgtatcactgcttgctatgtctgctatcctagttgcatgtttctttgcgaggagacaccagatcagacgggacagggcaagacttccccgagctcaggagtcccatggaatgagcagtcaattagttaaggcaataccaagccttattttcacaaaagtgcaagaagacaactgtacatcagcaacatgcgccatttgcttggaagactacagtgttggagaaaagataagagtgctaccttgtcgacacaagttccatgcggcttgtgtggacctatggctcacctcatggagaacattctgccctgtatgcaagcgggacgcaagtgctggaacgtcagacccccctgtatcagagtctacccctttgctttcatcatccgccacacgcttgccggaatcaactgtgttggcttccttgcggtctacagcagcagcgtctccccccaggacgatcagccggcatcctttgttgcggtcaatatcccgcaattactctgtttcaggttccagtatccttcgcacccccgactctaggtttgatgcaaactcatctatctgcacaagtggaagcaacttggaccttgcaaatgtaccatccccatggtctggcacttggcaccgtgcgtctgctcactctttgtgcaggggctacttgtccccaccgatcggcatcaggaatacctcagcacatgtctcgcgttctgccaatggatctcccagtcgttacgtaggctcatcacgcatgtcccatggatcttcagggcagcagcatcctcacctgaggcactgcacattgtcaggcccgagcctgttcaccatggtgccccagtcaccgcaacagaaccagttgcagcatggtggatactcggaaacaaatctgtcggctgccgcatcggctcaatcattccgtcagctctacctgcagcattgccctgattctgacacgtcgtctcagtcacttccagggtgctgatctcttgctgcaatattcactgattcttgcgcccatgagaaatcttgcctggtgctgaattgacatgtggattttgagctcgtcagcatagttcaccatgatgataaaaaaaagagaaagaagtttggagtagttttacatgtggaaacaaaactgcttgtaagaagagagaatgtgcagccccagagtgtgagcaattttacatgcttgagtgtacaggggtttggagtagtcttggacttgcttattttgaggcatgtattgcagtcataggttacttctgctcaatagtttatgtgttgcctctgtctggtttctcaagcgtttagcttttaccgatactagaaaaggaggcgcgcttcgcggcgccctacctccattagtcaaatgcaataacaaactttatttagtacgattcaaagtagacatttgctatttcgtttggccgctaataagtgcatgcgaattatgaaggtgctaacaatcaccagcttattaacaatgtctcaagtgccggtcagcagttgaat

SEQ ID NO: 39404 - DNA, 3328 bp, Zea Mays
cgtacagatatatacctatgtgttacaataaaaatgaaacatgataggttgtcatagcagatgttcgcagcagatgatataaataagagatttataccgtgataaataaaaaaatatagagaatattatttgtagaatgaagtttaaaatataggatgaaatagttataggaccgtaatccatctgtgggacatcgcatgctgggaccgcgggtgtgggatagggacggatgacaaagcaagagcagaaaaaagaactttcaccatcctccctatcaatacaagattcatctacacaaattataatatactccgtgcgaaggaaagatcaaattagagattcattcgatcaattctgattgtttccttccattccaaaccaccttcaattctgatttctgcgggtgtgggatatcgtccccccttgccattccaaatcctcctctgcaattttctcatggcagctgacgtttccatcccaactcgatccgcgtcaaccgcccgctaattcctcctagttctagtcccctctctcctgcgccgactcatctttttcctcgtgtcactcccctgctgctgctgctgccgggaagatcaaatcccgtcaaaaggctccaaaggatcagagttctgtcaagatggcatgcccaagaggaaggacaccatttcccctttgtttctttctgatgatttgcctcatggctcagctgggagcttccaatgttgtactcatggcgaacaacactaccttgtcgttggatgatgtcgaggcaacttttagtgggtgttacacattattacactatctccatgtatctctgtacatgtcaattaaaaatctggttagctgttgtttttatcaaacacaaaagtaggttgcatgccattatattaagaagatgaaaaacagtataagaaacccggtcattaaacacactctccagtacattgttagttacctgttgatgttatgatctgttttctttaataccaagttgccctgtttttagtgattattgaatgacaggtcttcatctttttttgcgctgttagttagatgtctcctccagtttcttcttatatagttgcatcattcttgtatctttatgatccataatgtgcaatgttactttggtgcctgaaccaatctatctggttaatgcaaggcttatctgacccttttcattcttcctgcagctccagcagtggaaggttcaggtgtaagtggcgttctttatgctgtggaacctaaggatgcatgcagtccattgagagcgaaagcgattcaaggctctgtctcaccttttgcgttgattataagaggcggttgccaatttgatgacaaaattagaaatgcacagaatgctggattcaaggctgctgtagtatataataatgaagataatgacatccttgtttcaagtaatgatctaggcatcatttttttaccatagcatcggttacatgtaattcttttatcagtgtgcataaagaggtgttcttgttcataatgctggaaatcactaaactgttgagaagaggaaaaacaaaattttcaagcagctctaaactattagatcagttccattgaaacttttacttaccattttagagtgcttgggggagtgcatatatatttgcaatattaattaagcaaggattattgcagtggctggaagctcgcttggtgtccagatatatgcagtgttcatctctaaggcatcaggggaggagctgaagaaatattcaggccaaactgatgcagagttatggataataccaacatatgagaactcagcttggccaatcatggcaatttcattcgtatcactgcttgctatgtctgctatcctagttgcatgtttctttgcgaggagacaccagatcagacgggacagggcaagacttccccgagctcaggagtcccatggaatgagcagtcaattagttaaggcaataccaagccttattttcacaaaagtgcaagaagacaactgtacatcagcaacatgcgccatttgcttggaagactacagtgttggagaaaagataagagtgctaccttgtcgacacaagttccatgcggcttgtgtggacctatggctcacctcatggagaacattctgccctgtatgcaagcgggacgcaagtgctggaacgtcagacccccctgtatcagagtctacccctttgctttcatcatccgccacacgcttgccggaatcaactgtgttggcttccttgcggtctacagcagcagcgtctccccccaggacgatcagccggcatcctttgttgcggtcaatatcccgcaattactctgtttcaggttccagtatccttcgcacccccgactctaggtttgatgcaaactcatctatctgcacaagtggaagcaacttggaccttgcaaatgtaccatccccatggtctggcacttggcaccgtgcgtctgctcactctttgtgcaggggctacttgtccccaccgatcggcatcaggaatacctcagcacatgtctcgcgttctgccaatggatctcccagtcgttacgtaggctcatcacgcatgtcccatggatcttcagggcagcagcatcctcacctgaggcactgcacattgtcaggcccgagcctgttcaccatggtgccccagtcaccgcaacagaaccagttgcagcatggtggatactcggaaacaaatctgtcggctgccgcatcggctcaatcattccgtcagctctacctgcagcattgccctgattctgacacgtcgtctcagtcacttccagggtgctgatctcttgctgcaatattcactgattcttgcgcccatgagaaatcttgcctggtgctgaattgacatgtggattttgagctcgtcagcatagttcaccatgatgataaaaaaaagagaaagaagtttggagtagttttacatgtggaaacaaaactgcttgtaagaagagagaatgtgcagccccagagtgtgagcaattttacatgcttgagtgtacaggggtttggagtagtcttggacttgcttattttgaggcatgtattgcagtcataggttacttctgctcaatagtttatgtgttgcctctgtctggtttctcaagcgtttagcttttaccgatactagaaaaggaggcgcgcttcgcggcgccctacctccattagtcaaatgcaataacaaactttatttagtacgattcaaagtagacatttgctatttcgtttggccgctaataagtgcatgcgaattatgaaggtgctaacaatcaccagcttattaacaatgtctcaagtgccggtcagcagttgaat

SEQ ID NO: 39405 - DNA, 2383 bp, Zea Mays
gtcttttgtcctcctcggtgcattcgttctgacgcaatcttctcgcaaagatttggcttgttaatcgtgataacttcgtggagatgccgtctgtacccgatttgatgccaatgcactttccgtacccctggagacgactctggatttcgggccatggaagtgctcttttcccatgactgggggaaagaaatccctccttttttgaaagcaggctgtgaaaagaaacgaaatcactttgacctgtgatttggttactctaggcctctctaccatttactctgctacctgagtgatgatgcaactgcgcagactgttcgtgttgctgtgaagctccaaaggatcagagttctgtcaagatggcatgcccaagaggaaggacaccatttcccctttgtttctttctgatgatttgcctcatggctcagctgggagcttccaatgttgtactcatggcgaacaacactaccttgtcgttggatgatgtcgaggcaacttttactccagcagtggaaggttcaggtgtaagtggcgttctttatgctgtggaacctaaggatgcatgcagtccattgagagcgaaagcgattcaaggctctgtctcaccttttgcgttgattataagaggcggttgccaatttgatgacaaaattagaaatgcacagaatgctggattcaaggctgctgtagtatataataatgaagataatgacatccttgtttcaatggctggaagctcgcttggtgtccagatatatgcagtgttcatctctaaggcatcaggggaggagctgaagaaatattcaggccaaactgatgcagagttatggataataccaacatatgagaactcagcttggccaatcatggcaatttcattcgtatcactgcttgctatgtctgctatcctagttgcatgtttctttgcgaggagacaccagatcagacgggacagggcaagacttccccgagctcaggagtcccatggaatgagcagtcaattagttaaggcaataccaagccttattttcacaaaagtgcaagaagacaactgtacatcagcaacatgcgccatttgcttggaagactacagtgttggagaaaagataagagtgctaccttgtcgacacaagttccatgcggcttgtgtggacctatggctcacctcatggagaacattctgccctgtatgcaagcgggacgcaagtgctggaacgtcagacccccctgtatcagagtctacccctttgctttcatcatccgccacacgcttgccggaatcaactgtgttggcttccttgcggtctacagcagcagcgtctccccccaggacgatcagccggcatcctttgttgcggtcaatatcccgcaattactctgtttcaggttccagtatccttcgcacccccgactctaggtttgatgcaaactcatctatctgcacaagtggaagcaacttggaccttgcaaatgtaccatccccatggtctggcacttggcaccgtgcgtctgctcactctttgtgcaggggctacttgtccccaccgatcggcatcaggaatacctcagcacatgtctcgcgttctgccaatggatctcccagtcgttacgtaggctcatcacgcatgtcccatggatcttcagggcagcagcatcctcacctgaggcactgcacattgtcaggcccgagcctgttcaccatggtgccccagtcaccgcaacagaaccagttgcagcatggtggatactcggaaacaaatctgtcggctgccgcatcggctcaatcattccgtcagctctacctgcagcattgccctgattctgacacgtcgtctcagtcacttccagggtgctgatctcttgctgcaatattcactgattcttgcgcccatgagaaatcttgcctggtgctgaattgacatgtggattttgagctcgtcagcatagttcaccatgatgataaaaaaaagagaaagaagtttggagtagttttacatgtggaaacaaaactgcttgtaagaagagagaatgtgcagccccagagtgtgagcaattttacatgcttgagtgtacaggggtttggagtagtcttggacttgcttattttgaggcatgtattgcagtcataggttacttctgctcaatagtttatgtgttgcctctgtctggtttctcaagcgtttagcttttaccgatactagaaaaggaggcgcgcttcgcggcgccctacctccattagtcaaatgcaataacaaactttatttagtacgattcaaagtagacatttgctatttcgtttggccgctaataagtgcatgcgaattatgaaggtgctaacaatcaccagcttattaacaatgtctcaagtgccggtcagcagttgaat

SEQ ID NO: 39406 - DNA, 1939 bp, Zea Mays
tacacattattacactatctccatgtatctctgtacatgtcaattaaaaatctgctccagcagtggaaggttcaggtgtaagtggcgttctttatgctgtggaacctaaggatgcatgcagtccattgagagcgaaagcgattcaaggctctgtctcaccttttgcgttgattataagaggcggttgccaatttgatgacaaaattagaaatgcacagaatgctggattcaaggctgctgtagtatataataatgaagataatgacatccttgtttcaatggctggaagctcgcttggtgtccagatatatgcagtgttcatctctaaggcatcaggggaggagctgaagaaatattcaggccaaactgatgcagagttatggataataccaacatatgagaactcagcttggccaatcatggcaatttcattcgtatcactgcttgctatgtctgctatcctagttgcatgtttctttgcgaggagacaccagatcagacgggacagggcaagacttccccgagctcaggagtcccatggaatgagcagtcaattagttaaggcaataccaagccttattttcacaaaagtgcaagaagacaactgtacatcagcaacatgcgccatttgcttggaagactacagtgttggagaaaagataagagtgctaccttgtcgacacaagttccatgcggcttgtgtggacctatggctcacctcatggagaacattctgccctgtatgcaagcgggacgcaagtgctggaacgtcagacccccctgtatcagagtctacccctttgctttcatcatccgccacacgcttgccggaatcaactgtgttggcttccttgcggtctacagcagcagcgtctccccccaggacgatcagccggcatcctttgttgcggtcaatatcccgcaattactctgtttcaggttccagtatccttcgcacccccgactctaggtttgatgcaaactcatctatctgcacaagtggaagcaacttggaccttgcaaatgtaccatccccatggtctggcacttggcaccgtgcgtctgctcactctttgtgcaggggctacttgtccccaccgatcggcatcaggaatacctcagcacatgtctcgcgttctgccaatggatctcccagtcgttacgtaggctcatcacgcatgtcccatggatcttcagggcagcagcatcctcacctgaggcactgcacattgtcaggcccgagcctgttcaccatggtgccccagtcaccgcaacagaaccagttgcagcatggtggatactcggaaacaaatctgtcggctgccgcatcggctcaatcattccgtcagctctacctgcagcattgccctgattctgacacgtcgtctcagtcacttccagggtgctgatctcttgctgcaatattcactgattcttgcgcccatgagaaatcttgcctggtgctgaattgacatgtggattttgagctcgtcagcatagttcaccatgatgataaaaaaaagagaaagaagtttggagtagttttacatgtggaaacaaaactgcttgtaagaagagagaatgtgcagccccagagtgtgagcaattttacatgcttgagtgtacaggggtttggagtagtcttggacttgcttattttgaggcatgtattgcagtcataggttacttctgctcaatagtttatgtgttgcctctgtctggtttctcaagcgtttagcttttaccgatactagaaaaggaggcgcgcttcgcggcgccctacctccattagtcaaatgcaataacaaactttatttagtacgattcaaagtagacatttgctatttcgtttggccgctaataagtgcatgcgaattatgaaggtgctaacaatcaccagcttattaacaatgtctcaagtgccggtcagcagttgaat

SEQ ID NO: 39407 - DNA, 5836 bp, Zea Mays
gcggcgaccatgagcaagaggagagggaggagcgttcctcacctgccgtccgtcgtcttccttgctcgccttcgcttccctcctcttctctttcctagactagactagacttggcttgccttggattctcatctcgtctcttctttcttctcgctccaatcggcgcggacgtagcccccgcgcacgctaccgcctaccggagagattccgccgcccgttgggtggattccagcgccgttgagcaacaggactctagcgccgcaccggacaccaaccactagacgctgctgcctccctccgccgtctcggggcaccgaaggaggagcagagagatccatcggaccgctcggcggggtgcggccgccctcgctcctcatccaaattatccaatccactcgattccgattggcaactacccttcaccccgcgcgcgcaaccgctagctcctgccgccaagcgcaaccggacgaccgccgccctccctacgccaggaggtgcccaggtgtaggtccttcgccggcgacgaacacccacaagagcaaccgcaagggcatgtgacaagctgccgcctgcctttgccgcaggcaatgtgctccgacatgtcgggtcagcgccaccaccacgcaaccagcagggagaatgcaccggaagataatggttaccatcgcactccccatggtgcggatcatctcgagcagagccaggctgcagatacagataataagcatataaatcatctgtccacagatgacaatgttccctccagtgcttcaggccacaaacatggtgctatcagccgccatccatctacatcttctgttgatgatcgctccatcaagtccggtgatgattctgatggggccgagagtaccagtggcagaagcagtaatacagagatctcatttatgaataatgataccatctggataccacctcaagcggcagataaggaggatgaggcccagagttttgctacgagcattgcttatgacgacgacgatgacgattatagtgatggtataaagtggggccagtcaagtttcccatcccctggtaagcagcatgacgccgacactagcaatcatagggaggaacgagaaaaggcaatgctagaagctatgaatggccagctgaaggtacttgtcagtcggtttctcgcatctgctggcattccatcttccaacgaagagggtagcgatagctggcttgatattgtcacctccctgtcatgggaagcagcactacttatcaaacctgatggtagcatgggaaaggaaatggaccctggctcttacatcaaagtcaaatgcgtagcatctggtactcgccggcaaagtgaggtgatcaaggggttagtcttcaagaagaacactgctcataagcacatgccgacaaattgccacaatcctaggcttctacttctcaaaggagttcttgggcattctgatattggtttgtcatcatttagttcaatggatcaggaaaaggacctgttggagagagctattggtaaaatgatggagatatgcagtcccaatgttgttctggtcgagaaaactgtttcacgaaacattcaagaacttcttctgaaagaaggtgtcactctaattctcgatatgaaactcaaccggctacaaagaattgcacgctgtacaggctctcccataatttcgttttcagaagttttggataaaccaaagctgaagcaatgtgactactttcatatcgaaaaatttatcgaggagcacaacaacgccagtgagggtggaaagatgccatctaaaacattaatgttcttggaaggctttccacgtccactcggttgcacgatactgctaaaaggagcaaacagtgaagaattgaagaaagtcaaacaagtaatgcattttacggtctttgcagcatatcacttgatccttgaaacatctttctttgaagatcaaagggtttttctaaatgataaaagtacccccaaagaaatttctgttactgctacagaaggggcatcaccaactgcttatgatgttgctgctcttagtggtgctatccctagctttccttcacatggtgaccctccagcacttagactattccatgccacttctaatagctatgctgatgtgaacaaacctttgacatatccagaaaatggggatgcattcagttcagtatccagcagctctgcaaatgaccttgaacaaggtacaagtatcaggcccaataatgctgagaggttaacatcactagtccaagggccactaagaaaactgttcactgacatgttacgtcaccagaatatttacttacctgttacatcattgcaagaggcaaatgatattagtaaggaagtcagggctgaatcaagtcaagaaactgttattaatggtttccataggccagagatagaagagtctgtggtttcaattgaaaatggagattccataaatgatgcccagaaacaagaaattgctcaagcaataatgccaagaggttcttctgcaaatgataaagatgcagaatcgtctgttatgggagacaatggggcacatagtacaagtatcattatcaaagagaaatatgtcgatgatgatcaagctgatgatgcacttgattctcacagcatactgattttgatgtctagccagtgcccggaaaagcaggttatctgtgagcaaagtcatttaacccgtataaaatactacgggagttttgatgtgtccttgggcagatatttgcaagatattctgcagaatcagaaactgagttgctcctcatgtggagagcctccagagtcgcacatgtactcttacacgcaccgcaatggaaatttgaccgttctagtgaaacatctggtgccccaacaccatttgcctggtgaatctgaaggaaaagtatggatgtggactaggtgctcaagatgtgatcatgaacatggggtatccaaaccaactccaagagtactaatatcagctgaagcgcgtaacctctcgtttgggaaattcctggaactcagtttttcgagccactctgcagcaagaaggttatctatatgtggacatctggtcaacagggattgcttgcgtttttttgggctgggctctaaagttgctatgtttcggtactcatctgttgagatctacactacctgcaaaccacaacctactctccagttcgtcaaccccatcagacaggattggtttgaaggacaaaggaggaatgttcatgctaaaggtatggcgcttttctctggggttgcaagatttctacagaacttgaagaatgaacatcctgatgcaataacgttagcaatccattgtggccttgcattccctgttaaggacttcactgaactagaagagttgttgataaaagaaaaggcccagtttgagagttctgtggacaaggccactgatcaaaatggggtaccaacctcttctgtgcatgaactgttgaatataaattggtactatcaggaccttctacttgagctttacatttgggaccgccgtctacatcaattattctattgtaaatctgtcaaactagaaagtgtttctaattacaagaatcttgctgatactgttgatgggatctgtggtgataaattcggtgttgataagaaaattgatgaatttacatatgatgaaactacggcagctttgggggtagccagtaccacagaacctgcaagtaacaaacttgaccatcaatcaggggatgctgcagcatccttacttgatgaaagccaggaagctgggcactcagaaattccttgcaatggaggtagtaaagctgagaaatcttccattgctcatggtcaaataaaggtagatggcacaacaaaaaccggaaatgatccttgcttcgaaatatccaatgataagaaggtccaggtcaatcttacagtagcagatccaatatctatggaacaggagcgttgtagcactctccaacagttcaaatatccttattgggatgacagggaaaggtggatttggaattcaatttctgagtcacaattggcttacaggaatgacattcaaattggatatttggaaaaattcgaactcattaacaattatttgccacattaccttcctcccttgtttgaacaacatgatgatgcggactctccgcatttcgcggtaggtcctggtggtaatattctgtgcataatggaagatgagatatccagcataatagctcgtgctcttgccatatctgacgaacgccgccatttgatagatttaaaatttgagaatggaatggattactccaagggagagcatgctaaagcaatggagaaatcctatagttttctgtctgaaaattctttcacctcatcaccatggtcatctacagattctgaagcaagcttgtcatctctgtcttcattttcatcattttcatctgatgacttttctggttatgatagctcttctttattgtcctcgatgcatccagaaatgactgtgaacgggaaaataactctgaaaggcaaatattcagtcactgttgtatatgacaatcaattctttgcactccgaaaaaagtgttgcccatccgagcttgcatatattacttccttaagccgctgcaagaagtggaatgctcaaggtggaaagagcaaggcctattttgcaaagacaacagatgacaggttcatcataaagcaaatcaagaaaacagagttcgattcatttattaaatttgcacctgattactttaggcatgtttaccattctctggacactggaagccaaacttgccttgccaagatattaggaatatatcaggttaagcagattagacatggcaaagaggtaaagatcgacttgatggtgatggaaaatcttctctttggccacaatatttcacgaatttatgatctcaaaggtgttactttttcgcgacgcgtcactgactcaaatgatcatgatactgtttacctggaccaaaattatgttgaggacatgggtttttctccaatctatattggtggaagaacaaagcatcttttgcagcgtgcaatatggaatgacacgtctttcctcacttcggtgaatgtcatggactattctctacttgtcggagtggacaaagagaagcatgaacttgtgtttggcatcattgattatctgaggcaatatacttgggacaaacaattggaaacatgggtgaagacttctctggtagtacccaagaatgtttcaccaactgtaatttcccccaaggaatacaaaaaaaggtttaggaagttcatggcaaagtacttcctgtcagttccagacacatggagctctgataattcatctaatccatgcaaatcctttggtcagagcaatcacaagttagcggaagtccacaatggtgatagcctgcttcagcacccaaatgaagctgaggggtgtgtctaatcacgtgcaggacttcctggcattttttaagcctatcccattgttgtttggcttttcactttgtaaaatggtgtacattggaggacctcactgttgatctatccaaaagtttgtgtttttaggcaaattgttggacaagtggggtccacaggacatgtacctatacaaatgttcattgttaatttcacaattattatagtgaaattaagaatttgtatgatcattttttggacctatcacttgtgtgactgaagctgtctattcttcacttatgactaactgtccaagatagacatttcctacctctattgaaattaggtcaatttgagtattatgttgtactgtatacccccagtgtacttgttgggatctggaagcagctccatagattttgtgtttgatggatactgtcccttttc

SEQ ID NO: 39408 - DNA, 5642 bp, Zea Mays
cttccttgctcgccttcgcttccctcctcttctctttcctagactagactagacttggcttgccttggattctcatctcgtctcttctttcttctcgctccaatcggcgcggacgtagcccccgcgcacgctaccgcctaccggagagattccgccgcccgttgggtggattccagcgccgttgagcaacaggactctagcgccgcaccggacaccaaccactagacgctgctgcctccctccgccgtctcggggcaccgaaggaggagcagagagatccatcggaccgctcggcggggtgcggccgccctcgctcctcatccaaattatccaatccactcgattccgattggcaactacccttcaccccgcgcgcgcaaccgctagctcctgccgccaagcgcaaccggacgaccgccgccctccctacgccaggaggtgcccaggtgtaggtccttcgccggcgacgaacacccacaagagcaaccgcaagggcatgtgacaagctgccgcctgcctttgccgcaggcaatgtgctccgacatgtcgggtcagcgccaccaccacgcaaccagggagaatgcaccggaagataatggttaccatcgcactccccatggtgcggatcatctcgagcagagccaggctgcagatacagataataagcatataaatcatctgtccacagatgacaatgttccctccagtgcttcaggccacaaacatggtgctatcagccgccatccatctacatcttctgttgatgatcgctccatcaagtccggtgatgattctgatggggccgagagtaccagtggcagaagcagtaatacagagatctcatttatgaataatgataccatctggataccacctcaagcggcagataaggaggatgaggcccagagttttgctacgagcattgcttatgacgacgacgatgacgattatagtgatggtataaagtggggccagtcaagtttcccatcccctggtaagcagcatgacgccgacactagcaatcatagggaggaacgagaaaaggcaatgctagaagctatgaatggccagctgaaggtacttgtcagtcggtttctcgcatctgctggcattccatcttccaacgaagagggtagcgatagctggcttgatattgtcacctccctgtcatgggaagcagcactacttatcaaacctgatggtagcatgggaaaggaaatggaccctggctcttacatcaaagtcaaatgcgtagcatctggtactcgccggcaaagtgaggtgatcaaggggttagtcttcaagaagaacactgctcataagcacatgccgacaaattgccacaatcctaggcttctacttctcaaaggagttcttgggcattctgatattggtttgtcatcatttagttcaatggatcaggaaaaggacctgttggagagagctattggtaaaatgatggagatatgcagtcccaatgttgttctggtcgagaaaactgtttcacgaaacattcaagaacttcttctgaaagaagaagttttggataaaccaaagctgaagcaatgtgactactttcatatcgaaaaatttatcgaggagcacaacaacgccagtgagggtggaaagatgccatctaaaacattaatgttcttggaaggctttccacgtccactcggttgcacgatactgctaaaaggagcaaacagtgaagaattgaagaaagtcaaacaagtaatgcattttacggtctttgcagcatatcacttgatccttgaaacatctttctttgaagatcaaagggtttttctaaatgataaaagtacccccaaagaaatttctgttactgctacagaaggggcatcaccaactgcttatgatgttgctgctcttagtggtgctatccctagctttccttcacatggtgaccctccagcacttagactattccatgccacttctaatagctatgctgatgtgaacaaacctttgacatatccagaaaatggggatgcattcagttcagtatccagcagctctgcaaatgaccttgaacaaggtacaagtatcaggcccaataatgctgagaggttaacatcactagtccaagggccactaagaaaactgttcactgacatgttacgtcaccagaatatttacttacctgttacatcattgcaagaggcaaatgatattagtaaggaagtcagggctgaatcaagtcaagaaactgttattaatggtttccataggccagagatagaagagtctgtggtttcaattgaaaatggagattccataaatgatgcccagaaacaagaaattgctcaagcaataatgccaagaggttcttctgcaaatgataaagatgcagaatcgtctgttatgggagacaatggggcacatagtacaagtatcattatcaaagagaaatatgtcgatgatgatcaagctgatgatgcacttgattctcacagcatactgattttgatgtctagccagtgcccggaaaagcaggttatctgtgagcaaagtcatttaacccgtataaaatactacgggagttttgatgtgtccttgggcagatatttgcaagatattctgcagaatcagaaactgagttgctcctcatgtggagagcctccagagtcgcacatgtactcttacacgcaccgcaatggaaatttgaccgttctagtgaaacatctggtgccccaacaccatttgcctggtgaatctgaaggaaaagtatggatgtggactaggtgctcaagatgtgatcatgaacatggggtatccaaaccaactccaagagtactaatatcagctgaagcgcgtaacctctcgtttgggaaattcctggaactcagtttttcgagccactctgcagcaagaaggctgggctctaaagttgctatgtttcggtactcatctgttgagatctacactacctgcaaaccacaacctactctccagttcgtcaaccccatcagacaggattggtttgaaggacaaaggaggaatgttcatgctaaaggtatggcgcttttctctggggttgcaagatttctacagaacttgaagaatgaacatcctgatgcaataacgttagcaatccattgtggccttgcattccctgttaaggacttcactgaactagaagagttgttgataaaagaaaaggcccagtttgagagttctgtggacaaggccactgatcaaaatggggtaccaacctcttctgtgcatgaactgttgaatataaattggtactatcaggaccttctacttgagctttacatttgggaccgccgtctacatcaattattctattgtaaatctgtcaaactagaaagtgtttctaattacaagaatcttgctgatactgttgatgggatctgtggtgataaattcggtgttgataagaaaattgatgaatttacatatgatgaaactacggcagctttgggggtagccagtaccacagaacctgcaagtaacaaacttgaccatcaatcaggggatgctgcagcatccttacttgatgaaagccaggaagctgggcactcagaaattccttgcaatggaggtagtaaagctgagaaatcttccattgctcatggtcaaataaaggtagatggcacaacaaaaaccggaaatgatccttgcttcgaaatatccaatgataagaaggtccaggtcaatcttacagtagcagatccaatatctatggaacaggagcgttgtagcactctccaacagttcaaatatccttattgggatgacagggaaaggtggatttggaattcaatttctgagtcacaattggcttacaggaatgacattcaaattggatatttggaaaaattcgaactcattaacaattatttgccacattaccttcctcccttgtttgaacaacatgatgatgcggactctccgcatttcgcggtaggtcctggtggtaatattctgtgcataatggaagatgagatatccagcataatagctcgtgctcttgccatatctgacgaacgccgccatttgatagatttaaaatttgagaatggaatggattactccaagggagagcatgctaaagcaatggagaaatcctatagttttctgtctgaaaattctttcacctcatcaccatggtcatctacagattctgaagcaagcttgtcatctctgtcttcattttcatcattttcatctgatgacttttctggttatgatagctcttctttattgtcctcgatgcatccagaaatgactgtgaacgggaaaataactctgaaaggcaaatattcagtcactgttgtatatgacaatcaattctttgcactccgaaaaaagtgttgcccatccgagcttgcatatattacttccttaagccgctgcaagaagtggaatgctcaaggtggaaagagcaaggcctattttgcaaagacaacagatgacaggttcatcataaagcaaatcaagaaaacagagttcgattcatttattaaatttgcacctgattactttaggcatgtttaccattctctggacactggaagccaaacttgccttgccaagatattaggaatatatcaggttaagcagattagacatggcaaagaggtaaagatcgacttgatggtgatggaaaatcttctctttggccacaatatttcacgaatttatgatctcaaaggtgttactttttcgcgacgcgtcactgactcaaatgatcatgatactgtttacctggaccaaaattatgttgaggacatgggtttttctccaatctatattggtggaagaacaaagcatcttttgcagcgtgcaatatggaatgacacgtctttcctcacttcggtgaatgtcatggactattctctacttgtcggagtggacaaagagaagcatgaacttgtgtttggcatcattgattatctgaggcaatatacttgggacaaacaattggaaacatgggtgaagacttctctggtagtacccaagaatgtttcaccaactgtaatttcccccaaggaatacaaaaaaaggtttaggaagttcatggcaaagtacttcctgtcagttccagacacatggagctctgataattcatctaatccatgcaaatcctttggtcagagcaatcacaagttagcggaagtccacaatggtgatagcctgcttcagcacccaaatgaagctgaggggtgtgtctaatcacgtgcaggacttcctggcattttttaagcctatcccattgttgtttggcttttcactttgtaaaatggtgtacattggaggacctcactgttgatctatccaaaagtttgtgtttttaggcaaattgttggacaagtggggtccacaggacatgtacctatacaaatgttcattgttaatttcacaattattatagtgaaattaagaatttgtatgatcattttttggacctatcacttgtgtgactgaagctgtctattcttcacttatgactaactgtccaagatagacatttcctacctctattgaaattaggtcaatttgagtattatgttgtactgtatacccccagtgtacttgttgggatctggaagcagctccatagattttgtgtttgatggatactgtcccttttc

SEQ ID NO: 39409 - DNA, 5642 bp, Zea Mays
ccttgctcgccttcgcttccctcctcttctctttcctagactagactagacttggcttgccttggattctcatctcgtctcttctttcttctcgctccaatcggcgcggacgtagcccccgcgcacgctaccgcctaccggagagattccgccgcccgttgggtggattccagcgccgttgagcaacaggactctagcgccgcaccggacaccaaccactagacgctgctgcctccctccgccgtctcggggcaccgaaggaggagcagagagatccatcggaccgctcggcggggtgcggccgccctcgctcctcatccaaattatccaatccactcgattccgattggcaactacccttcaccccgcgcgcgcaaccgctagctcctgccgccaagcgcaaccggacgaccgccgccctccctacgccaggaggtgcccaggtgtaggtccttcgccggcgacgaacacccacaagagcaaccgcaagggcatgtgacaagctgccgcctgcctttgccgcaggcaatgtgctccgacatgtcgggtcagcgccaccaccacgcaaccagcagggagaatgcaccggaagataatggttaccatcgcactccccatggtgcggatcatctcgagcagagccaggctgcagatacagataataagcatataaatcatctgtccacagatgacaatgttccctccagtgcttcaggccacaaacatggtgctatcagccgccatccatctacatcttctgttgatgatcgctccatcaagtccggtgatgattctgatggggccgagagtaccagtggcagaagcagtaatacagagatctcatttatgaataatgataccatctggataccacctcaagcggcagataaggaggatgaggcccagagttttgctacgagcattgcttatgacgacgacgatgacgattatagtgatggtataaagtggggccagtcaagtttcccatcccctggtaagcagcatgacgccgacactagcaatcatagggaggaacgagaaaaggcaatgctagaagctatgaatggccagctgaaggtacttgtcagtcggtttctcgcatctgctggcattccatcttccaacgaagagggtagcgatagctggcttgatattgtcacctccctgtcatgggaagcagcactacttatcaaacctgatggtagcatgggaaaggaaatggaccctggctcttacatcaaagtcaaatgcgtagcatctggtactcgccggcaaagtgaggtgatcaaggggttagtcttcaagaagaacactgctcataagcacatgccgacaaattgccacaatcctaggcttctacttctcaaaggagttcttgggcattctgatattggtttgtcatcatttagttcaatggatcaggaaaaggacctgttggagagagctattggtaaaatgatggagatatgcagtcccaatgttgttctggtcgagaaaactgtttcacgaaacattcaagaacttcttctgaaagaaggtgtcactctaattctcgatatgaaactcaaccggctacaaagaattgcacgctgtacaggctctcccataatttcgttttcagaagttttggataaaccaaagctgaagcaatgtgactactttcatatcgaaaaatttatcgaggagcacaacaacgccagtgagggtggaaagatgccatctaaaacattaatgttcttggaaggctttccacgtccactcggttgcacgatactgctaaaaggagcaaacagtgaagaattgaagaaagtcaaacaagtaatgcattttacggtctttgcagcatatcacttgatccttgaaacatctttctttgaagatcaaagggtttttctaaatgataaaagtacccccaaagaaatttctgttactgctacagaaggggcatcaccaactgcttatgatgttgctgctcttagtggtgctatccctagctttccttcacatggtgaccctccagcacttagactattccatgccacttctaatagctatgctgatgtgaacaaacctttgacatatccagaaaatggggatgcattcagttcagtatccagcagctctgcaaatgaccttgaacaaggtacaagtatcaggcccaataatgctgagaggttaacatcactagtccaagggccactaagaaaactgttcactgacatgttacgtcaccagaatatttacttacctgttacatcattgcaagaggcaaatgatattagtaaggaagtcagggctgaatcaagtcaagaaactgttattaatggtttccataggccagagatagaagagtctgtggtttcaattgaaaatggagattccataaatgatgcccagaaacaagaaattgctcaagcaataatgccaagaggttcttctgcaaatgataaagatgcagaatcgtctgttatgggagacaatggggcacatagtacaagtatcattatcaaagagaaatatgtcgatgatgatcaagctgatgatgcacttgattctcacagcatactgattttgatgtctagccagtgcccggaaaagcaggttatctgtgagcaaagtcatttaacccgtataaaatactacgggagttttgatgtgtccttgggcagatatttgcaagatattctgcagaatcagaaactgagttgctcctcatgtggagagcctccagagtcgcacatgtactcttacacgcaccgcaatggaaatttgaccgttctagtgaaacatctggtgccccaacaccatttgcctggtgaatctgaaggaaaagtatggatgtggactaggtgctcaagatgtgatcatgaacatggggtatccaaaccaactccaagagtactaatatcagctgaagcgcgtaacctctcgtttgggaaattcctggaactcagtttttcgagccactctgcagcaagaaggctgggctctaaagttgctatgtttcggtactcatctgttgagatctacactacctgcaaaccacaacctactctccagttcgtcaaccccatcagacaggattggtttgaaggacaaaggaggaatgttcatgctaaaggtatggcgcttttctctggggttgcaagatttctacagaacttgaagaatgaacatcctgatgcaataacgttagcaatccattgtggccttgcattccctgttaaggacttcactgaactagaagagttgttgataaaagaaaaggcccagtttgaggaccttctacttgagctttacatttgggaccgccgtctacatcaattattctattgtaaatctgtcaaactagaaagtgtttctaattacaagaatcttgctgatactgttgatgggatctgtggtgataaattcggtgttgataagaaaattgatgaatttacatatgatgaaactacggcagctttgggggtagccagtaccacagaacctgcaagtaacaaacttgaccatcaatcaggggatgctgcagcatccttacttgatgaaagccaggaagctgggcactcagaaattccttgcaatggaggtagtaaagctgagaaatcttccattgctcatggtcaaataaaggtagatggcacaacaaaaaccggaaatgatccttgcttcgaaatatccaatgataagaaggtccaggtcaatcttacagtagcagatccaatatctatggaacaggagcgttgtagcactctccaacagttcaaatatccttattgggatgacagggaaaggtggatttggaattcaatttctgagtcacaattggcttacaggaatgacattcaaattggatatttggaaaaattcgaactcattaacaattatttgccacattaccttcctcccttgtttgaacaacatgatgatgcggactctccgcatttcgcggtaggtcctggtggtaatattctgtgcataatggaagatgagatatccagcataatagctcgtgctcttgccatatctgacgaacgccgccatttgatagatttaaaatttgagaatggaatggattactccaagggagagcatgctaaagcaatggagaaatcctatagttttctgtctgaaaattctttcacctcatcaccatggtcatctacagattctgaagcaagcttgtcatctctgtcttcattttcatcattttcatctgatgacttttctggttatgatagctcttctttattgtcctcgatgcatccagaaatgactgtgaacgggaaaataactctgaaaggcaaatattcagtcactgttgtatatgacaatcaattctttgcactccgaaaaaagtgttgcccatccgagcttgcatatattacttccttaagccgctgcaagaagtggaatgctcaaggtggaaagagcaaggcctattttgcaaagacaacagatgacaggttcatcataaagcaaatcaagaaaacagagttcgattcatttattaaatttgcacctgattactttaggcatgtttaccattctctggacactggaagccaaacttgccttgccaagatattaggaatatatcaggttaagcagattagacatggcaaagaggtaaagatcgacttgatggtgatggaaaatcttctctttggccacaatatttcacgaatttatgatctcaaaggtgttactttttcgcgacgcgtcactgactcaaatgatcatgatactgtttacctggaccaaaattatgttgaggacatgggtttttctccaatctatattggtggaagaacaaagcatcttttgcagcgtgcaatatggaatgacacgtctttcctcacttcggtgaatgtcatggactattctctacttgtcggagtggacaaagagaagcatgaacttgtgtttggcatcattgattatctgaggcaatatacttgggacaaacaattggaaacatgggtgaagacttctctggtagtacccaagaatgtttcaccaactgtaatttcccccaaggaatacaaaaaaaggtttaggaagttcatggcaaagtacttcctgtcagttccagacacatggagctctgataattcatctaatccatgcaaatcctttggtcagagcaatcacaagttagcggaagtccacaatggtgatagcctgcttcagcacccaaatgaagctgaggggtgtgtctaatcacgtgcaggacttcctggcattttttaagcctatcccattgttgtttggcttttcactttgtaaaatggtgtacattggaggacctcactgttgatctatccaaaagtttgtgtttttaggcaaattgttggacaagtggggtccacaggacatgtacctatacaaatgttcattgttaatttcacaattattatagtgaaattaagaatttgtatgatcattttttggacctatcacttgtgtgactgaagctgtctattcttcacttatgactaactgtccaagatagacatttcctacctctattgaaattaggtcaatttgagtattatgttgtactgtatacccccagtgtacttgttgggatctggaagcagctccatagattttgtgtttgatggatactgtcccttttc

SEQ ID NO: 39410 - DNA, 5116 bp, Zea Mays
cttgaatctaagtcaaattattcactgaccgacaccctatacgctgcagggagaatgcaccggaagataatggttaccatcgcactccccatggtgcggatcatctcgagcagagccaggctgcagatacagataataagcatataaatcatctgtccacagatgacaatgttccctccagtgcttcaggccacaaacatggtgctatcagccgccatccatctacatcttctgttgatgatcgctccatcaagtccggtgatgattctgatggggccgagagtaccagtggcagaagcagtaatacagagatctcatttatgaataatgataccatctggataccacctcaagcggcagataaggaggatgaggcccagagttttgctacgagcattgcttatgacgacgacgatgacgattatagtgatggtataaagtggggccagtcaagtttcccatcccctggtaagcagcatgacgccgacactagcaatcatagggaggaacgagaaaaggcaatgctagaagctatgaatggccagctgaaggtacttgtcagtcggtttctcgcatctgctggcattccatcttccaacgaagagggtagcgatagctggcttgatattgtcacctccctgtcatgggaagcagcactacttatcaaacctgatggtagcatgggaaaggaaatggaccctggctcttacatcaaagtcaaatgcgtagcatctggtactcgccggcaaagtgaggtgatcaaggggttagtcttcaagaagaacactgctcataagcacatgccgacaaattgccacaatcctaggcttctacttctcaaaggagttcttgggcattctgatattggtttgtcatcatttagttcaatggatcaggaaaaggacctgttggagagagctattggtaaaatgatggagatatgcagtcccaatgttgttctggtcgagaaaactgtttcacgaaacattcaagaacttcttctgaaagaagaagttttggataaaccaaagctgaagcaatgtgactactttcatatcgaaaaatttatcgaggagcacaacaacgccagtgagggtggaaagatgccatctaaaacattaatgttcttggaaggctttccacgtccactcggttgcacgatactgctaaaaggagcaaacagtgaagaattgaagaaagtcaaacaagtaatgcattttacggtctttgcagcatatcacttgatccttgaaacatctttctttgaagatcaaagggtttttctaaatgataaaagtacccccaaagaaatttctgttactgctacagaaggggcatcaccaactgcttatgatgttgctgctcttagtggtgctatccctagctttccttcacatggtgaccctccagcacttagactattccatgccacttctaatagctatgctgatgtgaacaaacctttgacatatccagaaaatggggatgcattcagttcagtatccagcagctctgcaaatgaccttgaacaaggtacaagtatcaggcccaataatgctgagaggttaacatcactagtccaagggccactaagaaaactgttcactgacatgttacgtcaccagaatatttacttacctgttacatcattgcaagaggcaaatgatattagtaaggaagtcagggctgaatcaagtcaagaaactgttattaatggtttccataggccagagatagaagagtctgtggtttcaattgaaaatggagattccataaatgatgcccagaaacaagaaattgctcaagcaataatgccaagaggttcttctgcaaatgataaagatgcagaatcgtctgttatgggagacaatggggcacatagtacaagtatcattatcaaagagaaatatgtcgatgatgatcaagctgatgatgcacttgattctcacagcatactgattttgatgtctagccagtgcccggaaaagcaggttatctgtgagcaaagtcatttaacccgtataaaatactacgggagttttgatgtgtccttgggcagatatttgcaagatattctgcagaatcagaaactgagttgctcctcatgtggagagcctccagagtcgcacatgtactcttacacgcaccgcaatggaaatttgaccgttctagtgaaacatctggtgccccaacaccatttgcctggtgaatctgaaggaaaagtatggatgtggactaggtgctcaagatgtgatcatgaacatggggtatccaaaccaactccaagagtactaatatcagctgaagcgcgtaacctctcgtttgggaaattcctggaactcagtttttcgagccactctgcagcaagaaggctgggctctaaagttgctatgtttcggtactcatctgttgagatctacactacctgcaaaccacaacctactctccagttcgtcaaccccatcagacaggattggtttgaaggacaaaggaggaatgttcatgctaaaggtatggcgcttttctctggggttgcaagatttctacagaacttgaagaatgaacatcctgatgcaataacgttagcaatccattgtggccttgcattccctgttaaggacttcactgaactagaagagttgttgataaaagaaaaggcccagtttgagagttctgtggacaaggccactgatcaaaatggggtaccaacctcttctgtgcatgaactgttgaatataaattggtactatcaggaccttctacttgagctttacatttgggaccgccgtctacatcaattattctattgtaaatctgtcaaactagaaagtgtttctaattacaagaatcttgctgatactgttgatgggatctgtggtgataaattcggtgttgataagaaaattgatgaatttacatatgatgaaactacggcagctttgggggtagccagtaccacagaacctgcaagtaacaaacttgaccatcaatcaggggatgctgcagcatccttacttgatgaaagccaggaagctgggcactcagaaattccttgcaatggaggtagtaaagctgagaaatcttccattgctcatggtcaaataaaggtagatggcacaacaaaaaccggaaatgatccttgcttcgaaatatccaatgataagaaggtccaggtcaatcttacagtagcagatccaatatctatggaacaggagcgttgtagcactctccaacagttcaaatatccttattgggatgacagggaaaggtggatttggaattcaatttctgagtcacaattggcttacaggaatgacattcaaattggatatttggaaaaattcgaactcattaacaattatttgccacattaccttcctcccttgtttgaacaacatgatgatgcggactctccgcatttcgcggtaggtcctggtggtaatattctgtgcataatggaagatgagatatccagcataatagctcgtgctcttgccatatctgacgaacgccgccatttgatagatttaaaatttgagaatggaatggattactccaagggagagcatgctaaagcaatggagaaatcctatagttttctgtctgaaaattctttcacctcatcaccatggtcatctacagattctgaagcaagcttgtcatctctgtcttcattttcatcattttcatctgatgacttttctggttatgatagctcttctttattgtcctcgatgcatccagaaatgactgtgaacgggaaaataactctgaaaggcaaatattcagtcactgttgtatatgacaatcaattctttgcactccgaaaaaagtgttgcccatccgagcttgcatatattacttccttaagccgctgcaagaagtggaatgctcaaggtggaaagagcaaggcctattttgcaaagacaacagatgacaggttcatcataaagcaaatcaagaaaacagagttcgattcatttattaaatttgcacctgattactttaggcatgtttaccattctctggacactggaagccaaacttgccttgccaagatattaggaatatatcaggttaagcagattagacatggcaaagaggtaaagatcgacttgatggtgatggaaaatcttctctttggccacaatatttcacgaatttatgatctcaaaggtgttactttttcgcgacgcgtcactgactcaaatgatcatgatactgtttacctggaccaaaattatgttgaggacatgggtttttctccaatctatattggtggaagaacaaagcatcttttgcagcgtgcaatatggaatgacacgtctttcctcacttcggtgaatgtcatggactattctctacttgtcggagtggacaaagagaagcatgaacttgtgtttggcatcattgattatctgaggcaatatacttgggacaaacaattggaaacatgggtgaagacttctctggtagtacccaagaatgtttcaccaactgtaatttcccccaaggaatacaaaaaaaggtttaggaagttcatggcaaagtacttcctgtcagttccagacacatggagctctgataattcatctaatccatgcaaatcctttggtcagagcaatcacaagttagcggaagtccacaatggtgatagcctgcttcagcacccaaatgaagctgaggggtgtgtctaatcacgtgcaggacttcctggcattttttaagcctatcccattgttgtttggcttttcactttgtaaaatggtgtacattggaggacctcactgttgatctatccaaaagtttgtgtttttaggcaaattgttggacaagtggggtccacaggacatgtacctatacaaatgttcattgttaatttcacaattattatagtgaaattaagaatttgtatgatcattttttggacctatcacttgtgtgactgaagctgtctattcttcacttatgactaactgtccaagatagacatttcctacctctattgaaattaggtcaatttgagtattatgttgtactgtatacccccagtgtacttgttgggatctggaagcagctccatagattttgtgtttgatggatactgtcccttttc

SEQ ID NO: 39411 - DNA, 1094 bp, Zea Mays
aaaaggttcatcctgtggtgagcaagccataaaagacaccaaatatagtgtgacgcagtctatggagccttggctgatcagcatactatctttccatgccattctgctactggttaccatcatctcgaggaggaatatcaatttccagctcatcttgtcagctctaacattttctggtgtattccttgctgagagattaaatacgttcctggcgcaaaactggaagagcttctctacccaaaactattttgatccccagggccttttcatttcggtcatctggtctggccctctcctcctgataacgatccttattctggtgaacactctcgtgacgctctgcacgctaatggtaaggtggaaaagggcagagctcaggcatcgcgctcggcaagctcgtgacaagcaggactgatctgaaacctgcgtctatgtatcattcggtggcaagtagaaagtcgtgttcttgctacggttggtctaaccaagaatcacatccctggaaacggtgcccatttcattaggtagcagaatataacgttaagatggtcagattttgctcttgtggacccttttggtgcccggatagccatttactacgctgcaatattatcacgtcacgcgatttctttgggcgaggacactaggcctgtgataatgatgtgtccatttgttcgatgctgaacctctgaacctcggaaccggttgatagttgttgttttcctagctgtgtcgggtcgggtgcagcatgctctgattgttgattacctcaagaataattcgttggactgctgaattttagccatctttacagatgttccgatctgaaactgtcgctcgaatttcactgcatctggtgtcggtgtgcaagctattcctgatgtttgtgggcacttgaaaatgttctctggttgtactatggactgaatgatgcatggcatccgttgtcagcttcgtgtgtgaaagggggatgctttcttgttttgccagagttgcaagagaggtacacattcgcaatccgtgtgtttggttgcccgtgtcgcctggtgcatggcccatgggatgcagaaataaaacaaactcattgtttggtt

SEQ ID NO: 39412 - DNA, 991 bp, Zea Mays
tttctggctgtactgtacgacatgccagcgtgaaacgtcatttatcacatttgcacttgaaggaatgtttctggtgtattccttgctgagagattaaatacgttcctggcgcaaaactggaagagcttctctacccaaaactattttgatccccagggccttttcatttcggtcatctggtctggccctctcctcctgataacgatccttattctggtgaacactctcgtgacgctctgcacgctaatggtaaggtggaaaagggcagagctcaggcatcgcgctcggcaagctcgtgacaagcaggactgatctgaaacctgcgtctatgtatcattcggtggcaagtagaaagtcgtgttcttgctacggttggtctaaccaagaatcacatccctggaaacggtgcccatttcattaggtagcagaatataacgttaagatggtcagattttgctcttgtggacccttttggtgcccggatagccatttactacgctgcaatattatcacgtcacgcgatttctttgggcgaggacactaggcctgtgataatgatgtgtccatttgttcgatgctgaacctctgaacctcggaaccggttgatagttgttgttttcctagctgtgtcgggtcgggtgcagcatgctctgattgttgattacctcaagaataattcgttggactgctgaattttagccatctttacagatgttccgatctgaaactgtcgctcgaatttcactgcatctggtgtcggtgtgcaagctattcctgatgtttgtgggcacttgaaaatgttctctggttgtactatggactgaatgatgcatggcatccgttgtcagcttcgtgtgtgaaagggggatgctttcttgttttgccagagttgcaagagaggtacacattcgcaatccgtgtgtttggttgcccgtgtcgcctggtgcatggcccatgggatgcagaaataaaacaaactcattgtttggtt

SEQ ID NO: 39413 - DNA, 7871 bp, Zea Mays
catcgctcgcgcggatgcgaattcggaagcccgccccactttgatgatttttatcccgggcaaattagtttgaacccgacgactaaaatgtttggggcaaaataatccgaatcgcgcatcgtccgagtgaaatcgtgcgcgaggttatgatcccactcattcttcagcacgctgttgtggcgacaaaatcgcgtatatattagcagattttgtttcggctaattttagtcgaattacacagagcaaattaacgaagctaaaatccgtttaattcggtctattgtttcttgtcccgatctaattctttagataaaaattatgggtagaaattaatctgactttggagtagtcatcaaattaaatcaagtgcagtctgtactagttggactagtatcttttgtttcgtccgatttacatcttacgcagacttaatttgagaacaaaattatctgtgtagtcttttgtaacaaaaattgaagaaggaaaattctttttctcgagttgttggccaattgccttatttcctagcagcttcttatccatccaccacattttctctagccttatttttctccttaccgtacagccaatgcccagaacatttctatccctctcgctcgtcatacgcaagccgaatagccgactcatgggatattttcccaggccttaatctgtattggatgccgctcatcagcctactgttctctgaaacgaaaaatctgatttcccttatccttatccgagcggttcctggagaattccccaacccccttggcttatcttctcccacgcgcgcgcacgcagtctcattccgctgatgccttccttagcttcttctctgcgtcggccatcatggagccctggtcttctcctctaactccggtggtcgactctccgttcttctcggttgtccctgtatctctaactcccacaatgtaagttctctttgataaatatcctaggttcacctctccagtagcaagccccatcgtctagatttttttctatttgcccagccatctcctatctgtgcacgtactcaagaagttcactcacgtcagctgatccttatcatcctgtgagcgtgcatgggaagcctcactctgtatattattctaccagccatcctcatctcttcctcactagagcacattattctctggaatatctcaccacgccagctcctgggacgcgcgtccatctactgcgctcggttccctggaaaatcttcaccactcggcctctctgtcacgtattccttcagcctgggatttttcctgacatcgttctcatccgcgcgggtggggtgggaacaaaatttgccgccgttcagggaaaaatctcgccaccgccccctgttctttttatatgcgcacacacggtggtcttcctgctcgcctggctgcgcgtccaggagctcccatcgtggcgcagcttcttcccaagccgcgctccacctccgatggcgcttggccgcccagctctcccgctgtccgcccgcctggcgcccagaccatggccgcggctctcctccagctcgccctcaagccccagcccggatcttcccgttcctggccgcgcccctggtccctgccatggcggccgttccctggtcggagtggatcctcagctcggaggcttcctcgagctcgaccgcccacctccctgctcggtccctgctccagcgcctgttccagctccagtacgccgagttcctcgctgtctgcgccatggagctcgcaccgacgaccgtcagttggtcctcctctagccgcgcgtggtgcgcgctctccctggctcatgtgcccaacgccgtcggctctagtctctcgctcggggtggttccgtcgtcttcctcaggctcgacacgccggtccgacagccgccatcccctgcttggtcatggtacctagccgtcgcgcccctggctcggctctgctcgcccctgtgctgtcgctcagctcgctgtggagcttgtccaccatggtactctgcattctgctgcgctccagaccatcggatcctgcgctcaccccggccgcgacctcgtcgtcgttcctcagctcgcgggtgccgttgtttcgtgtgcttggccatcagcgttcaacggccgtcacgacatccccagtctatcgcgtcatgctccggtcgtcgatcggctgaccgtcgtcgtcgtgttctctgcttccctcgtcggtcaacctcgccgcggctaagtccatccgccgtgctatgtgctgtggtctctggtcgagggacatcaatactctatgtcccttgctcacctccctggtcgtgctcgccgggacactattctctagccaactaccgtcggtggaagccctgccatcgatatcgcatgatattggttgtcttcttcgaccacgtcattgcctcacaggatttggacaccttgtcgacactcgaccacgtgttcgctcgttaccacgccatcttcagcatcatggttctataagactccgcgcactcatcggcacccggctgtcaatctccaccacgcagcgctgcatcggacttaccctgtatgatgttcgacgacaagcccaaaccagaatttatcaatattctcacaagtattgagtcacgtttgaatgctggtacaataattaatcacgtgatgcggaggaaaagagccaagtcgaccccaagcgtgggctaatccgcaggatgatgctgatggacgaaccggaagatggataatctgaacgagtgtcaagccaaaggatgctcgccaagtggtcgcctaacaaacactaacctagtgttactcaggcaagccccggtgcatgcaaccccttcattgtgtttttaaattatttttacacactttaagtctagtgactgtgcattaggttcataggagttgcttggaaaccctttggtgcattgcctaccttgaaatccataccttttatagatacttctggtgaagtatcaaaatatgattttcaaaaaatgcttagccctgcttataagcagatagagtttgtcctttgcacttatgcctagctcaggtttatcctgaggaaggatgatttctacctgcaagaatatttccattgggagcatggtgggatcttactgcaaagttccctataatgctcttttcatcctagggagcacaaacactcctaaggatgaaagtacttaaatcgagacttgggctaggaacaggtgatgctccgtccaggttaattaaggattggatgcgtatgtaggcctgttgatcaaggactatcttaactggccacatgccctggaaatgggacagggtaagcttgaacccggctattccatacgtgaaaagacaaccgcgcactgggcgtgggagatggtgggagtagcgtgtaccctcctggctagaggctggatggaggagtacgatgctcccgggtagcgcagaccggttcacgttgtggaggatctgtgggaacggttgacatatgcaagggttaagtgctacatatgtcgtgtggttagagatcctcagctgagtaaatcgattcggatcgccgttatatccccggagagtggagacttgatctccgacctgcaacctaagtcaggatgtaaacattatgaatataaatgatgttgtattgatgagatggtgaaattagaccagatgcaaacagagtctattaatatttaatctggcgttaaaatattgaaagtaaggactcactttagtaagctatttctgcaaaaatatctaatttgattcttgctaaaacttttccttgattcccaaatccagcatacccttgagagtcttttccttagtcgggtaagacttgctgagtaattccatactcagggttttattccctgttgtttttcaggttctaaccttgtcctgctgtgatggtgttaagtgccggtgggctcggccttcttataagtctaagtaacccttctatacttcttattgaggatggtcatttgagctagcatatatttcaaacttatacttttgtaatcactccgataaaataatataaaatttttgtaacttgtaaaatttggtaataagatttccgctgcaaaaatattggtgtgtgtgatttgtgttacttaatcccgcggttctggttgtaagtggtttatccggtgttcttggggcaatcggacggatcctgttaagttatctggtgcacatgcatggccgtctgaggtctttgagacaaggacaggtgcatgtgggcccgataacttggaggttctgccacagctggtatcggagctggattaagtatatacggtcacatacgtattttcaaaacaaaagttttggttttaaaaacctatttttaactaaacacattgtttggctttgaaaaactgttttgaaaaactataatgctagcgacatcctctgttaagccctatactaaggattatcaggtggcttagttaaaaccactaacccacaaccgggtgggtattgcatacatgtgtaatgttatttttgaggccattcagtcttgaatggatcgacgctcaaggtaaggtgagatgtgagagcatgaccgaacaaccgtcggtctagggaagtgcttaattgtggcgcttgattatatacatgttttacatatgtatatatgaaggctgcgatgtggagtatttacttttctgggaatcagtaccccatggatgtgtatgggtatacagacatgggaatactgagaagtgtgatgtacttgtaacgacgtacctatactcaggtaagaaggtgagttaccataatgggttgccctatggttaaagtgtggcaacggcgcctatgtgtggctcagcgcttaatgatgagctggcctccatatagcgatatatggagtataacctgtgataaactgtcatgcgtgaactgcatcatgggaaaatgggctgtgatggatttttctgcaggtacactaacctcgaaaacgtatgtgtagctgacgactagcaatataccgtgagaatcgtacgtatgccaccgagatagaacgctattgccacagtatgttggcaaaatcagtgaggacgaataggacgagcatgcatcctgattgttgcatcatgtttgtcacctatacactcaaaatgcttctctcatccttattccagtaaccattgattgtaaataatatggtgtcttagctctcaggttgttttaatctgaccattagtgcaaatgtgtttgccctagtgcttgatgtgtcgatagaaggttagtgacttgttttgcctaaacccaaaattaggccatgttcttagttggtgaaccatgacctaaggttgattttcccgttatccctccctgaccaaactcacaaataaatgcttagataatttatttgttggacattaaatgtacccaagctttaaacagagtcatgtctccatcctaaaccatgtccttgttcagttggtgcaagctgatgtaccttatccagtttgcctgtttttatggaccgccatgttactttatcgacctaacttaggaaagacacgtccgaccattttcttaaagtgtgatgcctttggtttcctcttgtctctcgaaggcatacccacttaaccatgtgattgttttcccttcgtatctaatcagatactaatccttgtcctcgtgatctctatgatgggcatagaaatattcttgggctgaagcaacagtctcccatcatactcctttcatcaagtttaggttttggccatatcatgttcatttcatcggtccatgatctttttagctctctacttgtaaccattcttacaggtggagtatctctttgtatattgtcacccttgattactctaatggtgtggcgcgagatttcttattgattacatctggtaatggtgttatgactaaaaccgatggcaccacgatgaaaccgagggcctcctgtgggtgatcagcacatggttgcgctacttggcacgcgctggtatcaccgttagtagtcataatccattatgagactatctcaatatgttatctctgcacaaattgtttttaccacgtgagattcattattggtgccagttttgtaatggtgtcatggttaaggacttatggtaccgcggcgaaactgagagccccttgtgaatgtacacgcaaggttctgctgcttggcgcatgtcgatatcgaagtctctagacatgatctgttatagaattacactggtgtgttatcttccgtggatatcttccttgaaacgatttctattttgtttgtcaagtgatcaagcaacatctatcatctctgttggatcaaaagggcatacccctttcatgtgtggtctattttccttgactttgatggtgacttcacacatacacgttccctttgcatcctttgtgtaaaggtgaagccttggagctttttagtgttggaaaatagctgattagctctcaaaatggagattgactttccctgctgctaatatgcaggagtttgttcattcactctcttattcaatccatgtatttccggaccaagtcatttcatctcatatgaagaaacggatgaacaaccccgatcaaatggatctctacccaaatacatgataaactgttaacaagagtaaactctcgaccattggactgccgatggtactgagaggacttactcaatgtcaaaagtagttcaacaagttggttttactaacttgtagctacattgtgaacaaaggttgagtttagagatcgttttgtcgatttgtctaaactcacttttgtacaacccatcttaaggaagtatttataagaatcgagattaagtcggccagtaaccacccaattatcgctctagtcatgcctcgattgcctcacatgtgtttttccaacacgtgtgactagtcgaagtcacgctagtgcgggatgaaatcggttcatcgtgaagtcaacatttgctgataatcttcactgatgtttcctcgagtctccattagcatcattggacttggattttctggctaacacgagtaactgtgatgttattcgacattcacacccgtctcatgtgctatgaattaaccgtgaccacttgttggtaaacctccttttgtgtgttttacccaagaggttgcatttgactctgtttgggtaatatcgcgtatttaccgctcgcccaatagactcagataatacactgtcatcagaaaaagcaaactacacacatggaaccttatgtgtttttttggcagatattgtctctattagtggatatctctaaattagcctaaggcgatgcatgttatgtccactagagaaaacaacatcctgagacactcatctttgcttgaagctgtcttatgattatcgctgatatggatatgggttacatgctactctactcttaaaagtctttcgctccgaatctcgggacgagattcttttaaggggggagggctgtaacaccactggtgtttatattccgctcgacggcaagtacggatttaaacacgtaatatcagtggataaaatgggtgctaaattttaatcatcttcgcctatcgcgatttttaatatcggattcgtttcgtttgtcgcaagttcgacatcgtttttatctatccgggctcttcctaaattttcgtaatgtttggaaaatcggtgcgtccggtgattatttaaaattcatcgctcgcgcggatgcgaattcggaagcccgccccactttgatgatttttatcccgggcaaattagtttgaacccgacgactaaaatgtttggggcaaaataatccgaatcgcgcatcgtccgagtgaaatcgtgcgcgaggttatgatcccactcattcttcagcacgctgttgtggcgacaaaatcgcgtatatattagcagattttgtttcggc

SEQ ID NO: 39414 - DNA, 2411 bp, Zea Mays
ccgctagctactattcgctaacggctaaccctttctctctgctcgcctcgccattactgttcggactgagctctgcctgctggagcctggactacatcgtgatgatggcggaggtgcctgcgctcctctttaacaatttctcccttcctttccttctttctttctttcttttatgcccgtctccttttcttaatcttttttcccctgacgagcgttcgagcgcgcgaagccctgggcctgcgcgtatcttcctgcagggtttcatttcgtcctcccggcccctccctctctttattagctttcctaatgatttcctctggcctcagctcgagctcgctcgtgcgtgggccaatataatcctccacaaatcccaccccgcctctcatcacggcctcccctcccctgttggtagcgctcgtcatcattccaggcagcaagatcgcatgacacacagctgaagctcggctttggcgcttcttggtgaccgaagcacgcgcagcatccatccgccatggagagtgccggcggacgaccagaggcggcggcggcggcggtgctcaaggtcaagggaagagacgccggaagaagaccgaacggggctcactcgtcttcttcctgcctgcaacaccgacactccagaagaacaacgagcgcgtcgtacgtaaatgctcccgacgtgtcgccgcgactctccgccggtcacatacctgcggccatcagtcgcagtgaggtgctcgacgacacaaggcgttcgctcgacctccctgaccagtttcccgagcatcgcgtcgccgcagccacagagagagctgaaagaagcggttcgaagtctgccgcggacctggcctgggagatagccgtcctggaggagcaagtcgtccgcaaggagctgcacctgctgtccctgtacagagccgcgttcgaccagtacctcggcgtctcccctcgcgcgtctgctcaggaaccgcgccatgagcgcagcagcagaagggctactgctgctgacgacgaaggcgcccttcgcctgaggagcatcaaggagtctgcgtcctacagcctaccaacgctctccgattctaaacgcgtagagctctccaggtgctcctcagggcggtccagcctggccaacttcctgagcgcctcgatcgctgagtacgtgcctaagatctcgtgcaagctctcggaggacatactgcggtgcgtctccgccgtctactgcaagctcgcgagcaggccgctgtcgcaggaggaggaggaggcgaggtccgagacgccgccgttcacgccttctctctcggtctcgtccgcgtcgagctccttctccctcaagaagcagcaccccgtccgtggctggagccctcggtgctactacaacgccgacgcgactgcgaccccggacgcgtacgcttcgtccggcgggagcagtgggcggtacagtggggtgatggttttcccagggatacatgtagacgaggagaagtttgagtatgcctgcaaaatgctggacactatcagatcgctgatcaaacggctggagaagattgatcctagaaagatggcacatgaagagcagctctgtttctgggtcaacatccacaatgccttggttatgcatgctttcatggcctatggattacaggaaaaacggatgaaaagcactgacttgattctgaaggctgcatacaatgtgggtgggcattcagtgaactcccaaactatccagaactcgattctaggatgccagtcccaccgcccttcactgtgggttcggacactatttacgccgacgaaaaaatctgggagctccatacatccatatgcgcttcagtacgcagagccaattgcgcactttgcgctctcgaccggcgcgttttcagacccacctgtgaggctgtacacagccaagaaactgtaccatcagctggagcaagccagggccgagttcatccaagcaaatgtcatggtccggaggcagaccatcttcctgcccaaggttctccacttctatgcgaaggatgcttccctggagctacctgaccttgttgacatagtgtgcgagagcatgcctgagctgcagcgaaaagagatcaggcagtatcttaggaggaggatcgacaagtgtgttcagtggttgccctacaagtcttctttcaggtacactgtgcatagcagtttggctgagtaggcacttttttttcttctctatgtgcttgtaaataaggagccatgattctaagaacagtcgtctgttggggtgtgtgtgtgtatgtaaaactatattgtgacagttctttctttcttagaggaaaattacagcttatcttaaatcctctttgtgctttaccacactactacagatttgcagatttcagttgtaccaactattggaatagtaaaccctaaccctaggg

SEQ ID NO: 39415 - DNA, 2054 bp, Zea Mays
ctgagctctgcctgctggagcctggactacatcgtgatgatggcggagttggtagcgctcgtcatcattccaggcagcaagatcgcatgacacacagctgaagctcggctttggcgcttcttggtgaccgaagcacgcgcagcatccatccgccatggagagtgccggcggacgaccagaggcggcggcggcggcggtgctcaaggtcaagggaagagacgccggaagaagaccgaacggggctcactcgtcttcttcctgcctgcaacaccgacactccagaagaacaacgagcgcgtcgtacgtaaatgctcccgacgtgtcgccgcgactctccgccggtcacatacctgcggccatcagtcgcagtgaggtgctcgacgacacaaggcgttcgctcgacctccctgaccagtttcccgagcatcgcgtcgccgcagccacagagagagctgaaagaagcggttcgaagtctgccgcggacctggcctgggagatagccgtcctggaggagcaagtcgtccgcaaggagctgcacctgctgtccctgtacagagccgcgttcgaccagtacctcggcgtctcccctcgcgcgtctgctcaggaaccgcgccatgagcgcagcagcagaagggctactgctgctgacgacgaaggcgcccttcgcctgaggagcatcaaggagtctgcgtcctacagcctaccaacgctctccgattctaaacgcgtagagctctccaggtgctcctcagggcggtccagcctggccaacttcctgagcgcctcgatcgctgagtacgtgcctaagatctcgtgcaagctctcggaggacatactgcggtgcgtctccgccgtctactgcaagctcgcgagcaggccgctgtcgcaggaggaggaggaggcgaggtccgagacgccgccgttcacgccttctctctcggtctcgtccgcgtcgagctccttctccctcaagaagcagcaccccgtccgtggctggagccctcggtgctactacaacgccgacgcgactgcgaccccggacgcgtacgcttcgtccggcgggagcagtgggcggtacagtggggtgatggttttcccagggatacatgtagacgaggagaagtttgagtatgcctgcaaaatgctggacactatcagatcgctgatcaaacggctggagaagattgatcctagaaagatggcacatgaagagcagctctgtttctgggtcaacatccacaatgccttggttatgcatgctttcatggcctatggattacaggaaaaacggatgaaaagcactgacttgattctgaaggctgcatacaatgtgggtgggcattcagtgaactcccaaactatccagaactcgattctaggatgccagtcccaccgcccttcactgtgggttcggacactatttacgccgacgaaaaaatctgggagctccatacatccatatgcgcttcagtacgcagagccaattgcgcactttgcgctctcgaccggcgcgttttcagacccacctgtgaggctgtacacagccaagaaactgtaccatcagctggagcaagccagggccgagttcatccaagcaaatgtcatggtccggaggcagaccatcttcctgcccaaggttctccacttctatgcgaaggatgcttccctggagctacctgaccttgttgacatagtgtgcgagagcatgcctgagctgcagcgaaaagagatcaggcagtatcttaggaggaggatcgacaagtgtgttcagtggttgccctacaagtcttctttcaggtacactgtgcatagcagtttggctgagtaggcacttttttttcttctctatgtgcttgtaaataaggagccatgattctaagaacagtcgtctgttggggtgtgtgtgtgtatgtaaaactatattgtgacagttctttctttcttagaggaaaattacagcttatcttaaatcctctttgtgctttaccacactactacagatttgcagatttcagttgtaccaactattggaatagtaaaccctaaccctaggg

SEQ ID NO: 39416 - DNA, 3010 bp, Zea Mays
ggactacatcgtgatgatggcggaggtgcctgcgctcctctttaacaatttctcccttcctttccttctttctttctttcttttatgcccgtctccttttcttaatcttttttcccctgacgagcgttcgagcgcgcgaagccctgggcctgcgcgtatcttcctgcagggtttcatttcgtcctcccggcccctccctctctttattagctttcctaatgatttcctctggcctcagctcgagctcgctcgtgcgtgggccaatataatcctccacaaatcccaccccgcctctcatcacggcctcccctcccctggtactatacgcgtgttccgccgcgagctccattagcgcggctagctcccatgctcatcgctttcgctgacctttgagagccatattctgttcctcctcctcctcctcctccttcagttggtagcgctcgtcatcattccaggcagcaagatcgcatgacacacagctgaagctcggctttggcgcttcttggtgaccgaagcacgcgcagcatccatccgccatggagagtgccggcggacgaccagaggcggcggcggcggcggtgctcaaggtcaagggaagagacgccggaagaagaccgaacggggctcactcgtcttcttcctgcctgcaacaccgacactccagaagaacaacgagcgcgtcgtacgtaaatgctcccgacgtgtcgccgcgactctccgccggtcacataccttcgcagtgaggtgctcgacgacacaaggcgttcgctcgacctccctgaccagtttcccgagcatcgcgtcgccgcagccacagagagagctgaaagaagcggttcgaaggttagtgttagctggctcatgatcttggagggccagggcctagctgttttttctttctttccaaaagctgttattagagtgcaggtcttccgacttccgtccatgctttattaccaatcacattcctggctgttatccatctcttgtgccagcacaatgatgctttgtcatatctagggagaagtgagtaaaagccatgagtgatgattatgcttctcttcttcttttccttcttaatgacgtactgccagtacgtacgtgctgttgtcagggaactgtatccgaattccaaattttgaacatgatttagcaagacagacagagagaaagagaatagttgactagttgtaaacttgtaatgtatggatcatgcctttcattcgatggctactgatcttgcttcgagcgcagtctgccgcggacctggcctgggagatagccgtcctggaggagcaagtcgtccgcaaggagctgcacctgctgtccctgtacagagccgcgttcgaccagtacctcggcgtctcccctcgcgcgtctgctcaggaaccgcgccatgagcgcagcagcagaagggctactgctgctgacgacgaaggcgcccttcgcctgaggagcatcaaggagtctgcgtcctacagcctaccaacgctctccgattctaaacgcgtagtatgagcagcgtctcttctctccgaccaatccttccacctttggctctgtttctactaccagctggttcttgagtgttgactgttgacgacagaaaccatctgatctaacacacggctcttggtggtgttctgctgaagcacgcgcaggagctctccaggtgctcctcagggcggtccagcctggccaacttcctgagcgcctcgatcgctgagtacgtgcctaagatctcgtgcaagctctcggaggacatactgcggtgcgtctccgccgtctactgcaagctcgcgagcaggccgctgtcgcaggaggaggaggaggcgaggtccgagacgccgccgttcacgccttctctctcggtctcgtccgcgtcgagctccttctccctcaagaagcagcaccccgtccgtggctggagccctcggtgctactacaacgccgacgcgactgcgaccccggacgcgtacgcttcgtccggcgggagcagtgggcggtacagtggggtgatggttttcccagggatacatgtagacgaggagaagtttgagtatgcctgcaaaatgctggacactatcaggtggtattttgtgacccagtagatcgctgatcaaacggctggagaagattgatcctagaaagatggcacatgaagagcagctctgtttctgggtcaacatccacaatgccttggttatgcatgctttcatggcctatggattacaggaaaaacggatgaaaagcactgacttgattctgaaggctgcatacaatgtgggtgggcattcagtgaactcccaaactatccagaactcgattctaggatgccagtcccaccgcccttcactgtgggttcggacactatttacgccgacgaaaaaatctgggagctccatacatccatatgcgcttcagtacgcagagccaattgcgcactttgcgctctcgaccggcgcgttttcagacccacctgtgaggctgtacacagccaagaaactgtaccatcagctggagcaagccagggccgagttcatccaagcaaatgtcatggtccggaggcagaccatcttcctgcccaaggttctccacttctatgcgaaggatgcttccctggagctacctgaccttgttgacatagtgtgcgagagcatgcctgagctgcagcgaaaagagatcaggcagtatcttaggaggaggatcgacaagtgtgttcagtggttgccctacaagtcttctttcaggtacactgtgcatagcagtttggctgagtaggcacttttttttcttctctatgtgcttgtaaataaggagccatgattctaagaacagtcgtctgttggggtgtgtgtgtgtatgtaaaactatattgtgacagttctttctttcttagaggaaaattacagcttatcttaaatcctctttgtgctttaccacactactacagatttgcagatttcagttgtaccaactattggaatagtaaaccctaaccctaggg

SEQ ID NO: 39417 - DNA, 1898 bp, Zea Mays
gctttattaccaatcacattcctggctgttatccatctcttgtgccagcacaatgatgctttgtcatatctagggagaagtgagtaaaagccatgagtgatgattatgcttctcttcttcttttccttcttaatgacgtactgccagtacgtacgtgctgttgtcagggaactgtatccgaattccaaattttgaacatgatttagcaagacagacagagagaaagagaatagttgactagttgtaaacttgtaatgtatggatcatgcctttcattcgatggctactgatcttgcttcgagcgcagtctgccgcggacctggcctgggagatagccgtcctggaggagcaagtcgtccgcaaggagctgcacctgctgtccctgtacagagccgcgttcgaccagtacctcggcgtctcccctcgcgcgtctgctcaggaaccgcgccatgagcgcagcagcagaagggctactgctgctgacgacgaaggcgcccttcgcctgaggagcatcaaggagtctgcgtcctacagcctaccaacgctctccgattctaaacgcgtacacgcgcaggagctctccaggtgctcctcagggcggtccagcctggccaacttcctgagcgcctcgatcgctgagtacgtgcctaagatctcgtgcaagctctcggaggacatactgcggtgcgtctccgccgtctactgcaagctcgcgagcaggccgctgtcgcaggaggaggaggaggcgaggtccgagacgccgccgttcacgccttctctctcggtctcgtccgcgtcgagctccttctccctcaagaagcagcaccccgtccgtggctggagccctcggtgctactacaacgccgacgcgactgcgaccccggacgcgtacgcttcgtccggcgggagcagtgggcggtacagtggggtgatggttttcccagggatacatgtagacgaggagaagtttgagtatgcctgcaaaatgctggacactatcagatcgctgatcaaacggctggagaagattgatcctagaaagatggcacatgaagagcagctctgtttctgggtcaacatccacaatgccttggttatgcatgctttcatggcctatggattacaggaaaaacggatgaaaagcactgacttgattctgaaggctgcatacaatgtgggtgggcattcagtgaactcccaaactatccagaactcgattctaggatgccagtcccaccgcccttcactgtgggttcggacactatttacgccgacgaaaaaatctgggagctccatacatccatatgcgcttcagtacgcagagccaattgcgcactttgcgctctcgaccggcgcgttttcagacccacctgtgaggctgtacacagccaagaaactgtaccatcagctggagcaagccagggccgagttcatccaagcaaatgtcatggtccggaggcagaccatcttcctgcccaaggttctccacttctatgcgaaggatgcttccctggagctacctgaccttgttgacatagtgtgcgagagcatgcctgagctgcagcgaaaagagatcaggcagtatcttaggaggaggatcgacaagtgtgttcagtggttgccctacaagtcttctttcaggtacactgtgcatagcagtttggctgagtaggcacttttttttcttctctatgtgcttgtaaataaggagccatgattctaagaacagtcgtctgttggggtgtgtgtgtgtatgtaaaactatattgtgacagttctttctttcttagaggaaaattacagcttatcttaaatcctctttgtgctttaccacactactacagatttgcagatttcagttgtaccaactattggaatagtaaaccctaaccctaggg

SEQ ID NO: 39418 - DNA, 2924 bp, Zea Mays
atctaaataagtggtttcagctcgtgagtcagagcccaagccgtttttgaagaaaccagaaccctgccaaagggacccctaatctgatgtgcacctgagttcgaagccggacccctaatctgatgtgcacctgagttcgaagccgaattcacgactgcaattgcaaaaccctagctaccgcttcgccgaattccctgtcctccgcccgcttcgccgaattccctgtcctccgcccgcttcgccgaatttcctctcctccccgcccgccgcccgtcaccgcggcttcgtctgcgcttgtccctcccgttccaaggagcacgtgcttctcgccgcgccgttcgcccgccgccgccgccaccggttcatcgccagctatgtcttctcaggtcgacagccgcagccagtccgccgggaagcgcgcgcgcaccgacggcagccggcgtgaggacgactgggtttgccccagctgcaagaacgttaacttcgcctttcgcaccacttgcaacatgcgcaactgcaaccagtccaggccagcagatcacacggccatgcagaccccgcctcgctatcccacatcaggaggttacatgagcccagggacgccaccgtcgatgtaccttggtggtggtgctcccccatatggctcttcaatgtttaacgggcctgcaatgacgcgctatggtatcacacagttccctgggggttctgcgtatccatatggatatggtggccgcatatcaatggggagcccctacgggccaatgcaaatggctgggccaaccgcatactctggtggatctatgatgggagcaggtggaatgtatggaatgcccatggacaggtatgggctaatacctgctggttctggtccaatgggcacgagagctggctcatattctgatgaagattctcagaagaagtctgcaggagctggccgtgataatgattgggagtgtccaaattgccacaacatcaactttggcttccgcacagtctgtaatatgagaaagtgcaacacacctagacctgaaaaccagggatctaagcctgatggtttaagagggtcaaaaccaaagacaccagagggcagttggaagtgtgagcagtgcaataacataaactatcctttccgaacgaaatgcaatcgtccccaatgtggagcagaaaagccatcacagacgaacaatgcaaatgaatcagcggaagatcaggacaatcaggtctttgtttcagaaccttcactatggtcctcaacattttctacacctttatttagaacattaagttgcatgccttattaatatatcactactatttttaatcatttccttgccctcatgtttgcttgacatagcttaataaattatgtccttactgttacagtgagtcctagaacagtaatgagggtcaagaaggtccagcgtcgtcgtcaaggttcagtctgaatgtggggtacatctgtgtcagtagtcgccgttacaagtttcttccccttgagaacttagttgagtcggggccttggagttggcaatggagtcttgccttccttaatcactgcggataatggtcaagaacatcaatttgttatgtggtttgtcaagaacatccatcttgcctttcctggctgaacttggttacttgtctttgttactggtactctggataaattaccatatgttatatgaatgtcttttatatgtgtcatagaatatcactcatctgttatgaagtatcacaactgtcaccattttgttttggttttgttctggtcattgttttcaatttatggttggtttggtatttttacaggttctttctgaatggttgtgatggcaacctttctttccttccaaagtagttttcttagagatgtttgcaactttccctggtagcaatagttaggtcttaagttgacagctgacatcttggttgcataactgcatatgttactgttatcatcttccatgttgtctggagctttagctgttcaagtatcaccattcagtgttttggttagaagagatgctccttggtgaagtgacgtgcatctcattttgcagtggtagtagactaatcaccctgcatgcttgtctctaatgcaactacttcactgacttggtgccattggacttagttttcgtcatgtaaaattacaaagctttttatcgaagctacgacttctgcgtgagtttcaagacagcagtgagcaggcagatggatcttccttgtcctgctgctggagcactgacacagtgacactgcggattggcagcagtccagtgagtttcaggacagtcttacaaactgatgtggctaccatttcgcatcggaaaacaagcacgaagaaacgggagattttgcgttggaggaggcgtttcctcgcgtgggcctgcagccatggcccacacctaggggtgataatgggctataaattttacactataagattaagatttaagtatcagattaggattgggctttatttctattcattttgaactaaaatttatttagggcacttatccattactatccctacccacacttctttagcggcagctgctgagcgcgagccctcatgctctgctcctgtctgtgtctgtgcaccttgctgagcgcgtctcgcgcaccgcagccatgcctcgcggtatgactgcaggaggtctcactctatcttagggggtgtttggtttgagtaatcatatcatccaggtctcactctatcttaggggatgtttggtttgagtaatcataccatctaagaggtggaatgaggtagtgatggatcaactcatttcattttagccgtgtttggttacaggggaataaatctatcatttaatccatgtatctctcaaagctagctattcttttgatccatggattctaatataaacttgtgcaatatgttcatggatttgttc

SEQ ID NO: 39419 - DNA, 2695 bp, Zea Mays
gggacccctaatctgatgtgcacctgagttcgaagccggacccctaatctgatgtgcacctgagttcgaagccgaattcacgactgcaattgcaaaaccctagctaccgcttcgccgaattccctgtcctccgcccgcttcgccgaattccctgtcctccgcccgcttcgccgaatttcctctcctccccgcccgccgcccgtcaccgcggcttcgtctgcgcttgtccctcccgttccaaggagcacgtgcttctcgccgcgccgttcgcccgccgccgccgccaccggttcatcgccagctatgtcttctcaggtcgacagccgcagccagtccgccgggaagcgcgcgcgcaccgacggcagccggcgtgaggacgactgggtttgccccagctgcaagaacgttaacttcgcctttcgcaccacttgcaacatgcgcaactgcaaccagtccaggccagcagatcacacggccatgcagaccccgcctcgctatcccacatcaggaggttacatgagcccagggacgccaccgtcgatgtaccttggtggtggtgctcccccatatggctcttcaatgtttaacgggcctgcaatgacgcgctatggtatcacacagttccctgggggttctgcgtatccatatggatatggtggccgcatatcaatggggagcccctacgggccaatgcaaatggctgggccaaccgcatactctggtggatctatgatgggagcaggtggaatgtatggaatgcccatggacaggtatgggctaatacctgctggttctggtccaatgggcacgagagctggctcatattctgatgaagattctcagaagaagtctgcaggagctggccgtgataatgattgggagtgtccaaattgccacaacatcaactttggcttccgcacagtctgtaatatgagaaagtgcaacacacctagacctgaaaaccagggatctaagcctgatggtttaagagggtcaaaaccaaagacaccagagggcagttggaagtgtgagcagtgcaataacataaactatcctttccgaacgaaatgcaatcgtccccaatgtggagcagaaaagccatcacagacgaacaatgcaaatgaatcagcggaagatcaggacaatcaggtctttgtttcagaaccttcactatggtcctcaacattttctacacctttatttagaacattaagttgcatgccttattaatatatcactactatttttaatcatttccttgccctcatgtttgcttgacatagcttaataaattatgtccttactgttacagtgagtcctagaacagtaatgagggtcaagaaggtccagcgtcgtcgtcaaggttcagtctgaatgtggggtacatctgtgtcagtagtcgccgttacaagtttcttccccttgagaacttagttgagtcggggccttggagttggcaatggagtcttgccttccttaatcactgcggataatggtcaagaacatcaatttgttatgtgttttcgtcatgtaaaattacaaagctttttatcgaagctacgacttctgcgtgagtttcaagacagcagtgagcaggcagatggatcttccttgtcctgctgctggagcactgacacagtgacactgcggattggcagcagtccagtgagtttcaggacagtcttacaaactgatgtggctaccatttcgcatcggaaaacaaggtgaggaatttgcttatagtgtctcgagcgtcttgagtcttgccagatctgatttggaaattcgatatggtgttgagcattgtgatagtcagagtcaggatcttttaatgtagccatttcagtatttgctcggagtgatgcttgtcttatttttattcttcctttattctttttttcattatgttctgtgtctagcactgttatttctcatcctaccttaatgtaaatttcgtcttctcatttcgcctattttttttttcttgtagcatatccttttcttacaatttgtcattgctcttgagttaatttaaatcaagagtcctcttgttttgtctttttttttatgtttcttgatttgttgctgacggtatggtgttgtccaaagcacgaagaaacgggagattttgcgttggaggaggcgtttcctcgcgtgggcctgcagccatggcccacacctaggggtgataatgggctataaattttacactataagattaagatttaagtatcagattaggattgggctttatttctattcattttgaactaaaatttatttagggcacttatccattactatccctacccacacttctttagcggcagctgctgagcgcgagccctcatgctctgctcctgtctgtgtctgtgcaccttgctgagcgcgtctcgcgcaccgcagccatgcctcgcggtatgactgcaggaggtctcactctatcttagggggtgtttggtttgagtaatcatatcatccaggtctcactctatcttaggggatgtttggtttgagtaatcataccatctaagaggtggaatgaggtagtgatggatcaactcatttcattttagccgtgtttggttacaggggaataaatctatcatttaatccatgtatctctcaaagctagctattcttttgatccatggattctaatataaacttgtgcaatatgttcatggatttgttc

SEQ ID NO: 39420 - DNA, 2782 bp, Zea Mays
tcgaagccggacccctaatctgatgtgcacctgagttcgaagccgaattcacgactgcaattgcaaaaccctagctaccgcttcgccgaattccctgtcctccgcccgcttcgccgaattccctgtcctccgcccgcttcgccgaatttcctctcctccccgcccgccgcccgtcaccgcggcttcgtctgcgcttgtccctcccgttccaaggagcacgtgcttctcgccgcgccgttcgcccgccgccgccgccaccggttcatcgccagctatgtcttctcaggtggaatgtatggaatgcccatggacaggtatgggctaatacctgctggttctggtccaatgggcacgagagctggctcatattctgatgaagattctcagaagaagtctgcaggagctggccgtgataatgattgggagtgtccaaattgccacaacatcaactttggcttccgcacagtctgtaatatgagaaagtgcaacacacctagacctgaaaaccagggatctaagcctgatggtttaagagggtcaaaaccaaagacaccagagggcagttggaagtgtgagcagtgcaataacataaactatcctttccgaacgaaatgcaatcgtccccaatgtggagcagaaaagccatcacagacgaacaatgcaaatgaatcagcggaagatcaggacaatcaggtctttgtttcagaaccttcactatggtcctcaacattttctacacctttatttagaacattaagttgcatgccttattaatatatcactactatttttaatcatttccttgccctcatgtttgcttgacatagcttaataaattatgtccttactgttacagtgagtcctagaacagtaatgagggtcaagaaggtccagcgtcgtcgtcaaggttcagtctgaatgtggggtacatctgtgtcagtagtcgccgttacaagtttcttccccttgagaacttagttgagtcggggccttggagttggcaatggagtcttgccttccttaatcactgcggataatggtcaagaacatcaatttgttatgtggtttgtcaagaacatccatcttgcctttcctggctgaacttggttacttgtctttgttactggtactctggataaattaccatatgttatatgaatgtcttttatatgtgtcatagaatatcactcatctgttatgaagtatcacaactgtcaccattttgttttggttttgttctggtcattgttttcaatttatggttggtttggtatttttacaggttctttctgaatggttgtgatggcaacctttctttccttccaaagtagttttcttagagatgtttgcaactttccctggtagcaatagttaggtcttaagttgacagctgacatcttggttgcataactgcatatgttactgttatcatcttccatgttgtctggagctttagctgttcaagtatcaccattcagtgttttggttagaagagatgctccttggtgaagtgacgtgcatctcattttgcagtggtagtagactaatcaccctgcatgcttgtctctaatgcaactacttcactgacttggtgccattggacttagttttcgtcatgtaaaattacaaagctttttatcgaagctacgacttctgcgtgagtttcaagacagcagtgagcaggcagatggatcttccttgtcctgctgctggagcactgacacagtgacactgcggattggcagcagtccagtgagtttcaggacagtcttacaaactgatgtggctaccatttcgcatcggaaaacaaggtgaggaatttgcttatagtgtctcgagcgtcttgagtcttgccagatctgatttggaaattcgatatggtgttgagcattgtgatagtcagagtcaggatcttttaatgtagccatttcagtatttgctcggagtgatgcttgtcttatttttattcttcctttattctttttttcattatgttctgtgtctagcactgttatttctcatcctaccttaatgtaaatttcgtcttctcatttcgcctattttttttttcttgtagcatatccttttcttacaatttgtcattgctcttgagttaatttaaatcaagagtcctcttgttttgtctttttttttatgtttcttgatttgttgctgacggtatggtgttgtccaaagcacgaagaaacgggagattttgcgttggaggaggcgtttcctcgcgtgggcctgcagccatggcccacacctaggggtgataatgggctataaattttacactataagattaagatttaagtatcagattaggattgggctttatttctattcattttgaactaaaatttatttagggcacttatccattactatccctacccacacttctttagcggcagctgctgagcgcgagccctcatgctctgctcctgtctgtgtctgtgcaccttgctgagcgcgtctcgcgcaccgcagccatgcctcgcggtatgactgcaggaggtctcactctatcttagggggtgtttggtttgagtaatcatatcatccaggtctcactctatcttaggggatgtttggtttgagtaatcataccatctaagaggtggaatgaggtagtgatggatcaactcatttcattttagccgtgtttggttacaggggaataaatctatcatttaatccatgtatctctcaaagctagctattcttttgatccatggattctaatataaacttgtgcaatatgttcatggatttgttc

SEQ ID NO: 39421 - DNA, 3572 bp, Zea Mays
gaagccggacccctaatctgatgtgcacctgagttcgaagccgaattcacgactgcaattgcaaaaccctagctaccgcttcgccgaattccctgtcctccgcccgcttcgccgaattccctgtcctccgcccgcttcgccgaatttcctctcctccccgcccgccgcccgtcaccgcggcttcgtctgcgcttgtccctcccgttccaaggagcacgtgcttctcgccgcgccgttcgcccgccgccgccgccaccggttcatcgccagctatgtcttctcaggtcgacagccgcagccagtccgccgggaagcgcgcgcgcaccgacggcagccggcgtgaggacgactgggtttgccccagctgcaagaacgttaacttcgcctttcgcaccacttgcaacatgcgcaactgcaaccagtccaggccagcagatcacacggccatgcagaccccgcctcgctatcccacatcaggaggttacatgagcccagggacgccaccgtcgatgtaccttggtggtggtgctcccccatatggctcttcaatgtttaacgggcctgcaatgacgcgctatggtatcacacagttccctgggggttctgcgtatccatatggatatggtggccgcatatcaatggggagcccctacgggccaatgcaaatggctgggccaaccgcatactctggtggatctatgatgggagcaggtaggtaactgggcttctggctatgggaggcatgccctatttttatattgcccttgcattaattaatatagctatcaaattaaataggcaaatccggtgctttcggtaacgacttttatgcaaatcatagtgtgttaaactattagttttacataatatgaacaatgcaatttattttcacttgatcttcatttccacaaatgctggcaatagataataccctttgcagtaccattgtgttctgccacatgttttctaagccacttcatttggttgaggctatgacacttgatacatctttttcagtcctatgtttcccacatgtttgttcacaagatttatcttgcttattatccaataaacaggtggaatgtatggaatgcccatggacaggtatgggctaatacctgctggttctggtccaatgggcacgagagctggctcatattctgatgaagattctcagaagaagtctgcaggagctggccgtgataatgattgggagtgtccaaattgccacaacatcaactttggcttccgcacagtctgtaatatgagaaagtgcaacacacctagacctgaaaaccagggatctaagcctgatggtttaagagggtcaaaaccaaagacaccagagggcagttggaagtgtgagcagtgcaataacataaactatcctttccgaacgaaatgcaatcgtccccaatgtggagcagaaaagccatcacagacgaacaatgcaaatgaatcagcggaagatcaggacaatcaggtctttgtttcagaaccttcactatggtcctcaacattttctacacctttatttagaacattaagttgcatgccttattaatatatcactactatttttaatcatttccttgccctcatgtttgcttgacatagcttaataaattatgtccttactgttacagtgagtcctagaacagtaatgagggtcaagaaggtccagcgtcgtcgtcaaggttcagtctgaatgtggggtacatctgtgtcagtagtcgccgttacaagtttcttccccttgagaacttagttgagtcggggccttggagttggcaatggagtcttgccttccttaatcactgcggataatggtcaagaacatcaatttgttatgtggtttgtcaagaacatccatcttgcctttcctggctgaacttggttacttgtctttgttactggtactctggataaattaccatatgttatatgaatgtcttttatatgtgtcatagaatatcactcatctgttatgaagtatcacaactgtcaccattttgttttggttttgttctggtcattgttttcaatttatggttggtttggtatttttacaggttctttctgaatggttgtgatggcaacctttctttccttccaaagtagttttcttagagatgtttgcaactttccctggtagcaatagttaggtcttaagttgacagctgacatcttggttgcataactgcatatgttactgttatcatcttccatgttgtctggagctttagctgttcaagtatcaccattcagtgttttggttagaagagatgctccttggtgaagtgacgtgcatctcattttgcagtggtagtagactaatcaccctgcatgcttgtctctaatgcaactacttcactgacttggtgccattggacttagttttcgtcatgtaaaattacaaagctttttatcgaagctacgacttctgcgtgagtttcaagacagcagtgagcaggcagatggatcttccttgtcctgctgctggagcactgacacagtgacactgcggattggcagcagtccagtgagtttcaggacagtcttacaaactgatgtggctaccatttcgcatcggaaaacaaggtgaggaatttgcttatagtgtctcgagcgtcttgagtcttgccagatctgatttggaaattcgatatggtgttgagcattgtgatagtcagagtcaggatcttttaatgtagccatttcagtatttgctcggagtgatgcttgtcttatttttattcttcctttattctttttttcattatgttctgtgtctagcactgttatttctcatcctaccttaatgtaaatttcgtcttctcatttcgcctattttttttttcttgtagcatatccttttcttacaatttgtcattgctcttgagttaatttaaatcaagagtcctcttgttttgtctttttttttatgtttcttgatttgttgctgacggtatggtgttgtccaaagcacgaagaaacgggagattttgcgttggaggaggcgtttcctcgcgtgggcctgcagccatggcccacacctaggggtgataatgggctataaattttacactataagattaagatttaagtatcagattaggattgggctttatttctattcattttgaactaaaatttatttagggcacttatccattactatccctacccacacttctttagcggcagctgctgagcgcgagccctcatgctctgctcctgtctgtgtctgtgcaccttgctgagcgcgtctcgcgcaccgcagccatgcctcgcggtatgactgcaggaggtctcactctatcttagggggtgtttggtttgagtaatcatatcatccaggtctcactctatcttaggggatgtttggtttgagtaatcataccatctaagaggtggaatgaggtagtgatggatcaactcatttcattttagccgtgtttggttacaggggaataaatctatcatttaatccatgtatctctcaaagctagctattcttttgatccatggattctaatataaacttgtgcaatatgttcatggatttgttc

SEQ ID NO: 39422 - DNA, 2293 bp, Zea Mays
gaagccggacccctaatctgatgtgcacctgagttcgaagccgaattcacgactgcaattgcaaaaccctagctaccgcttcgccgaattccctgtcctccgcccgcttcgccgaattccctgtcctccgcccgcttcgccgaatttcctctcctccccgcccgccgcccgtcaccgcggcttcgtctgcgcttgtccctcccgttccaaggagcacgtgcttctcgccgcgccgttcgcccgccgccgccgccaccggttcatcgccagctatgtcttctcaggtcgacagccgcagccagtccgccgggaagcgcgcgcgcaccgacggcagccggcgtgaggacgactgggtttgccccagctgcaagaacgttaacttcgcctttcgcaccacttgcaacatgcgcaactgcaaccagtccaggccagcagatcacacggccatgcagaccccgcctcgctatcccacatcaggaggttacatgagcccagggacgccaccgtcgatgtaccttggtggtggtgctcccccatatggctcttcaatgtttaacgggcctgcaatgacgcgctatggtatcacacagttccctgggggttctgcgtatccatatggatatggtggccgcatatcaatggggagcccctacgggccaatgcaaatggctgggccaaccgcatactctggtggatctatgatgggagcaggtggaatgtatggaatgcccatggacaggtatgggctaatacctgctggttctggtccaatgggcacgagagctggctcatattctgatgaagattctcagaagaagtctgcaggagctggccgtgataatgattgggagtgtccaaattgccacaacatcaactttggcttccgcacagtctgtaatatgagaaagtgcaacacacctagacctgaaaaccagggatctaagcctgatggtttaagagggtcaaaaccaaagacaccagagggcagttggaagtgtgagcagtgcaataacataaactatcctttccgaacgaaatgcaatcgtccccaatgtggagcagaaaagccatcacagacgaacaatgcaaatgaatcagcggaagatcaggacaatcagttttcgtcatgtaaaattacaaagctttttatcgaagctacgacttctgcgtgagtttcaagacagcagtgagcaggcagatggatcttccttgtcctgctgctggagcactgacacagtgacactgcggattggcagcagtccagtgagtttcaggacagtcttacaaactgatgtggctaccatttcgcatcggaaaacaaggtgaggaatttgcttatagtgtctcgagcgtcttgagtcttgccagatctgatttggaaattcgatatggtgttgagcattgtgatagtcagagtcaggatcttttaatgtagccatttcagtatttgctcggagtgatgcttgtcttatttttattcttcctttattctttttttcattatgttctgtgtctagcactgttatttctcatcctaccttaatgtaaatttcgtcttctcatttcgcctattttttttttcttgtagcatatccttttcttacaatttgtcattgctcttgagttaatttaaatcaagagtcctcttgttttgtctttttttttatgtttcttgatttgttgctgacggtatggtgttgtccaaagcacgaagaaacgggagattttgcgttggaggaggcgtttcctcgcgtgggcctgcagccatggcccacacctaggggtgataatgggctataaattttacactataagattaagatttaagtatcagattaggattgggctttatttctattcattttgaactaaaatttatttagggcacttatccattactatccctacccacacttctttagcggcagctgctgagcgcgagccctcatgctctgctcctgtctgtgtctgtgcaccttgctgagcgcgtctcgcgcaccgcagccatgcctcgcggtatgactgcaggaggtctcactctatcttagggggtgtttggtttgagtaatcatatcatccaggtctcactctatcttaggggatgtttggtttgagtaatcataccatctaagaggtggaatgaggtagtgatggatcaactcatttcattttagccgtgtttggttacaggggaataaatctatcatttaatccatgtatctctcaaagctagctattcttttgatccatggattctaatataaacttgtgcaatatgttcatggatttgttc

SEQ ID NO: 39423 - DNA, 3411 bp, Zea Mays
gaagccggacccctaatctgatgtgcacctgagttcgaagccgaattcacgactgcaattgcaaaaccctagctaccgcttcgccgaattccctgtcctccgcccgcttcgccgaattccctgtcctccgcccgcttcgccgaatttcctctcctccccgcccgccgcccgtcaccgcggcttcgtctgcgcttgtccctcccgttccaaggagcacgtgcttctcgccgcgccgttcgcccgccgccgccgccaccggttcatcgccagctatgtcttctcaggtcgacagccgcagccagtccgccgggaagcgcgcgcgcaccgacggcagccggcgtgaggacgactgggtttgccccagctgcaagaacgttaacttcgcctttcgcaccacttgcaacatgcgcaactgcaaccagtccaggccagcagatcacacggccatgcagaccccgcctcgctatcccacatcaggaggttacatgagcccagggacgccaccgtcgatgtaccttggtggtggtgctcccccatatggctcttcaatgtttaacgggcctgcaatgacgcgctatggtatcacacagttccctgggggttctgcgtatccatatggatatggtggccgcatatcaatggggagcccctacgggccaatgcaaatggctgggccaaccgcatactctggtggatctatgatgggagcaggtggaatgtatggaatgcccatggacaggtatgggctaatacctgctggttctggtccaatggtatgtgctcttgtgaattttcttctgtatacctattacctcacgctaatttaactactgtttatccttacatgaagaactttcaacatgtttgtttctgctacttttaattcattttttgtttgtattatatgatttctgtgattgtgtctacatgggaataactgttatgattccttaaatttatattcttgaacttgaaagggcacgagagctggctcatattctgatgaagattctcagaagaagtctgcaggagctggccgtgataatgattgggagtgtccaaattgccacaacatcaactttggcttccgcacagtctgtaatatgagaaagtgcaacacacctagacctgaaaaccagggatctaagcctgatggtttaagagggtcaaaaccaaagacaccagagggcagttggaagtgtgagcagtgcaataacataaactatcctttccgaacgaaatgcaatcgtccccaatgtggagcagaaaagccatcacagacgaacaatgcaaatgaatcagcggaagatcaggacaatcaggtctttgtttcagaaccttcactatggtcctcaacattttctacacctttatttagaacattaagttgcatgccttattaatatatcactactatttttaatcatttccttgccctcatgtttgcttgacatagcttaataaattatgtccttactgttacagtgagtcctagaacagtaatgagggtcaagaaggtccagcgtcgtcgtcaaggttcagtctgaatgtggggtacatctgtgtcagtagtcgccgttacaagtttcttccccttgagaacttagttgagtcggggccttggagttggcaatggagtcttgccttccttaatcactgcggataatggtcaagaacatcaatttgttatgtggtttgtcaagaacatccatcttgcctttcctggctgaacttggttacttgtctttgttactggtactctggataaattaccatatgttatatgaatgtcttttatatgtgtcatagaatatcactcatctgttatgaagtatcacaactgtcaccattttgttttggttttgttctggtcattgttttcaatttatggttggtttggtatttttacaggttctttctgaatggttgtgatggcaacctttctttccttccaaagtagttttcttagagatgtttgcaactttccctggtagcaatagttaggtcttaagttgacagctgacatcttggttgcataactgcatatgttactgttatcatcttccatgttgtctggagctttagctgttcaagtatcaccattcagtgttttggttagaagagatgctccttggtgaagtgacgtgcatctcattttgcagtggtagtagactaatcaccctgcatgcttgtctctaatgcaactacttcactgacttggtgccattggacttagttttcgtcatgtaaaattacaaagctttttatcgaagctacgacttctgcgtgagtttcaagacagcagtgagcaggcagatggatcttccttgtcctgctgctggagcactgacacagtgacactgcggattggcagcagtccagtgagtttcaggacagtcttacaaactgatgtggctaccatttcgcatcggaaaacaaggtgaggaatttgcttatagtgtctcgagcgtcttgagtcttgccagatctgatttggaaattcgatatggtgttgagcattgtgatagtcagagtcaggatcttttaatgtagccatttcagtatttgctcggagtgatgcttgtcttatttttattcttcctttattctttttttcattatgttctgtgtctagcactgttatttctcatcctaccttaatgtaaatttcgtcttctcatttcgcctattttttttttcttgtagcatatccttttcttacaatttgtcattgctcttgagttaatttaaatcaagagtcctcttgttttgtctttttttttatgtttcttgatttgttgctgacggtatggtgttgtccaaagcacgaagaaacgggagattttgcgttggaggaggcgtttcctcgcgtgggcctgcagccatggcccacacctaggggtgataatgggctataaattttacactataagattaagatttaagtatcagattaggattgggctttatttctattcattttgaactaaaatttatttagggcacttatccattactatccctacccacacttctttagcggcagctgctgagcgcgagccctcatgctctgctcctgtctgtgtctgtgcaccttgctgagcgcgtctcgcgcaccgcagccatgcctcgcggtatgactgcaggaggtctcactctatcttagggggtgtttggtttgagtaatcatatcatccaggtctcactctatcttaggggatgtttggtttgagtaatcataccatctaagaggtggaatgaggtagtgatggatcaactcatttcattttagccgtgtttggttacaggggaataaatctatcatttaatccatgtatctctcaaagctagctattcttttgatccatggattctaatataaacttgtgcaatatgttcatggatttgttc

SEQ ID NO: 39424 - DNA, 3005 bp, Zea Mays
gcgggcggcgtgcgtgatccggacccgcccctcctcacaccgtcgcgcacgggagccaagacgagccgcgctccgtcgcatccacctcgtctcgtcacacactccactcgaacgcactacttgatcggccaaagccaaacgaactgggctccctcccctccacttcctctccccatggcgcagcagctcccctgcgtctcgtcgccgcgcccgctgctcgccgtgcccgcgggccggtggcgcgccggcgtgcggggccggcccaatgtggcgggactggggcgggggcggctgtctctccacgccgccgccgcgcggcccgtggccgaggcggtgcaggcggaggaggacgacgacgacgacgacgaggaggtggccgaggagaggttcgcgctgggcggcgcgtgccgggtgctcgcgggaatgcccgcgccgctcggcgccaccgcgctccgcggcggtgtcaacttcgccgtctactccagcggtgcctccgccgcgtcgctgtgcctcttcgctcccggcgacctcaaggcgggtgaccgaggaggtgcccctcgatcccctgctcaaccgaacgggaaacgtgtggcacgtgttcatccacggggaccagctgcacggcatgctctacggatacaggttcgatggcgtgttcgcccctgagcgcggacagtactacgatgtgtccaacgttgtggtggatccatacgctaaggcagtggtaagccgaggtgaatatggtgtgcctgcgcctggtggtagttgttggcctcaaatggctggtatgatccctcttccctataataagtttgattggcaaggtgacctaccccttgggtaccatcagaaggaccttgtcatatatgaaatgcatttgcgtggattcacaaagcacaactcaagcaagacaaaacacccaggaacttacattggtgctgtgtcaaagcttgaccatctaaaggaacttggagtgaactgtatagagctaatgccctgccatgagttcaatgagctagagtacttcagctcctcttcgaagatgaacttctggggatattccacaataaattttttctcaccaatggcaagatattcttcaagtggcataagagactctggatgtggtgccataaatgaatttaaagcttttgtaagggaggcccacaaacggggaattgaggtgatcatggatgttgtcttcaatcatacagctgaaggtaatgagaaaggcccaatattatcctttagggggatagataatagtacatactacatgcttgcacctaagggagagttttataattattctggttgtggaaataccttcaattgtaatcatcctgtagtccgtgaatttatagtggattgcttgagatactgggtaacagaaatgcatgttgatggttttcgttttgaccttgcatctatactgaccagaggatgcagtctatgggatccagttaatgtgtatggaagtccaatggaaggtgacatgattacgacagggacacctcttgttgccccaccacttattgacatgattagcaatgacccaattcttggaaatgtcaagctcattgctgaagcatgggatgcaggaggtctctatcaagttggtcagtttcctcactggaacgtttggtcagagtggaatggaaagtatcgcgataccgtgcgtcagttcatcaaaggcacagatggatttgctggtgcttttgctgaatgcctatgtggaagtccacagttataccaggcaggggggaggaagccttggcacagtatcaactttgtatgtgcacacgatggatttacactggctgatttggtcacatacaatagcaagtacaacttgtcaaatggtgaggacaacagagatggggaaaatcataatcttagctggaattgtggggaggaaggagaatttgcaagtctgtcagtccgaagattaaggaagaggcaaatgcgcaatttctttgtttgtcttatggtttctcagggagttccaatgttctacatgggcgatgaatatggtcacacaaagggagggaacaacaatacgtactgccatgaccattatgtcaattatttccgttgggataagaaggaagaacaatcctctgatttgtacagattctgccgtctcatgaccaaattccgcaaagaatgtgaatctcttggccttgaggacttcccgacttcagaacggttgaaatggcacggtcatcagcccgggaagcctgactggtcagaggcaagccgattcgttgccttcaccatgaaggacgaaaccaaaggcgagatctacgtggccttcaacaccagtcaccttccggtggttgttgggcttccagagcgctctgggttccgatgggagccggtggtggacaccggcaaggaggcaccatatgacttcctcaccgatggcctgccagatcgtgctgtcaccgtctaccagttctctcatttcctcaactccaatctctatcctatgctcagctactcctccatcatccttgtattgcgccctgatgtctgaaagaagcagatacaatagagtatactatagcggttgttctctaggctgtagcatgcagtggaaactggaaaatgttggggttgctctgttgtcggtagtttacatgcgcatgtcggtatgtgtagctaaagctggtggatctcagttctcagatcggactcgagacggggaaaaccattgcccagttggctggttctctgaagttttgtttggtgtaaagaaatggtggtccatcatctactcaaatttttttctcttttttaatgaaataagttgactcaaaatcaactcattcttcaacttaataattagtatatacacaaggaataaattaattctatcaaatttatgaaatgaaatccaacattattcgaaggactgacgactactaacacggcactgctcccggagaaagaggaaaacctggcaaatggattacgggtacgagggtcggctaaagtaaaga

SEQ ID NO: 39425 - DNA, 2976 bp, Zea Mays
gtgcgtgatccggacccgcccctcctcacaccgtcgcgcacgggagccaagacgagccgcgctccgtcgcatccacctcgtctcgtcacacactccactcgaacgcactacttgatcggccaaagccaaacgaactgggctccctcccctccacttcctctccccatggcgcagcagctcccctgcgtctcgtcgccgcgcccgctgctcgccgtgcccgcgggccggtggcgcgccggcgtgcggggccggcccaatgtggcgggactggggcgggggcggctgtctctccacgccgccgccgcgcggcccgtggccgaggcggtgcaggcggaggaggacgacgacgacgacgacgaggaggtggccgaggagaggttcgcgctgggcggcgcgtgccgggtgctcgcgggaatgcccgcgccgctcggcgccaccgcgctccgcggcggtgtcaacttcgccgtctactccagcggtgcctccgccgcgtcgctgtgcctcttcgctcccggcgacctcaaggcggatagggtgaccgaggaggtgcccctcgatcccctgctcaaccgaacgggaaacgtgtggcacgtgttcatccacggggaccagctgcacggcatgctctacggatacaggttcgatggcgtgttcgcccctgagcgcggacagtactacgatgtgtccaacgttgtggtggatccatacgctaaggcagtggtaagccgaggtgaatatggtgtgcctgcgcctggtggtagttgttggcctcaaatggctggtatgatccctcttccctataataagtttgattggcaaggtgacctaccccttgggtaccatcagaaggaccttgtcatatatgaaatgcatttgcgtggattcacaaagcacaactcaagcaagacaaaacacccaggaacttacattggtgctgtgtcaaagcttgaccatctaaaggaacttggagtgaactgtatagagctaatgccctgccatgagttcaatgagctagagtacttcagctcctcttcgaagatgaacttctggggatattccacaataaattttttctcaccaatggcaagatattcttcaagtggcataagagactctggatgtggtgccataaatgaatttaaagcttttgtaagggaggcccacaaacggggaattgaggtgatcatggatgttgtcttcaatcatacagctgaaggtaatgagaaaggcccaatattatcctttagggggatagataatagtacatactacatgcttgcacctaagggagagttttataattattctggttgtggaaataccttcaattgtaatcatcctgtagtccgtgaatttatagtggattgcttgagatactgggtaacagaaatgcatgttgatggttttcgttttgaccttgcatctatactgaccagaggatgcagtctatgggatccagttaatgtgtatggaagtccaatggaaggtgacatgattacgacagggacacctcttgttgccccaccacttattgacatgattagcaatgacccaattcttggaaatgtcaaggaggtctctatcaagttggtcagtttcctcactggaacgtttggtcagagtggaatggaaagtatcgcgataccgtgcgtcagttcatcaaaggcacagatggatttgctggtgcttttgctgaatgcctatgtggaagtccacagttataccaggcaggggggaggaagccttggcacagtatcaactttgtatgtgcacacgatggatttacactggctgatttggtcacatacaatagcaagtacaacttgtcaaatggtgaggacaacagagatggggaaaatcataatcttagctggaattgtggggaggaaggagaatttgcaagtctgtcagtccgaagattaaggaagaggcaaatgcgcaatttctttgtttgtcttatggtttctcagggagttccaatgttctacatgggcgatgaatatggtcacacaaagggagggaacaacaatacgtactgccatgaccattatgtcaattatttccgttgggataagaaggaagaacaatcctctgatttgtacagattctgccgtctcatgaccaaattccgcaaagaatgtgaatctcttggccttgaggacttcccgacttcagaacggttgaaatggcacggtcatcagcccgggaagcctgactggtcagaggcaagccgattcgttgccttcaccatgaaggacgaaaccaaaggcgagatctacgtggccttcaacaccagtcaccttccggtggttgttgggcttccagagcgctctgggttccgatgggagccggtggtggacaccggcaaggaggcaccatatgacttcctcaccgatggcctgccagatcgtgctgtcaccgtctaccagttctctcatttcctcaactccaatctctatcctatgctcagctactcctccatcatccttgtattgcgccctgatgtctgaaagaagcagatacaatagagtatactatagcggttgttctctaggctgtagcatgcagtggaaactggaaaatgttggggttgctctgttgtcggtagtttacatgcgcatgtcggtatgtgtagctaaagctggtggatctcagttctcagatcggactcgagacggggaaaaccattgcccagttggctggttctctgaagttttgtttggtgtaaagaaatggtggtccatcatctactcaaatttttttctcttttttaatgaaataagttgactcaaaatcaactcattcttcaacttaataattagtatatacacaaggaataaattaattctatcaaatttatgaaatgaaatccaacattattcgaaggactgacgactactaacacggcactgctcccggagaaagaggaaaacctggcaaatggattacgggtacgagggtcggctaaagtaaaga

SEQ ID NO: 39426 - DNA, 2314 bp, Zea Mays
ctgttgtcctttactttggctatgcgtgcagtggtaagccgaggtgaatatggtgtgcctgcgcctggtggtagttgttggcctcaaatggctggtatgatccctcttccctataataagtttgattggcaaggtgacctaccccttgggtaccatcagaaggaccttgtcatatatgaaatgcatttgcgtggattcacaaagcacaactcaagcaagacaaaacacccaggaacttacattggtgctgtgtcaaagcttgaccatctaaaggaacttggagtgaactgtatagagctaatgccctgccatgagttcaatgagctagagtacttcagctcctcttcgaagatgaacttctggggatattccacaataaattttttctcaccaatggcaagatattcttcaagtggcataagagactctggatgtggtgccataaatgaatttaaagcttttgtaagggaggcccacaaacggggaattgaggtgatcatggatgttgtcttcaatcatacagctgaaggtaatgagaaaggcccaatattatcctttagggggatagataatagtacatactacatgcttgcacctaagggagagttttataattattctggttgtggaaataccttcaattgtaatcatcctgtagtccgtgaatttatagtggattgcttgagatactgggtaacagaaatgcatgttgatggttttcgttttgaccttgcatctatactgaccagaggatgcagtctatgggatccagttaatgtgtatggaagtccaatggaaggtgacatgattacgacagggacacctcttgttgccccaccacttattgacatgattagcaatgacccaattcttggaaatgtcaagctcattgctgaagcatgggatgcaggaggtctctatcaagttggtcagtttcctcactggaacgtttggtcagagtggaatggaaagtatcgcgataccgtgcgtcagttcatcaaaggcacagatggatttgctggtgcttttgctgaatgcctatgtggaagtccacagttataccaggcaggggggaggaagccttggcacagtatcaactttgtatgtgcacacgatggatttacactggctgatttggtcacatacaatagcaagtacaacttgtcaaatggtgaggacaacagagatggggaaaatcataatcttagctggaattgtggggaggaaggagaatttgcaagtctgtcagtccgaagattaaggaagaggcaaatgcgcaatttctttgtttgtcttatggtttctcagggagttccaatgttctacatgggcgatgaatatggtcacacaaagggagggaacaacaatacgtactgccatgaccattatgtcaattatttccgttgggataagaaggaagaacaatcctctgatttgtacagattctgccgtctcatgaccaaattccgcaaagaatgtgaatctcttggccttgaggacttcccgacttcagaacggttgaaatggcacggtcatcagcccgggaagcctgactggtcagaggcaagccgattcgttgccttcaccatgaaggacgaaaccaaaggcgagatctacgtggccttcaacaccagtcaccttccggtggttgttgggcttccagagcgctctgggttccgatgggagccggtggtggacaccggcaaggaggcaccatatgacttcctcaccgatggcctgccagatcgtgctgtcaccgtctaccagttctctcatttcctcaactccaatctctatcctatgctcagctactcctccatcatccttgtattgcgccctgatgtctgaaagaagcagatacaatagagtatactatagcggttgttctctaggctgtagcatgcagtggaaactggaaaatgttggggttgctctgttgtcggtagtttacatgcgcatgtcggtatgtgtagctaaagctggtggatctcagttctcagatcggactcgagacggggaaaaccattgcccagttggctggttctctgaagttttgtttggtgtaaagaaatggtggtccatcatctactcaaatttttttctcttttttaatgaaataagttgactcaaaatcaactcattcttcaacttaataattagtatatacacaaggaataaattaattctatcaaatttatgaaatgaaatccaacattattcgaaggactgacgactactaacacggcactgctcccggagaaagaggaaaacctggcaaatggattacgggtacgagggtcggctaaagtaaaga

SEQ ID NO: 39427 - DNA, 1369 bp, Zea Mays
aaacaatagcctcactgacaacattagtatcgcgataccgtgcgtcagttcatcaaaggcacagatggatttgctggtgcttttgctgaatgcctatgtggaagtccacagttataccaggcaggggggaggaagccttggcacagtatcaactttgtatgtgcacacgatggatttacactggctgatttggtcacatacaatagcaagtacaacttgtcaaatggtgaggacaacagagatggggaaaatcataatcttagctggaattgtggggaggaaggagaatttgcaagtctgtcagtccgaagattaaggaagaggcaaatgcgcaatttctttgtttgtcttatggtttctcagggagttccaatgttctacatgggcgatgaatatggtcacacaaagggagggaacaacaatacgtactgccatgaccattatgtcaattatttccgttgggataagaaggaagaacaatcctctgatttgtacagattctgccgtctcatgaccaaattccgcaaagaatgtgaatctcttggccttgaggacttcccgacttcagaacggttgaaatggcacggtcatcagcccgggaagcctgactggtcagaggcaagccgattcgttgccttcaccatgaaggacgaaaccaaaggcgagatctacgtggccttcaacaccagtcaccttccggtggttgttgggcttccagagcgctctgggttccgatgggagccggtggtggacaccggcaaggaggcaccatatgacttcctcaccgatggcctgccagatcgtgctgtcaccgtctaccagttctctcatttcctcaactccaatctctatcctatgctcagctactcctccatcatccttgtattgcgccctgatgtctgaaagaagcagatacaatagagtatactatagcggttgttctctaggctgtagcatgcagtggaaactggaaaatgttggggttgctctgttgtcggtagtttacatgcgcatgtcggtatgtgtagctaaagctggtggatctcagttctcagatcggactcgagacggggaaaaccattgcccagttggctggttctctgaagttttgtttggtgtaaagaaatggtggtccatcatctactcaaatttttttctcttttttaatgaaataagttgactcaaaatcaactcattcttcaacttaataattagtatatacacaaggaataaattaattctatcaaatttatgaaatgaaatccaacattattcgaaggactgacgactactaacacggcactgctcccggagaaagaggaaaacctggcaaatggattacgggtacgagggtcggctaaagtaaaga

SEQ ID NO: 39428 - DNA, 1726 bp, Zea Mays
cctccccttcctaatctcgataggggtgcgcgaggacgaggagaaaaaacagaggaggaaaaaatatcaccttctcttcctgcattcccctgctcgatccccggcgaggaattcgcccccgaatccatcgatttgctcagtccagtccgccgatccgtggatcgattcgtgcgtgggctctgtcctccccggggttccgatctggtcctcgcctcgccggaggaggagctggaggagatgaacggcaccgggggcagccaccaccagcagcagcacaggctccggcagcagcagcagcagcaggcgctcctgatgcagcaggcgctgcagcagcagcagcagcaacatcagtaccagtccggcgtcctcgccgccgcggcagccgcggccatgacccaggtcgtccccccggatcctcgcctctcgatctgctggtctgcgagcgcactgggctgcagtaatgcgcgccgatctgcttcttgttttgcaatggaacctatttccaatggcaatcttccacctggctttgatccttccacttgtcgcagtgtgtatgttggaaacgtgaaccctaatgtcacggagagccttttgattgaagttttccagagtgctggccttgtggaaagatgcaagctcatacggaaagagaagtcatcctttgggtttgtggactactatgatagaaggtctgctgctctagcaatcatgacccttcatggccgtcacatcatatccttcttgttcgaagctgaaactgctataactgaaatgactggaaaatggcttggaagcagacaaataaggtgcaattgggcaacaaagaccaattcagaagagaaaccagaaactgacaatcataatgcagttgtactaacaaatggtagctccaccaattcagcaacagatgcaagccaggatgcaggaagtaaagagaacccagagaacaatcctgattgtactactgtatatgttggcaaccttggacatgaggttaatcgggatgagcttcaccgccacttctataacttgggggtcggggcaatcgaggaaatccgtgttcaacaggataaggggtttggatttgtgagatatagcacccatggggaagcagcattagctattcagatggccaatggattggtagtccgtgggaaatcaattaagtgctcatggggaaacaagccaactccacctggcaccacctccaagcccctaccccctccagttgcttcataccagcctgctgtagcaatgtcaggtgtcccacaaggtttcacagcagccgaacttcttgcttaccagaggcagcttgccttaagccaggctgcagcagggcagattgctggccagcatggtctcgcgggtcaggtttctgcaggtcttcttgctgctgctggttctcaggccctctacgatggctacccgaaccagtcatcagcccagcagcttatgtactacaactagagttcaagaggacggcgttggccatcgtcgccctgttttttattttgtggttcatgtactatttgtgtgagagttcttgatctcttgtcgccgcggaattgtgttactatcttattactgtaccattgaccatttttcttgtgagattcatttgagtagtcactttaacagagtaagagatgtattctatgtgacttcgcgattgattaatgtaatgctcccctgtgcatagaagtatggaagaaaaaaaatacagaaa

SEQ ID NO: 39429 - DNA, 1636 bp, Zea Mays
cctccccttcctaatctcgataggggtgcgcgaggacgaggagaaaaaacagaggaggaaaaaatatcaccttctcttcctgcattcccctgctcgatccccggcgaggaattcgcccccgaatccatcgatttgctcagtccagtccgccgatccgtggatcgattcgtgcgtgggctctgtcctccccggggttccgatctggtcctcgcctcgccggaggaggagctggaggagatgaacggcaccgggggcagccaccaccagcagcagcacaggctccggcagcagcagcagcagcaggcgctcctgatgcagcaggcgctgcagcagcagcagcagcaacatcagtaccagtccggcgtcctcgccgccgcggcagccgcggccatgacccagatggaacctatttccaatggcaatcttccacctggctttgatccttccacttgtcgcagtgtgtatgttggaaacgtgaaccctaatgtcacggagagccttttgattgaagttttccagagtgctggccttgtggaaagatgcaagctcatacggaaagagaagtcatcctttgggtttgtggactactatgatagaaggtctgctgctctagcaatcatgacccttcatggccgtcacatcatatccttcttgttcgaagctgaaactgctataactgaaatgactggaaaatggcttggaagcagacaaataaggtgcaattgggcaacaaagaccaattcagaagagaaaccagaaactgacaatcataatgcagttgtactaacaaatggtagctccaccaattcagcaacagatgcaagccaggatgcaggaagtaaagagaacccagagaacaatcctgattgtactactgtatatgttggcaaccttggacatgaggttaatcgggatgagcttcaccgccacttctataacttgggggtcggggcaatcgaggaaatccgtgttcaacaggataaggggtttggatttgtgagatatagcacccatggggaagcagcattagctattcagatggccaatggattggtagtccgtgggaaatcaattaagtgctcatggggaaacaagccaactccacctggcaccacctccaagcccctaccccctccagttgcttcataccagcctgctgtagcaatgtcaggtgtcccacaaggtttcacagcagccgaacttcttgcttaccagaggcagcttgccttaagccaggctgcagcagggcagattgctggccagcatggtctcgcgggtcaggtttctgcaggtcttcttgctgctgctggttctcaggccctctacgatggctacccgaaccagtcatcagcccagcagcttatgtactacaactagagttcaagaggacggcgttggccatcgtcgccctgttttttattttgtggttcatgtactatttgtgtgagagttcttgatctcttgtcgccgcggaattgtgttactatcttattactgtaccattgaccatttttcttgtgagattcatttgagtagtcactttaacagagtaagagatgtattctatgtgacttcgcgattgattaatgtaatgctcccctgtgcatagaagtatggaagaaaaaaaatacagaaa

SEQ ID NO: 39430 - DNA, 1020 bp, Zea Mays
tttgcttccttgctttttgcaggactatcaccatttataatgaagctgaaactgctataactgaaatgactggaaaatggcttggaagcagacaaataaggtgcaattgggcaacaaagaccaattcagaagagaaaccagaaactgacaatcataatgcagttgtactaacaaatggtagctccaccaattcagcaacagatgcaagccaggatgcaggaagtaaagagaacccagagaacaatcctgattgtactactgtatatgttggcaaccttggacatgaggttaatcgggatgagcttcaccgccacttctataacttgggggtcggggcaatcgaggaaatccgtgttcaacaggataaggggtttggatttgtgagatatagcacccatggggaagcagcattagctattcagatggccaatggattggtagtccgtgggaaatcaattaagtgctcatggggaaacaagccaactccacctggcaccacctccaagcccctaccccctccagttgcttcataccagcctgctgtagcaatgtcaggtgtcccacaaggtttcacagcagccgaacttcttgcttaccagaggcagcttgccttaagccaggctgcagcagggcagattgctggccagcatggtctcgcgggtcaggtttctgcaggtcttcttgctgctgctggttctcaggccctctacgatggctacccgaaccagtcatcagcccagcagcttatgtactacaactagagttcaagaggacggcgttggccatcgtcgccctgttttttattttgtggttcatgtactatttgtgtgagagttcttgatctcttgtcgccgcggaattgtgttactatcttattactgtaccattgaccatttttcttgtgagattcatttgagtagtcactttaacagagtaagagatgtattctatgtgacttcgcgattgattaatgtaatgctcccctgtgcatagaagtatggaagaaaaaaaatacagaaa

SEQ ID NO: 39431 - DNA, 2024 bp, Zea Mays
ctgcacggcgaacgcgagtctcctaaacgataccgggcgggcaggcacacgagcgcgagcacgcacgagttcgcgagtccccctgacccccacgtgcgcgtcgttggaaccaaggattggattagcctcgccgacgacgaggagagaagagctggtggctggcgaggggctcgcggggatggggatctcgaggcccctggcgctccttctggcgctgctgatcgccgtcgccggcgcgaccgccgaggagcccgtagtggcggcggactcggtggccggcgcggtggaggccgcggcggcgctcagggtggaggaggctgcggaggccgcggcgctcagggccgagctggagcagctccgggcgaagatctccgccttagagtcagacatagcagtgcgatctctcgaactgaagaataaggacgatgtcatcgtgaacctagagaaagccattgcggagaagtcaaaggctattacctctatgcagggcgagattgcttctctccaggcaaaaggatctctagctgccgaggagcaggctaacaaggccaatgccaaggctgttgaacttgagaaattgacaagctcaaaaaggatattcaagcacaaagtagtcagaaagcagcactagaatctagggccaacgatgcagagaacaaggtggaaaagttgaatgaaaagcttaatacaatgcaaaaggaaagtgatgagcaaaaacgcaaaatcaagaagacagaacgtgctcttaaagtcgctgaggaggaattgatgaggttgcagttagaagcaactgctaaatcaaaacagctgactgaggttcatggagcatggttaccaccttggttagcgacacactatgctcgttacatggaggttgtctcaggtcactggaattatcatggaaaacctgctgtgcagaatgttttgcataaggcatcagaaaaatcagcacatgcaaagaaatgggctgaaccacatattgagactgctaagatgaaatggattcctgttaaggagaaattggttgtcctcaagaaaaatgcagaaccttatgtacagaaggtatcgacaagatcagtggagttttatgagtcatcaagggatgctgtgacacctcacgttgtcaaagttaaagagtttgctcatccctactaccaggaagccaagaagttttctaagccttacattgatcaaattgctgagatcactaagccacatgttgagaaagttagaactactctgaagccatacactaagagagcagttcatgcgtatgggtcatttcttgggtctgcaaccacataccatcgacaggctcaggcgaccatcatggactacctccatcagcatggggtacccaagtcatttgcaacgaaggagttagtttggttcctggcttctgccttgctagctctgcctgtcttcgtcatatacaggcttgtagtagagaccttctgcaccaaaaagaacagaaggcctcgtggcggtaatggtaacggtaaccatggccagaagagacacaagcggcgatacgccgacaagtagaccaatctacccaacactttagggttcagcatgttgtgtttgcattgtcgcgcatctttgagcaatgagcaagattgggttgctcctccctcccggaggcactgttgaaccatacatggaggaaggagactcgggtcatgggcaccctttaccgtgagaagcgttgtagcctacaccaccaatatttctctttcttttacttcttcccaggtgtactatggacttcggtgcaggtgcagcggaccttttatattatctgcactttgctggggttcagggggttaggcctttgttttattggtcgttgtttattgtaacttgtgaattcgtttgagttcgtctgtttgtttttttggctggcgacctacattcgaacttgttagttgaagtttaactcaagttgctggagtgtcatgaacaggagaagagtgtctaactgacattgatgtaagcgaggagggcactaggaactttgtggt

SEQ ID NO: 39432 - DNA, 2340 bp, Zea Mays
cccccctcgtgccccaaatcgcaacccgacccgagacgagttcctccagatcagcgggcagggtgccgtagcaaggatctcgccgggccccggccatgaccgaggtcgccgacgcgtcccctccccctccgaccgccggcggcggagaccgcaagcggggccgcgcctcgcccgtgcccccgctgccgggccagcacaagaggcgtagggaggagggcggcggcggcggcttcgaccggcgccggctcggcccggttggcggcggagggcacgagcaggacgacaggaggtatggaaatggtcttggtggcataggaggaagaggtggtgacagtcgatatacaaatcgtgcaccagattctggacgcggtggatggaatgagggttctgggaacagtcgtagggaaggactgatgtcatacaagcagttcatccaggaacttgaagatgatgtttcaccagttgaagcgcaaagcagatatgaggagtacaagtcagagtacatcacaactcagaagaaagcttactttgccctccataaggatgaagattggttaagaaataaataccatcctacaaaccttgaaaatgtcattgaaagaaggaatgaactggcaagaactactgcagatgatttcttcctacaattgcaaagtggaagtctggacaccggtccaggtttgactggttcggcagtgagcaaatcaggaaataacagcagtaaaaatctagatgctgtggaaggggatggtaaaaaggggaaacttggaaaaggttccgacgattcatattatgctgctcccaaggctcacccagttagttctgaagttcgtcgaattcgaattgatattgagcaagctcaaggtctcatttgtaaacttgattctgagaagggtattgaaaacaacatcctctcaagtagtaatcatgaaaagccagacatggataagtcacatggttcaatggggccaattgttatagtacaaggatcatctactgtgaagggtcttgagggtactgagttgctggacactcttgttacttatttatggcgtatccatggtgtggattattatggtatgtctgagacaaacgaacctaaaggcctaaggcatgtgaaagcagatgcgaggacatataatggggctagctcaagtgccaccgaatgggagaataagcttgattcattctggcaagatagaattcaaggtcaggatccattagaaatattgaaagcgaaggagaagatcgatggagctgctactgaagtattggatccatatgtgaggaaaataagggatgagaagtatgggtggaaatatggatgtggagccaagggctgcacgaaacttttccatgccgctgagtttgtccagaagcatattaaactgaagcacacagacttggtggttgatctaacttcaaaagcaagagaagatatttactttgaaaactatatgaatgacccaaaggcgcctggtggtacgcctatcatgcagcaacctgctccaaggggaaaaggcagacaaaggccaccaatagagagtcggctgagggatgagcgtggtaatcataggctcgacagtgatgggtccggtgaaaatcccgacgatcctgtttatgattcgtttggtgatccaactatgcatggcgccttccctccagatattcctgctccccctgttctaatgcctgtgcctggtgccggtccgcttggaccgtttattcccgcaccgccggaagttgccatgcatatgttgagggatcagggcgcgccacctccttttgagcccagtggaggtccacatcctaggaaagcagggaggggcagcggcggcggcggtcctccaatgcgtggtccgtccccagtcttcagtgctcctccgcctcatcatatgcatgaccctcgtcgaatacgaagctaccaagacctggatgctcccgaggacgaagtgaccgtcatggactaccgaagcttgtaggcttgcctccagatactcgtttaggtaaacattacagtgcgaaatcaaaacatcttgctctgtctaaaatcaccgcggaggaaccccagcaggcatctcagcacctgtgtctcgactcctgagctgtcatcttctcactgtttgtgaaacgaaacacactacaggacgctcgacaaaataggccaccgtgaaacacggtgttagctcagtctgtgcaacgcgaaagattttcgtccatgtttgagcactgtaaaacactgttcccaacataacgtccagctggacagagtagagtttaaatatggttagtgagatggatagtttgatggagataagatttattaggggattatctctt

SEQ ID NO: 39433 - DNA, 2332 bp, Zea Mays
cccccctcgtgccccaaatcgcaacccgacccgagacgagttcctccagatcagcgggcagggtgccgtagcaaggatctcgccgggccccggccatgaccgaggtcgccgacgcgtcccctccccctccgaccgccggcggcggagaccgcaagcggggccgcgcctcgcccgtgcccccgctgccgggccagcacaagaggcgtagggaggagggcggcggcggcggcttcgaccggcgccggctcggcccggttggcggcggagggcacgagcaggacgacaggaggtatggaaatggtcttggtggcataggaggaagaggtggtgacagtcgatatacaaatcgtgcaccagattctggacgcggtggatggaatgagggttctgggaacagtcgtagggaaggactgatgtcatacaagcagttcatccaggaacttgaagatgatgtttcaccagttgaagcgcaaagcagatatgaggagtacaagtcagagtacatcacaactcagaagaaagcttactttgccctccataaggatgaagattggttaagaaataaataccatcctacaaaccttgaaaatgtcattgaaagaaggaatgaactggcaagaactactgcagatgatttcttcctacaattgcaaagtggaagtctggacaccggtccaggtttgactggttcggcagtgagcaaatcaggaaataacagcagtaaaaatctagatgctgtggaaggggatggtaaaaaggggaaacttggaaaaggttccgacgattcatattatgctgctcccaaggctcacccagttagttctgaagttcgtcgaattcgaattgatattgagcaagctcaaggtctcatttgtaaacttgattctgagaagggtattgaaaacaacatcctctcaagtagtaatcatgaaaagccagacatggataagtcacatggttcaatggggccaattgttatagtacaaggatcatctactgtgaagggtcttgagggtactgagttgctggacactcttgttacttatttatggcgtatccatggtgtggattattatggtatgtctgagacaaacgaacctaaaggcctaaggcatgtgaaagcagatgcgaggacatataatggggctagctcaagtgccaccgaatgggagaataagcttgattcattctggcaagatagaattcaaggtcaggatccattagaaatattgaaagcgaaggagaagatcgatggagctgctactgaagtattggatccatatgtgaggaaaataagggatgagaagtatgggtggaaatatggatgtggagccaagggctgcacgaaacttttccatgccgctgagtttgtccagaagcatattaaactgaagcacacagacttggtggttgatctaacttcaaaagcaagagaagatatttactttgaaaactatatgaatgacccaaaggcgcctggtggtacgcctatcatgcagcaacctgctccaaggggaaaaggcagacaaaggccaccaatagagagtcggctgagggatgagcgtggtaatcataggctcgacagtgatgggtccggtgaaaatcccgacgatcctgtttatgattcgtttggtgatccaactatgcatggcgccttccctccagatattcctgctccccctgttctaatgcctgtgcctggtgccggtccgcttggaccgtttattcccgcaccgccggaagttgccatgcatatgttgagggatcagggcgcgccacctccttttgagcccagtggaggtccacatcctaggaaagcagggaggggcagcggcggcggcggtcctccaatgcgtggtccgtccccagtcttcagtgctcctccgcctcatcatatgcatgaccctcgtcgaatacgaagacctggatgctcccgaggacgaagtgaccgtcatggactaccgaagcttgtaggcttgcctccagatactcgtttaggtaaacattacagtgcgaaatcaaaacatcttgctctgtctaaaatcaccgcggaggaaccccagcaggcatctcagcacctgtgtctcgactcctgagctgtcatcttctcactgtttgtgaaacgaaacacactacaggacgctcgacaaaataggccaccgtgaaacacggtgttagctcagtctgtgcaacgcgaaagattttcgtccatgtttgagcactgtaaaacactgttcccaacataacgtccagctggacagagtagagtttaaatatggttagtgagatggatagtttgatggagataagatttattaggggattatctctt

SEQ ID NO: 39434 - DNA, 3774 bp, Zea Mays
gagttgtctgttgcctcaccacccctctgtccctgcttccttctgctcccgcaacgggtggcctccgttccccgaccccgcccgactctcccacacatctccggcgctctcttcgagtcctcctgcagtcccgccgccttctcatcgctaccaaaattgcaaagccggactggaactcgcgtcgcgcgcaggggcatggacccggacgacgaaccagcggcgcagcggaaagccgtcgacttgcacctgccgcgcgacacggagcctgcctcctcgcccgcgtgcacccgccgcgccgcgccgcgcgtgctcagctactgtgacgtccctttcgcctccgcctcggcgcagcgctgcgcatcattcccgcagcgccacggagagctggcgcacgcccgctcggcctccttcgcagcctggatcgaaggcggctcggcgtcggcgccggcggcggcactcgagcgggccatgtcgcagtacggcggtgcggacggcgcgctgccagagttcgtcggcgccggcggtggcgagggcatcttccgcgtgccgctccgcgcggcgatgcacccggcgcgcccgccgccgctcgaggtgcggccccacccgctgcgggagacacaggcgggcgcctttctgaggacgctggcctgcgacccgcggcgacggcagctgtgggcgggcgccgagtccggggttcgagtgtggggcctccacgaggtgttccgtgggtggtggccgggcgccgggccgcggcgccgcggtgacgaggaggccgcgccgttcagagagtccgtgccggtcccgcccgcgctctgcgccgctgtcgacggcgctaacgggatggtgtggacggggcacagggacggcaggatcagggcgtggcgcatggaccacgccgcgcccgccggaggatactccgccggcagtgcgcccatgttcaaggaggccctctcgtggcaggcgtacagtcgcacgccggtgctcgccatcgtcgtcacgttggatgctaagactagggaacttttaaaagtatttggcatcgatggacaagtcgacttagctcgtcctgaggccccagtaatgcccgaacaattcatagaggaagagattaaagtaaaacccacaaaaagggagaggccgcaaggttctttcacattttttcagaaatctaggaatgccttgatgggcgcagctgatgctgtacgcagagttgcaacaaaagggacatttgtcgaagataatcggcgaactgaagcagtggctcaagcaatgaatgggacaatttggtctggttgcacagatggttcaattattgtttgggatggaaatgggaatagactgcgagaatttcattaccatagttcttctgttcgatgcataaagacactcggagacaaggtttgggtgggctatgcaagtggcactattcaagttgtcgatgtcgaaggtaaccttcaggcaggatggattggtcatagctgcccagtcatagacatggcaattagtgattcttacattttttctttggcacatcatggtggtattcgaggatggcctctaagttcccctagctccctagatgatattctatgctatgagttggctagcagggaactgttatacacaaggctagagaaccttaaaatactggttgggacttggaatgttgcacaagagaaagcttctcctgaagcactaaggtcatggttgggtggtgcattttttgatgttgggctggtggtggttggtttgcaagaggtcgagatgggtgctggagttcttgccatggcagctgccaaagaaagtgtagggcttgaaggcagtgccaatgggcagtggtggatagacagtattggcaaaacacttgatgagggaatatccttccacagagttggttcaaggcagttggcaggactacttattgctgcatgggcaacgaatgaccttaggccacatgttggtgatgttgatactgctgcagtgccatgtggctttgggcgtgctattggcaacaagggtggcgtcggattaagaataagagtctttggtcgcaggatatgttttgtaaacaatcattttgctgcacatcaagagaatgttagccgccgcaatgctgattttgaccgcatttatcggacaatgactttcaccaaacctcagggatctgcagcttctgctacagctgtccaattgcataaagcagctaatgaaaatcaagcagatgaaggtaggcctgatctggcagaagctgatatggttatcttccttggtgatttgaactaccgacttgatggcatcacctatgatgaagcaagggacatggtctcccagaggagctttgactggcttagagaaagggatcaacttcgagcggaaatgaaggcgggaaatgtgtttcagggaatgcgtgaaggcccaatcagatttcctccaacctacaagttccagagacaccagtcgggtctctcagggtatgattcaggcgagaagaagagaatacctgcttggtgcgacaggatactgtatcgagatagccgtcctgtaccaatagctgaatgctcattagagtgccctgtcgtcgctgcaatcacagcgtacgaatcttgcatggatgtcacagacagtgaccataaacccgtgagatgtacattcagcgtcgatattgcaagagtagacgagctgataaggaggcaagagtttggaaaaataatcgaatctaacaaaaaggttcgctctttgcttcgagagctccgttctgttccggacaccgtcgtcaacgcgaacaacattacattggaaaatcaccaagaagatgtcatcctccggataactaataactgtgaaaccagcaaggccgcttttgaaatcctgtgtgaaggccagacagtcagaaagcagggcggaacccaatctgaggagctgctcccaagggcgtcctttggcttcccactttggcttgaggtccaaccatcgatgggtctcatcggcccaggagaaacagcggaagtcgtcgtgcgccacgacgacttcctgacgcaggaagagtacgtcgacggagcacagcggaaccggtggcgcgaggccacccgagacctggaggtcgtgctctcggtgacagtcacgggcagctccagctcctcggccgaggccgtcgcgcacagggtcaccgtccggcactgctgcccggcgcctccggctcccctgcccgccaaccggcgctctgccgctgcctcgcctcgtgacgacgttgccgcgtcggataaccagtcgaaccacctgcaccgttccgatctcgccagcttcggtagctcggaggtgcgtgacctgtgcgggggcttgtgaaagcgagtttcgctgcctttgcttcatcgtcctgcattcctgctccttacatgtgcgtcgtcctgccgttctttgcgtgtcgaatcaaaaagcgagagagaaagaaagagagaggaaaaaaaaggaagaaagaagagagtgcaattgttgtaattacctgtagtaggtaaaattttcaagctaaccttttttttttgaccttcttaagttaagtagtagatgtggcattgaaattgtgttggtgcaaagtggagtgagtgtatggttgtatgtatagtaatggaggttgtatgcttgtatagtctattgattggacgatgctttgctcctactgcaatacagcgcaacgagaactgcagctgctcgcctgctcctacagcaacgccacaccgcttctttttttttaaaaaaaaaacagagagatagagagag

SEQ ID NO: 39435 - DNA, 3727 bp, Zea Mays
gtctgttgcctcaccacccctctgtccctgcttccttctgctcccgcaacgggtggcctccgttccccgaccccgcccgactctcccacacatctccggcgctctcttcgagtcctcctgcagtcccgccgccttctcatcgctaccaaaattgcaaagccggactggaactcgcgtcgcgcgcaggggcatggacccggacgacgaaccagcggcgcagcggaaagccgtcgacttgcacctgccgcgcgacacggagcctgcctcctcgcccgcgtgcacccgccgcgccgcgccgcgcgtgctcagctactgtgacgtccctttcgcctccgcctcggcgcagcgctgcgcatcattcccgcagcgccacggagagctggcgcacgcccgctcggcctccttcgcagcctggatcgaaggcggctcggcgtcggcgccggcggcggcactcgagcgggccatgtcgcagtacggcggtgcggacggcgcgctgccagagttcgtcggcgccggcggtggcgagggcatcttccgcgtgccgctccgcgcggcgatgcacccggcgcgcccgccgccgctcgaggtgcggccccacccgctgcgggagacacaggcgggcgcctttctgaggacgctggcctgcgacccgcggcgacggcagctgtgggcgggcgccgagtccggggttcgagtgtggggcctccacgaggtgttccgtgggtggtggccgggcgccgggccgcggcgccgcggtgacgaggaggccgcgccgttcagagagtccgtgccggtcccgcccgcgctctgcgccgctgtcgacggcgctaacgggatggtgtggacggggcacagggacggcaggatcagggcgtggcgcatggaccacgccgcgcccgccggaggatactccgccggcagtgcgcccatgttcaaggaggccctctcgtggcaggcgtacagtcgcacgccggtgctcgccatcgtcgtcacgttggatgctaagactagggaacttttaaaagtatttggcatcgatggacaagtcgacttagctcgtcctgaggccccagtaatgcccgaacaattcatagaggaagagattaaagtaaaacccacaaaaagggagaggccgcaaggttctttcacattttttcagaaatctaggaatgccttgatgggcgcagctgatgctgtacgcagagttgcaacaaaagggacatttgtcgaagataatcggcgaactgaagcagtggctcaagcaatgaatgggacaatttggtctggttgcacagatggttcaattattgtttgggatggaaatgggaatagactgcgagaatttcattaccatagttcttctgttcgatgcataaagacactcggagacaaggtttgggtgggctatgcaagtggcactattcaagttgtcgatgtcgaaggtaaccttcaggcaggatggattggtcatagctgcccagtcatagacatggcaattagtgattcttacattttttctttggcacatcatggtggtattcgaggatggcctctaagttcccctagctccctagatgatattctatgctatgagttggctagcagggaactgttatacacaaggctagagaaccttaaaatactggttgggacttggaatgttgcacaagagaaagcttctcctgaagcactaaggtcatggttgggtggtgcattttttgatgttgggctggtggtggttggtttgcaagaggtcgagatgggtgctggagttcttgccatggcagctgccaaagaaagtggcttgaaggcagtgccaatgggcagtggtggatagacagtattggcaaaacacttgatgagggaatatccttccacagagttggttcaaggcagttggcaggactacttattgctgcatgggcaacgaatgaccttaggccacatgttggtgatgttgatactgctgcagtgccatgtggctttgggcgtgctattggcaacaaggatatgttttgtaaacaatcattttgctgcacatcaagagaatgttagccgccgcaatgctgattttgaccgcatttatcggacaatgactttcaccaaacctcagggatctgcagcttctgctacagctgtccaattgcataaagcagctaatgaaaatcaagcagatgaaggtaggcctgatctggcagaagctgatatggttatcttccttggtgatttgaactaccgacttgatggcatcacctatgatgaagcaagggacatggtctcccagaggagctttgactggcttagagaaagggatcaacttcgagcggaaatgaaggcgggaaatgtgtttcagggaatgcgtgaaggcccaatcagatttcctccaacctacaagttccagagacaccagtcgggtctctcagggtatgattcaggcgagaagaagagaatacctgcttggtgcgacaggatactgtatcgagatagccgtcctgtaccaatagctgaatgctcattagagtgccctgtcgtcgctgcaatcacagcgtacgaatcttgcatggatgtcacagacagtgaccataaacccgtgagatgtacattcagcgtcgatattgcaagagtagacgagctgataaggaggcaagagtttggaaaaataatcgaatctaacaaaaaggttcgctctttgcttcgagagctccgttctgttccggacaccgtcgtcaacgcgaacaacattacattggaaaatcaccaagaagatgtcatcctccggataactaataactgtgaaaccagcaaggccgcttttgaaatcctgtgtgaaggccagacagtcagaaagcagggcggaacccaatctgaggagctgctcccaagggcgtcctttggcttcccactttggcttgaggtccaaccatcgatgggtctcatcggcccaggagaaacagcggaagtcgtcgtgcgccacgacgacttcctgacgcaggaagagtacgtcgacggagcacagcggaaccggtggcgcgaggccacccgagacctggaggtcgtgctctcggtgacagtcacgggcagctccagctcctcggccgaggccgtcgcgcacagggtcaccgtccggcactgctgcccggcgcctccggctcccctgcccgccaaccggcgctctgccgctgcctcgcctcgtgacgacgttgccgcgtcggataaccagtcgaaccacctgcaccgttccgatctcgccagcttcggtagctcggaggtgcgtgacctgtgcgggggcttgtgaaagcgagtttcgctgcctttgcttcatcgtcctgcattcctgctccttacatgtgcgtcgtcctgccgttctttgcgtgtcgaatcaaaaagcgagagagaaagaaagagagaggaaaaaaaaggaagaaagaagagagtgcaattgttgtaattacctgtagtaggtaaaattttcaagctaaccttttttttttgaccttcttaagttaagtagtagatgtggcattgaaattgtgttggtgcaaagtggagtgagtgtatggttgtatgtatagtaatggaggttgtatgcttgtatagtctattgattggacgatgctttgctcctactgcaatacagcgcaacgagaactgcagctgctcgcctgctcctacagcaacgccacaccgcttctttttttttaaaaaaaaaacagagagatagagagag

SEQ ID NO: 39436 - DNA, 3991 bp, Zea Mays
gttgcctcaccacccctctgtccctgcttccttctgctcccgcaacgggtggcctccgttccccgaccccgcccgactctcccacacatctccggcgctctcttcgagtcctcctgcagtcccgccgccttctcatcgctaccaaaattgcaaagccggactggaactcgcgtcgcgcgcaggggcatggacccggacgacgaaccagcggcgcagcggaaagccgtcgacttgcacctgccgcgcgacacggagcctgcctcctcgcccgcgtgcacccgccgcgccgcgccgcgcgtgctcagctactgtgacgtccctttcgcctccgcctcggcgcagcgctgcgcatcattcccgcagcgccacggagagctggcgcacgcccgctcggcctccttcgcagcctggatcgaaggcggctcggcgtcggcgccggcggcggcactcgagcgggccatgtcgcagtacggcggtgcggacggcgcgctgccagagttcgtcggcgccggcggtggcgagggcatcttccgcgtgccgctccgcgcggcgatgcacccggcgcgcccgccgccgctcgaggtgcggccccacccgctgcgggagacacaggcgggcgcctttctgaggacgctggcctgcgacccgcggcgacggcagctgtgggcgggcgccgagtccggggttcgagtgtggggcctccacgaggtgttccgtgggtggtggccgggcgccgggccgcggcgccgcggtgacgaggaggccgcgccgttcagagagtccgtgccggtcccgcccgcgctctgcgccgctgtcgacggcgctaacgggatggtgtggacggggcacagggacggcaggatcagggcgtggcgcatggaccacgccgcgcccgccggaggatactccgccggcagtgcgcccatgttcaaggaggccctctcgtggcaggcgtacagtcgcacgccggtgctcgccatcgtcgtcacgttgtacggtgaaatttggtccggatcagaaggcggtgccataaaggcatggccttgggacaccattgctaagtccctctcatttacatcaggagaacgtcataacgctgcctcgctggttgaaaaatcttatattgaccttagaaaccatgctacaattggtaacatgtgctcattgcctgctgctgatgtgaaacacatgctcgcagacaactgccgagcgaaaatttggagtctaactagcatgacatttgctctttgggatgctaagactagggaacttttaaaagtatttggcatcgatggacaagtcgacttagctcgtcctgaggccccagtaatgcccgaacaattcatagaggaagagattaaagtaaaacccacaaaaagggagaggccgcaaggttctttcacattttttcagaaatctaggaatgccttgatgggcgcagctgatgctgtacgcagagttgcaacaaaagggacatttgtcgaagataatcggcgaactgaagcagtggctcaagcaatgaatgggacaatttggtctggttgcacagatggttcaattattgtttgggatggaaatgggaatagactgcgagaatttcattaccatagttcttctgttcgatgcataaagacactcggagacaaggtttgggtgggctatgcaagtggcactattcaagttgtcgatgtcgaaggtaaccttcaggcaggatggattggtcatagctgcccagtcatagacatggcaattagtgattcttacattttttctttggcacatcatggtggtattcgaggatggcctctaagttcccctagctccctagatgatattctatgctatgagttggctagcagggaactgttatacacaaggctagagaaccttaaaatactggttgggacttggaatgttgcacaagagaaagcttctcctgaagcactaaggtcatggttgggtggtgcattttttgatgttgggctggtggtggttggtttgcaagaggtcgagatgggtgctggagttcttgccatggcagctgccaaagaaagtgtagggcttgaaggcagtgccaatgggcagtggtggatagacagtattggcaaaacacttgatgagggaatatccttccacagagttggttcaaggcagttggcaggactacttattgctgcatgggcaacgaatgaccttaggccacatgttggtgatgttgatactgctgcagtgccatgtggctttgggcgtgctattggcaacaagggtggcgtcggattaagaataagagtctttggtcgcaggatatgttttgtaaacaatcattttgctgcacatcaagagaatgttagccgccgcaatgctgattttgaccgcatttatcggacaatgactttcaccaaacctcagggatctgcaggctaatgaaaatcaagcagatgaaggtaggcctgatctggcagaagctgatatggttatcttccttggtgatttgaactaccgacttgatggcatcacctatgatgaagcaagggacatggtctcccagaggagctttgactggcttagagaaagggatcaacttcgagcggaaatgaaggcgggaaatgtgtttcagggaatgcgtgaaggcccaatcagatttcctccaacctacaagttccagagacaccagtcgggtctctcagggtatgattcaggcgagaagaagagaatacctgcttggtgcgacaggatactgtatcgagatagccgtcctgtaccaatagctgaatgctcattagagtgccctgtcgtcgctgcaatcacagcgtacgaatcttgcatggatgtcacagacagtgaccataaacccgtgagatgtacattcagcgtcgatattgcaagagtagacgagctgataaggaggcaagagtttggaaaaataatcgaatctaacaaaaaggttcgctctttgcttcgagagctccgttctgttccggacaccgtcgtcaacgcgaacaacattacattggaaaatcaccaagaagatgtcatcctccggataactaataactgtgaaaccagcaaggccgcttttgaaatcctgtgtgaaggccagacagtcagaaagcagggcggaacccaatctgaggagctgctcccaagggcgtcctttggcttcccactttggcttgaggtccaaccatcgatgggtctcatcggcccaggagaaacagcggaagtcgtcgtgcgccacgacgacttcctgacgcaggaagagtacgtcgacggagcacagcggaaccggtggcgcgaggccacccgagacctggaggtcgtgctctcggtgacagtcacgggcagctccagctcctcggccgaggccgtcgcgcacagggtcaccgtccggcactgctgcccggcgcctccggctcccctgcccgccaaccggcgctctgccgctgcctcgcctcgtgacgacgttgccgcgtcggataaccagtcgaaccacctgcaccgttccgatctcgccagcttcggtagctcggaggtgcgtgacctgtgcgggggcttgtgaaagcgagtttcgctgcctttgcttcatcgtcctgcattcctgctccttacatgtgcgtcgtcctgccgttctttgcgtgtcgaatcaaaaagcgagagagaaagaaagagagaggaaaaaaaaggaagaaagaagagagtgcaattgttgtaattacctgtagtaggtaaaattttcaagctaaccttttttttttgaccttcttaagttaagtagtagatgtggcattgaaattgtgttggtgcaaagtggagtgagtgtatggttgtatgtatagtaatggaggttgtatgcttgtatagtctattgattggacgatgctttgctcctactgcaatacagcgcaacgagaactgcagctgctcgcctgctcctacagcaacgccacaccgcttctttttttttaaaaaaaaaacagagagatagagagag

SEQ ID NO: 39437 - DNA, 3770 bp, Zea Mays
gttgcctcaccacccctctgtccctgcttccttctgctcccgcaacgggtggcctccgttccccgaccccgcccgactctcccacacatctccggcgctctcttcgagtcctcctgcagtcccgccgccttctcatcgctaccaaaattgcaaagccggactggaactcgcgtcgcgcgcaggggcatggacccggacgacgaaccagcggcgcagcggaaagccgtcgacttgcacctgccgcgcgacacggagcctgcctcctcgcccgcgtgcacccgccgcgccgcgccgcgcgtgctcagctactgtgacgtccctttcgcctccgcctcggcgcagcgctgcgcatcattcccgcagcgccacggagagctggcgcacgcccgctcggcctccttcgcagcctggatcgaaggcggctcggcgtcggcgccggcggcggcactcgagcgggccatgtcgcagtacggcggtgcggacggcgcgctgccagagttcgtcggcgccggcggtggcgagggcatcttccgcgtgccgctccgcgcggcgatgcacccggcgcgcccgccgccgctcgaggtgcggccccacccgctgcgggagacacaggcgggcgcctttctgaggacgctggcctgcgacccgcggcgacggcagctgtgggcgggcgccgagtccggggttcgagtgtggggcctccacgaggtgttccgtgggtggtggccgggcgccgggccgcggcgccgcggtgacgaggaggccgcgccgttcagagagtccgtgccggtcccgcccgcgctctgcgccgctgtcgacggcgctaacgggatggtgtggacggggcacagggacggcaggatcagggcgtggcgcatggaccacgccgcgcccgccggaggatactccgccggcagtgcgcccatgttcaaggaggccctctcgtggcaggcgtacagtcgcacgccggtgctcgccatcgtcgtcacgttgtacgggatgctaagactagggaacttttaaaagtatttggcatcgatggacaagtcgacttagctcgtcctgaggccccagtaatgcccgaacaattcatagaggaagagattaaagtaaaacccacaaaaagggagaggccgcaaggttctttcacattttttcagaaatctaggaatgccttgatgggcgcagctgatgctgtacgcagagttgcaacaaaagggacatttgtcgaagataatcggcgaactgaagcagtggctcaagcaatgaatgggacaatttggtctggttgcacagatggttcaattattgtttgggatggaaatgggaatagactgcgagaatttcattaccatagttcttctgttcgatgcataaagacactcggagacaaggtttgggtgggctatgcaagtggcactattcaagttgtcgatgtcgaaggtaaccttcaggcaggatggattggtcatagctgcccagtcatagacatggcaattagtgattcttacattttttctttggcacatcatggtggtattcgaggatggcctctaagttcccctagctccctagatgatattctatgctatgagttggctagcagggaactgttatacacaaggctagagaaccttaaaatactggttgggacttggaatgttgcacaagagaaagcttctcctgaagcactaaggtcatggttgggtggtgcattttttgatgttgggctggtggtggttggtttgcaagaggtcgagatgggtgctggagttcttgccatggcagctgccaaagaaagtgtagggcttgaaggcagtgccaatgggcagtggtggatagacagtattggcaaaacacttgatgagggaatatccttccacagagttggttcaaggcagttggcaggactacttattgctgcatgggcaacgaatgaccttaggccacatgttggtgatgttgatactgctgcagtgccatgtggctttgggcgtgctattggcaacaagggtggcgtcggattaagaataagagtctttggtcgcaggatatgttttgtaaacaatcattttgctgcacatcaagagaatgttagccgccgcaatgctgattttgaccgcatttatcggacaatgactttcaccaaacctcagggatctgcagcttctgctacagctgtccaattgcataaagcagctaatgaaaatcaagcagatgaaggtaggcctgatctggcagaagctgatatggttatcttccttggtgatttgaactaccgacttgatggcatcacctatgatgaagcaagggacatggtctcccagaggagctttgactggcttagagaaagggatcaacttcgagcggaaatgaaggcgggaaatgtgtttcagggaatgcgtgaaggcccaatcagatttcctccaacctacaagttccagagacaccagtcgggtctctcagggtatgattcaggcgagaagaagagaatacctgcttggtgcgacaggatactgtatcgagatagccgtcctgtaccaatagctgaatgctcattagagtgccctgtcgtcgctgcaatcacagcgtacgaatcttgcatggatgtcacagacagtgaccataaacccgtgagatgtacattcagcgtcgatattgcaagagtagacgagctgataaggaggcaagagtttggaaaaataatcgaatctaacaaaaaggttcgctctttgcttcgagagctccgttctgttccggacaccgtcgtcaacgcgaacaacattacattggaaaatcaccaagaagatgtcatcctccggataactaataactgtgaaaccagcaaggccgcttttgaaatcctgtgtgaaggccagacagtcagaaagcagggcggaacccaatctgaggagctgctcccaagggcgtcctttggcttcccactttggcttgaggtccaaccatcgatgggtctcatcggcccaggagaaacagcggaagtcgtcgtgcgccacgacgacttcctgacgcaggaagagtacgtcgacggagcacagcggaaccggtggcgcgaggccacccgagacctggaggtcgtgctctcggtgacagtcacgggcagctccagctcctcggccgaggccgtcgcgcacagggtcaccgtccggcactgctgcccggcgcctccggctcccctgcccgccaaccggcgctctgccgctgcctcgcctcgtgacgacgttgccgcgtcggataaccagtcgaaccacctgcaccgttccgatctcgccagcttcggtagctcggaggtgcgtgacctgtgcgggggcttgtgaaagcgagtttcgctgcctttgcttcatcgtcctgcattcctgctccttacatgtgcgtcgtcctgccgttctttgcgtgtcgaatcaaaaagcgagagagaaagaaagagagaggaaaaaaaaggaagaaagaagagagtgcaattgttgtaattacctgtagtaggtaaaattttcaagctaaccttttttttttgaccttcttaagttaagtagtagatgtggcattgaaattgtgttggtgcaaagtggagtgagtgtatggttgtatgtatagtaatggaggttgtatgcttgtatagtctattgattggacgatgctttgctcctactgcaatacagcgcaacgagaactgcagctgctcgcctgctcctacagcaacgccacaccgcttctttttttttaaaaaaaaaacagagagatagagagag

SEQ ID NO: 39438 - DNA, 3905 bp, Zea Mays
gttgcctcaccacccctctgtccctgcttccttctgctcccgcaacgggtggcctccgttccccgaccccgcccgactctcccacacatctccggcgctctcttcgagtcctcctgcagtcccgccgccttctcatcgctaccaaaattgcaaagccggactggaactcgcgtcgcgcgcaggggcatggacccggacgacgaaccagcggcgcagcggaaagccgtcgacttgcacctgccgcgcgacacggagcctgcctcctcgcccgcgtgcacccgccgcgccgcgccgcgcgtgctcagctactgtgacgtccctttcgcctccgcctcggcgcagcgctgcgcatcattcccgcagcgccacggagagctggcgcacgcccgctcggcctccttcgcagcctggatcgaaggcggctcggcgtcggcgccggcggcggcactcgagcgggccatgtcgcagtacggcggtgcggacggcgcgctgccagagttcgtcggcgccggcggtggcgagggcatcttccgcgtgccgctccgcgcggcgatgcacccggcgcgcccgccgccgctcgaggtgcggccccacccgctgcgggagacacaggcgggcgcctttctgaggacgctggcctgcgacccgcggcgacggcagctgtgggcgggcgccgagtccggggttcgagtgtggggcctccacgaggtgttccgtgggtggtggccgggcgccgggccgcggcgccgcggtgacgaggaggccgcgccgttcagagagtccgtgccggtcccgcccgcgctctgcgccgctgtcgacggcgctaacgggatggtgtggacggggcacagggacggcaggatcagggcgtggcgcatggaccacgccgcgcccgccggaggatactccgccggcagtgcgcccatgttcaaggaggccctctcgtggcaggcgtacagtcgcacgccggtgctcgccatcgtcgtcacgttggatgctaagactagggaacttttaaaagtatttggcatcgatggacaagtcgacttagctcgtcctgaggccccagtaatgcccgaacaattcatagaggaagagattaaagtaaaacccacaaaaagggagaggccgcaaggttctttcacattttttcagaaatctaggaatgccttgatgggcgcagctgatgctgtacgcagagttgcaacaaaagggacatttgtcgaagataatcggcgaactgaagcagtggctcaagcaatgaatgggacaatttggtctggttgcacagatggttcaattattgtttgggatggaaatgggaatagactgcgagaatttcattaccatagttcttctgttcgatgcataaagacactcggagacaaggtttgggtgggctatgcaagtggcactattcaagttgtcgatgtcgaaggtaaccttcaggcaggatggattggtcatagctgcccagtcatagacatggcaattagtgattcttacattttttctttggcacatcatggtggtattcgaggatggcctctaagttcccctagctccctagatgatattctatgctatgagttggctagcagggaactgttatacacaaggctagagaaccttaaaatactggttgggacttggaatgttgcacaagagaaagcttctcctgaagcactaaggtcatggttgggtggtgcattttttgatgttgggctggtggtggttggtttgcaagaggtcgagatgggtgctggagttcttgccatggcagctgccaaagaaagtggcttgaaggcagtgccaatgggcagtggtggatagacagtattggcaaaacacttgatgagggaatatccttccacagagttggttcaaggcagttggcaggactacttattgctgcatgggcaacgaatgaccttaggccacatgttggtgatgttgatactgctgcagtgccatgtggctttgggcgtgctattggcaacaagggtggcgtcggattaagaataagagtctttggtcgcaggatatgttttgtaaacaatcattttgctgcacatcaagagaatgttagccgccgcaatgctgattttgaccgcatttatcggacaatgactttcaccaaacctcagggatctgcagcttctgctacagctgtccaattgcataaagcagtgagtgctaatgaaaatcaagcagatgaaggtaggcctgatctggcagaagctgatatggttatcttccttggtgatttgaactaccgacttgatggcatcacctatgatgaagcaagggacatggtctcccagaggagctttgactggcttagagaaagggatcaacttcgagcggaaatgaaggcgggaaatgtgtttcagggaatgcgtgaaggcccaatcagatttcctccaacctacaagttccagagacaccagtcgggtctctcaggtacactgcatttgatgctgcctcatagtacttgccttgcctcttaaaaatgtgcatctttcgctgctctatggacagtaacagtactcgtaccgcctgcttgagatatgagtttgttccgtcatctccatatatgcagggtatgattcaggcgagaagaagagaatacctgcttggtgcgacaggatactgtatcgagatagccgtcctgtaccaatagctgaatgctcattagagtgccctgtcgtcgctgcaatcacagctacgaatcttgcatggatgtcacagacagtgaccataaacccgtgagatgtacattcagcgtcgatattgcaagagtagacgagctgataaggaggcaagagtttggaaaaataatcgaatctaacaaaaaggttcgctctttgcttcgagagctccgttctgttccggacaccgtcgtcaacgcgaacaacattacattggaaaatcaccaagaagatgtcatcctccggataactaataactgtgaaaccagcaaggccgcttttgaaatcctgtgtgaaggccagacagtcagaaagcagggcggaacccaatctgaggagctgctcccaagggcgtcctttggcttcccactttggcttgaggtccaaccatcgatgggtctcatcggcccaggagaaacagcggaagtcgtcgtgcgccacgacgacttcctgacgcaggaagagtacgtcgacggagcacagcggaaccggtggcgcgaggccacccgagacctggaggtcgtgctctcggtgacagtcacgggcagctccagctcctcggccgaggccgtcgcgcacagggtcaccgtccggcactgctgcccggcgcctccggctcccctgcccgccaaccggcgctctgccgctgcctcgcctcgtgacgacgttgccgcgtcggataaccagtcgaaccacctgcaccgttccgatctcgccagcttcggtagctcggaggtgcgtgacctgtgcgggggcttgtgaaagcgagtttcgctgcctttgcttcatcgtcctgcattcctgctccttacatgtgcgtcgtcctgccgttctttgcgtgtcgaatcaaaaagcgagagagaaagaaagagagaggaaaaaaaaggaagaaagaagagagtgcaattgttgtaattacctgtagtaggtaaaattttcaagctaaccttttttttttgaccttcttaagttaagtagtagatgtggcattgaaattgtgttggtgcaaagtggagtgagtgtatggttgtatgtatagtaatggaggttgtatgcttgtatagtctattgattggacgatgctttgctcctactgcaatacagcgcaacgagaactgcagctgctcgcctgctcctacagcaacgccacaccgcttctttttttttaaaaaaaaaacagagagatagagagag

SEQ ID NO: 39439 - DNA, 3733 bp, Zea Mays
gttgcctcaccacccctctgtccctgcttccttctgctcccgcaacgggtggcctccgttccccgaccccgcccgactctcccacacatctccggcgctctcttcgagtcctcctgcagtcccgccgccttctcatcgctaccaaaattgcaaagccggactggaactcgcgtcgcgcgcaggggcatggacccggacgacgaaccagcggcgcagcggaaagccgtcgacttgcacctgccgcgcgacacggagcctgcctcctcgcccgcgtgcacccgccgcgccgcgccgcgcgtgctcagctactgtgacgtccctttcgcctccgcctcggcgcagcgctgcgcatcattcccgcagcgccacggagagctggcgcacgcccgctcggcctccttcgcagcctggatcgaaggcggctcggcgtcggcgccggcggcggcactcgagcgggccatgtcgcagtacggcggtgcggacggcgcgctgccagagttcgtcggcgccggcggtggcgagggcatcttccgcgtgccgctccgcgcggcgatgcacccggcgcgcccgccgccgctcgaggtgcggccccacccgctgcgggagacacaggcgggcgcctttctgaggacgctggcctgcgacccgcggcgacggcagctgtgggcgggcgccgagtccggggttcgagtgtggggcctccacgaggtgttccgtgggtggtggccgggcgccgggccgcggcgccgcggtgacgaggaggccgcgccgttcagagagtccgtgccggtcccgcccgcgctctgcgccgctgtcgacggcgctaacgggatggtgtggacggggcacagggacggcaggatcagggcgtggcgcatggaccacgccgcgcccgccggaggatactccgccggcagtgcgcccatgttcaaggaggccctctcgtggcaggcgtacagtcgcacgccggtgctcgccatcgtcgtcacgttggatgctaagactagggaacttttaaaagtatttggcatcgatggacaagtcgacttagctcgtcctgaggccccagtaatgcccgaacaattcatagaggaagagattaaagtaaaacccacaaaaagggagaggccgcaaggttctttcacattttttcagaaatctaggaatgccttgatgggcgcagctgatgctgtacgcagagttgcaacaaaagggacatttgtcgaagataatcggcgaactgaagcagtggctcaagcaatgaatgggacaatttggtctggttgcacagatggttcaattattgtttgggatggaaatgggaatagactgcgagaatttcattaccatagttcttctgttcgatgcataaagacactcggagacaaggtttgggtgggctatgcaagtggcactattcaagttgtcgatgtcgaaggtaaccttcaggcaggatggattggtcatagctgcccagtcatagacatggcaattagtgattcttacattttttctttggcacatcatggtggtattcgaggatggcctctaagttcccctagctccctagatgatattctatgctatgagttggctagcagggaactgttatacacaaggctagagaaccttaaaatactggttgggacttggaatgttgcacaagagaaagcttctcctgaagcactaaggtcatggttgggtggtgcattttttgatgttgggctggtggtggttggtttgcaagaggtcgagatgggtgctggagttcttgccatggcagctgccaaagaaagtctctcttatggccttaggtagggcttgaaggcagtgccaatgggcagtggtggatagacagtattggcaaaacacttgatgagggaatatccttccacagagttggttcaaggcagttggcaggactacttattgctgcatgggcaacgaatgaccttaggccacatgttggtgatgttgatactgctgcagtgccatgtggctttgggcgtgctattggcaacaagggtggcgtcggattaagaataagagtctttggtcgcaggatatgttttgtaaacaatcattttgctgcacatcaagagaatgttagccgccgcaatgctgattttgaccgcatttatcggacaatgactttcaccaaacctcagggatctgcagcttctgctacagctgtccaattgcataaagcagtgagtgcatgcgatcatcaagctttgttcgcggcaataactggctaggtttcgtcttggcaagggacatggtctcccagaggagctttgactggcttagagaaagggatcaacttcgagcggaaatgaaggcgggaaatgtgtttcagggaatgcgtgaaggcccaatcagatttcctccaacctacaagttccagagacaccagtcgggtctctcagggtatgattcaggcgagaagaagagaatacctgcttggtgcgacaggatactgtatcgagatagccgtcctgtaccaatagctgaatgctcattagagtgccctgtcgtcgctgcaatcacagcgtacgaatcttgcatggatgtcacagacagtgaccataaacccgtgagatgtacattcagcgtcgatattgcaagagtagacgagctgataaggaggcaagagtttggaaaaataatcgaatctaacaaaaaggttcgctctttgcttcgagagctccgttctgttccggacaccgtcgtcaacgcgaacaacattacattggaaaatcaccaagaagatgtcatcctccggataactaataactgtgaaaccagcaaggccgcttttgaaatcctgtgtgaaggccagacagtcagaaagcagggcggaacccaatctgaggagctgctcccaagggcgtcctttggcttcccactttggcttgaggtccaaccatcgatgggtctcatcggcccaggagaaacagcggaagtcgtcgtgcgccacgacgacttcctgacgcaggaagagtacgtcgacggagcacagcggaaccggtggcgcgaggccacccgagacctggaggtcgtgctctcggtgacagtcacgggcagctccagctcctcggccgaggccgtcgcgcacagggtcaccgtccggcactgctgcccggcgcctccggctcccctgcccgccaaccggcgctctgccgctgcctcgcctcgtgacgacgttgccgcgtcggataaccagtcgaaccacctgcaccgttccgatctcgccagcttcggtagctcggaggtgcgtgacctgtgcgggggcttgtgaaagcgagtttcgctgcctttgcttcatcgtcctgcattcctgctccttacatgtgcgtcgtcctgccgttctttgcgtgtcgaatcaaaaagcgagagagaaagaaagagagaggaaaaaaaaggaagaaagaagagagtgcaattgttgtaattacctgtagtaggtaaaattttcaagctaaccttttttttttgaccttcttaagttaagtagtagatgtggcattgaaattgtgttggtgcaaagtggagtgagtgtatggttgtatgtatagtaatggaggttgtatgcttgtatagtctattgattggacgatgctttgctcctactgcaatacagcgcaacgagaactgcagctgctcgcctgctcctacagcaacgccacaccgcttctttttttttaaaaaaaaaacagagagatagagagag

SEQ ID NO: 39440 - DNA, 3782 bp, Zea Mays
gttgcctcaccacccctctgtccctgcttccttctgctcccgcaacgggtggcctccgttccccgaccccgcccgactctcccacacatctccggcgctctcttcgagtcctcctgcagtcccgccgccttctcatcgctaccaaaattgcaaagccggactggaactcgcgtcgcgcgcaggggcatggacccggacgacgaaccagcggcgcagcggaaagccgtcgacttgcacctgccgcgcgacacggagcctgcctcctcgcccgcgtgcacccgccgcgccgcgccgcgcgtgctcagctactgtgacgtccctttcgcctccgcctcggcgcagcgctgcgcatcattcccgcagcgccacggagagctggcgcacgcccgctcggcctccttcgcagcctggatcgaaggcggctcggcgtcggcgccggcggcggcactcgagcgggccatgtcgcagtacggcggtgcggacggcgcgctgccagagttcgtcggcgccggcggtggcgagggcatcttccgcgtgccgctccgcgcggcgatgcacccggcgcgcccgccgccgctcgaggtgcggccccacccgctgcgggagacacaggcgggcgcctttctgaggacgctggcctgcgacccgcggcgacggcagctgtgggcgggcgccgagtccggggttcgagtgtggggcctccacgaggtgttccgtgggtggtggccgggcgccgggccgcggcgccgcggtgacgaggaggccgcgccgttcagagagtccgtgccggtcccgcccgcgctctgcgccgctgtcgacggcgctaacgggatggtgtggacggggcacagggacggcaggatcagggcgtggcgcatggaccacgccgcgcccgccggaggatactccgccggcagtgcgcccatgttcaaggaggccctctcgtggcaggcgtacagtcgcacgccggtgctcgccatcgtcgtcacgttggatgctaagactagggaacttttaaaagtatttggcatcgatggacaagtcgacttagctcgtcctgaggccccagtaatgcccgaacaattcatagaggaagagattaaagtaaaacccacaaaaagggagaggccgcaaggttctttcacattttttcagaaatctaggaatgccttgatgggcgcagctgatgctgtacgcagagttgcaacaaaagggacatttgtcgaagataatcggcgaactgaagcagtggctcaagcaatgaatgggacaatttggtctggttgcacagatggttcaattattgtttgggatggaaatgggaatagactgcgagaatttcattaccatagttcttctgttcgatgcataaagacactcggagacaaggtttgggtgggctatgcaagtggcactattcaagttgtcgatgtcgaaggtaaccttcaggcaggatggattggtcatagctgcccagtcatagacatggcaattagtgattcttacattttttctttggcacatcatggtggtattcgaggatggcctctaagttcccctagctccctagatgatattctatgctatgagttggctagcagggaactgttatacacaaggctagagaaccttaaaatactggttgggacttggaatgttgcacaagagaaagcttctcctgaagcactaaggtcatggttgggtggtgcattttttgatgttgggctggtggtggttggtttgcaagaggtcgagatgggtgctggagttcttgccatggcagctgccaaagaaagtctctcttatggccttaggtagggcttgaaggcagtgccaatgggcagtggtggatagacagtattggcaaaacacttgatgagggaatatccttccacagagttggttcaaggcagttggcaggactacttattgctgcatgggcaacgaatgaccttaggccacatgttggtgatgttgatactgctgcagtgccatgtggctttgggcgtgctattggcaacaagggtggcgtcggattaagaataagagtctttggtcgcaggatatgttttgtaaacaatcattttgctgcacatcaagagaatgttagccgccgcaatgctgattttgaccgcatttatcggacaatgactttcaccaaacctcagggatctgcagcttctgctacagctgtccaattgcataaagcagctaatgaaaatcaagcagatgaaggtaggcctgatctggcagaagctgatatggttatcttccttggtgatttgaactaccgacttgatggcatcacctatgatgaagcaagggacatggtctcccagaggagctttgactggcttagagaaagggatcaacttcgagcggaaatgaaggcgggaaatgtgtttcagggaatgcgtgaaggcccaatcagatttcctccaacctacaagttccagagacaccagtcgggtctctcagggtatgattcaggcgagaagaagagaatacctgcttggtgcgacaggatactgtatcgagatagccgtcctgtaccaatagctgaatgctcattagagtgccctgtcgtcgctgcaatcacagcgtacgaatcttgcatggatgtcacagacagtgaccataaacccgtgagatgtacattcagcgtcgatattgcaagagtagacgagctgataaggaggcaagagtttggaaaaataatcgaatctaacaaaaaggttcgctctttgcttcgagagctccgttctgttccggacaccgtcgtcaacgcgaacaacattacattggaaaatcaccaagaagatgtcatcctccggataactaataactgtgaaaccagcaaggccgcttttgaaatcctgtgtgaaggccagacagtcagaaagcagggcggaacccaatctgaggagctgctcccaagggcgtcctttggcttcccactttggcttgaggtccaaccatcgatgggtctcatcggcccaggagaaacagcggaagtcgtcgtgcgccacgacgacttcctgacgcaggaagagtacgtcgacggagcacagcggaaccggtggcgcgaggccacccgagacctggaggtcgtgctctcggtgacagtcacgggcagctccagctcctcggccgaggccgtcgcgcacagggtcaccgtccggcactgctgcccggcgcctccggctcccctgcccgccaaccggcgctctgccgctgcctcgcctcgtgacgacgttgccgcgtcggataaccagtcgaaccacctgcaccgttccgatctcgccagcttcggtagctcggaggtgcgtgacctgtgcgggggcttgtgaaagcgagtttcgctgcctttgcttcatcgtcctgcattcctgctccttacatgtgcgtcgtcctgccgttctttgcgtgtcgaatcaaaaagcgagagagaaagaaagagagaggaaaaaaaaggaagaaagaagagagtgcaattgttgtaattacctgtagtaggtaaaattttcaagctaaccttttttttttgaccttcttaagttaagtagtagatgtggcattgaaattgtgttggtgcaaagtggagtgagtgtatggttgtatgtatagtaatggaggttgtatgcttgtatagtctattgattggacgatgctttgctcctactgcaatacagcgcaacgagaactgcagctgctcgcctgctcctacagcaacgccacaccgcttctttttttttaaaaaaaaaacagagagatagagagag

SEQ ID NO: 39441 - DNA, 3767 bp, Zea Mays
gttgcctcaccacccctctgtccctgcttccttctgctcccgcaacgggtggcctccgttccccgaccccgcccgactctcccacacatctccggcgctctcttcgagtcctcctgcagtcccgccgccttctcatcgctaccaaaattgcaaagccggactggaactcgcgtcgcgcgcaggggcatggacccggacgacgaaccagcggcgcagcggaaagccgtcgacttgcacctgccgcgcgacacggagcctgcctcctcgcccgcgtgcacccgccgcgccgcgccgcgcgtgctcagctactgtgacgtccctttcgcctccgcctcggcgcagcgctgcgcatcattcccgcagcgccacggagagctggcgcacgcccgctcggcctccttcgcagcctggatcgaaggcggctcggcgtcggcgccggcggcggcactcgagcgggccatgtcgcagtacggcggtgcggacggcgcgctgccagagttcgtcggcgccggcggtggcgagggcatcttccgcgtgccgctccgcgcggcgatgcacccggcgcgcccgccgccgctcgaggtgcggccccacccgctgcgggagacacaggcgggcgcctttctgaggacgctggcctgcgacccgcggcgacggcagctgtgggcgggcgccgagtccggggttcgagtgtggggcctccacgaggtgttccgtgggtggtggccgggcgccgggccgcggcgccgcggtgacgaggaggccgcgccgttcagagagtccgtgccggtcccgcccgcgctctgcgccgctgtcgacggcgctaacgggatggtgtggacggggcacagggacggcaggatcagggcgtggcgcatggaccacgccgcgcccgccggaggatactccgccggcagtgcgcccatgttcaaggaggccctctcgtggcaggcgtacagtcgcacgccggtgctcgccatcgtcgtcacgttggatgctaagactagggaacttttaaaagtatttggcatcgatggacaagtcgacttagctcgtcctgaggccccagtaatgcccgaacaattcatagaggaagagattaaagtaaaacccacaaaaagggagaggccgcaaggttctttcacattttttcagaaatctaggaatgccttgatgggcgcagctgatgctgtacgcagagttgcaacaaaagggacatttgtcgaagataatcggcgaactgaagcagtggctcaagcaatgaatgggacaatttggtctggttgcacagatggttcaattattgtttgggatggaaatgggaatagactgcgagaatttcattaccatagttcttctgttcgatgcataaagacactcggagacaaggtttgggtgggctatgcaagtggcactattcaagttgtcgatgtcgaaggtaaccttcaggcaggatggattggtcatagctgcccagtcatagacatggcaattagtgattcttacattttttctttggcacatcatggtggtattcgaggatggcctctaagttcccctagctccctagatgatattctatgctatgagttggctagcagggaactgttatacacaaggctagagaaccttaaaatactggttgggacttggaatgttgcacaagagaaagcttctcctgaagcactaaggtcatggttgggtggtgcattttttgatgttgggctggtggtggttggtttgcaagaggtcgagatgggtgctggagttcttgccatggcagctgccaaagaaagtggcttgaaggcagtgccaatgggcagtggtggatagacagtattggcaaaacacttgatgagggaatatccttccacagagttggttcaaggcagttggcaggactacttattgctgcatgggcaacgaatgaccttaggccacatgttggtgatgttgatactgctgcagtgccatgtggctttgggcgtgctattggcaacaagggtggcgtcggattaagaataagagtctttggtcgcaggatatgttttgtaaacaatcattttgctgcacatcaagagaatgttagccgccgcaatgctgattttgaccgcatttatcggacaatgactttcaccaaacctcagggatctgcagcttctgctacagctgtccaattgcataaagcagtgagtgctaatgaaaatcaagcagatgaaggtaggcctgatctggcagaagctgatatggttatcttccttggtgatttgaactaccgacttgatggcatcacctatgatgaagcaagggacatggtctcccagaggagctttgactggcttagagaaagggatcaacttcgagcggaaatgaaggcgggaaatgtgtttcagggaatgcgtgaaggcccaatcagatttcctccaacctacaagttccagagacaccagtcgggtctctcagggtatgattcaggcgagaagaagagaatacctgcttggtgcgacaggatactgtatcgagatagccgtcctgtaccaatagctgaatgctcattagagtgccctgtcgtcgctgcaatcacagcgtacgaatcttgcatggatgtcacagacagtgaccataaacccgtgagatgtacattcagcgtcgatattgcaagagtagacgagctgataaggaggcaagagtttggaaaaataatcgaatctaacaaaaaggttcgctctttgcttcgagagctccgttctgttccggacaccgtcgtcaacgcgaacaacattacattggaaaatcaccaagaagatgtcatcctccggataactaataactgtgaaaccagcaaggccgcttttgaaatcctgtgtgaaggccagacagtcagaaagcagggcggaacccaatctgaggagctgctcccaagggcgtcctttggcttcccactttggcttgaggtccaaccatcgatgggtctcatcggcccaggagaaacagcggaagtcgtcgtgcgccacgacgacttcctgacgcaggaagagtacgtcgacggagcacagcggaaccggtggcgcgaggccacccgagacctggaggtcgtgctctcggtgacagtcacgggcagctccagctcctcggccgaggccgtcgcgcacagggtcaccgtccggcactgctgcccggcgcctccggctcccctgcccgccaaccggcgctctgccgctgcctcgcctcgtgacgacgttgccgcgtcggataaccagtcgaaccacctgcaccgttccgatctcgccagcttcggtagctcggaggtgcgtgacctgtgcgggggcttgtgaaagcgagtttcgctgcctttgcttcatcgtcctgcattcctgctccttacatgtgcgtcgtcctgccgttctttgcgtgtcgaatcaaaaagcgagagagaaagaaagagagaggaaaaaaaaggaagaaagaagagagtgcaattgttgtaattacctgtagtaggtaaaattttcaagctaaccttttttttttgaccttcttaagttaagtagtagatgtggcattgaaattgtgttggtgcaaagtggagtgagtgtatggttgtatgtatagtaatggaggttgtatgcttgtatagtctattgattggacgatgctttgctcctactgcaatacagcgcaacgagaactgcagctgctcgcctgctcctacagcaacgccacaccgcttctttttttttaaaaaaaaaacagagagatagagagag

SEQ ID NO: 39442 - DNA, 3771 bp, Zea Mays
gttgcctcaccacccctctgtccctgcttccttctgctcccgcaacgggtggcctccgttccccgaccccgcccgactctcccacacatctccggcgctctcttcgagtcctcctgcagtcccgccgccttctcatcgctaccaaaattgcaaagccggactggaactcgcgtcgcgcgcaggggcatggacccggacgacgaaccagcggcgcagcggaaagccgtcgacttgcacctgccgcgcgacacggagcctgcctcctcgcccgcgtgcacccgccgcgccgcgccgcgcgtgctcagctactgtgacgtccctttcgcctccgcctcggcgcagcgctgcgcatcattcccgcagcgccacggagagctggcgcacgcccgctcggcctccttcgcagcctggatcgaaggcggctcggcgtcggcgccggcggcggcactcgagcgggccatgtcgcagtacggcggtgcggacggcgcgctgccagagttcgtcggcgccggcggtggcgagggcatcttccgcgtgccgctccgcgcggcgatgcacccggcgcgcccgccgccgctcgaggtgcggccccacccgctgcgggagacacaggcgggcgcctttctgaggacgctggcctgcgacccgcggcgacggcagctgtgggcgggcgccgagtccggggttcgagtgtggggcctccacgaggtgttccgtgggtggtggccgggcgccgggccgcggcgccgcggtgacgaggaggccgcgccgttcagagagtccgtgccggtcccgcccgcgctctgcgccgctgtcgacggcgctaacgggatggtgtggacggggcacagggacggcaggatcagggcgtggcgcatggaccacgccgcgcccgccggaggatactccgccggcagtgcgcccatgttcaaggaggccctctcgtggcaggcgtacagtcgcacgccggtgctcgccatcgtcgtcacgttggatgctaagactagggaacttttaaaagtatttggcatcgatggacaagtcgacttagctcgtcctgaggccccagtaatgcccgaacaattcatagaggaagagattaaagtaaaacccacaaaaagggagaggccgcaaggttctttcacattttttcagaaatctaggaatgccttgatgggcgcagctgatgctgtacgcagagttgcaacaaaagggacatttgtcgaagataatcggcgaactgaagcagtggctcaagcaatgaatgggacaatttggtctggttgcacagatggttcaattattgtttgggatggaaatgggaatagactgcgagaatttcattaccatagttcttctgttcgatgcataaagacactcggagacaaggtttgggtgggctatgcaagtggcactattcaagttgtcgatgtcgaaggtaaccttcaggcaggatggattggtcatagctgcccagtcatagacatggcaattagtgattcttacattttttctttggcacatcatggtggtattcgaggatggcctctaagttcccctagctccctagatgatattctatgctatgagttggctagcagggaactgttatacacaaggctagagaaccttaaaatactggttgggacttggaatgttgcacaagagaaagcttctcctgaagcactaaggtcatggttgggtggtgcattttttgatgttgggctggtggtggttggtttgcaagaggtcgagatgggtgctggagttcttgccatggcagctgccaaagaaagtgtagggcttgaaggcagtgccaatgggcagtggtggatagacagtattggcaaaacacttgatgagggaatatccttccacagagttggttcaaggcagttggcaggactacttattgctgcatgggcaacgaatgaccttaggccacatgttggtgatgttgatactgctgcagtgccatgtggctttgggcgtgctattggcaacaagggtggcgtcggattaagaataagagtctttggtcgcaggatatgttttgtaaacaatcattttgctgcacatcaagagaatgttagccgccgcaatgctgattttgaccgcatttatcggacaatgactttcaccaaacctcagggatctgcagcttctgctacagctgtccaattgcataaagcagtgagtgctaatgaaaatcaagcagatgaaggtaggcctgatctggcagaagctgatatggttatcttccttggtgatttgaactaccgacttgatggcatcacctatgatgaagcaagggacatggtctcccagaggagctttgactggcttagagaaagggatcaacttcgagcggaaatgaaggcgggaaatgtgtttcagggaatgcgtgaaggcccaatcagatttcctccaacctacaagttccagagacaccagtcgggtctctcagggtatgattcaggcgagaagaagagaatacctgcttggtgcgacaggatactgtatcgagatagccgtcctgtaccaatagctgaatgctcattagagtgccctgtcgtcgctgcaatcacagcgtacgaatcttgcatggatgtcacagacagtgaccataaacccgtgagatgtacattcagcgtcgatattgcaagagtagacgagctgataaggaggcaagagtttggaaaaataatcgaatctaacaaaaaggttcgctctttgcttcgagagctccgttctgttccggacaccgtcgtcaacgcgaacaacattacattggaaaatcaccaagaagatgtcatcctccggataactaataactgtgaaaccagcaaggccgcttttgaaatcctgtgtgaaggccagacagtcagaaagcagggcggaacccaatctgaggagctgctcccaagggcgtcctttggcttcccactttggcttgaggtccaaccatcgatgggtctcatcggcccaggagaaacagcggaagtcgtcgtgcgccacgacgacttcctgacgcaggaagagtacgtcgacggagcacagcggaaccggtggcgcgaggccacccgagacctggaggtcgtgctctcggtgacagtcacgggcagctccagctcctcggccgaggccgtcgcgcacagggtcaccgtccggcactgctgcccggcgcctccggctcccctgcccgccaaccggcgctctgccgctgcctcgcctcgtgacgacgttgccgcgtcggataaccagtcgaaccacctgcaccgttccgatctcgccagcttcggtagctcggaggtgcgtgacctgtgcgggggcttgtgaaagcgagtttcgctgcctttgcttcatcgtcctgcattcctgctccttacatgtgcgtcgtcctgccgttctttgcgtgtcgaatcaaaaagcgagagagaaagaaagagagaggaaaaaaaaggaagaaagaagagagtgcaattgttgtaattacctgtagtaggtaaaattttcaagctaaccttttttttttgaccttcttaagttaagtagtagatgtggcattgaaattgtgttggtgcaaagtggagtgagtgtatggttgtatgtatagtaatggaggttgtatgcttgtatagtctattgattggacgatgctttgctcctactgcaatacagcgcaacgagaactgcagctgctcgcctgctcctacagcaacgccacaccgcttctttttttttaaaaaaaaaacagagagatagagagag

SEQ ID NO: 39443 - DNA, 2112 bp, Zea Mays
ccaacctcgctcccccctgtcctctgactcgccagctcccccgtcctcctccatcgcgctgcgcgtttgcaactcccagtcccacctccggcgcgtctgccagccagtagtcagtagacttgatcatgtcgtcgcggaagcatcacgagctgccggagggaggagcaggggaagcggcgccggccgcacggcggtgtgggacaccgagagctccctgtacgactcgtacgagctggccgccgtgcgccggctcctcgacaagcgcctcctcgccctccgcgacgctgaagagacgaggggcaagggcaggcaactggtggtcgtgccggtcgtcagcagcaggggggtccaccacaggaggaaggccacgctgagggcgctcttcagggcggtggccacctgtgcggccccgccgaggcaggcgccgccgctcgcctgtgcctgcgctgctggcatggtccatgaccaccagggtggttccgcggtcgagccggaggatctgccgtcccacggtcaactttgatgatcatccctgtgtttagtccatttgttcttgcattgcattggcgcaagttgtttttttccttttgtgtttatctattgctgtgggggtttttttacgctgtcctgttcatgcgatggttggccattgaagagtactgagcccaccggatctgtatacgtgaatctgcgtgaagcatacgaaagcttttggcgcgacgacaccgctgttgccgcagcccctcaggacgtcttgggtcttggctggcggtgtcggcggagctcagctaacagaagatgacgtagtgccctgggtcgcttgataagcagatgaacttggagctccggcgacgagctgcggaagcccgctatcttcacaacatctctcccggcattcaagagcgaataatgtcaataagtgataatgtcaataatgtcaataacacactaaacatgcctgcatctttcatatgtgtatttgtgctcaaatctttaattgctactgctgttgtttattttctcctgttgattgtgcacacgagaaattatatttgatcctcttagtggatttgatgcatgcagactggttatgggggttcttttcttcctggcataaagcaacggttgttgtcatatattttttgcaagacgtggaatgaggttccatatcagactttggttagttatcttgtttgaaccattttccagtagtatttgaacttctattgattctagatgactagatcatttacatataatctgacattaatctcattttttaaataactaacgaaagcttaaattcatattaaatgtgcccacctatttgtcatttacaaagaatagtactttatctatgcgtgttggcgtactgattgttgcttcatttgaaatgttgaaatgaaaacattcttattgcttattccttttttggtgatattactgccttctagacatgctttattaaagtgaaaatatttctctttttgtttgaacttcgaagtagtgatcttctcacgctgacctaaagaaccggttcttattaggtattacgccgtgtcttctcacgctgaccttattttataaattgttaacagaattcttcggaggatatctatgcgtggtactgattaagtaaaagacgttattagtgatgcattttcacaaataaaagtctataaaaccatagcagtcttcagtcctcagtattttctctgaattcttcgaactttctttaggattgattgcagatcattgatttgtgttattaatgggattgatttgtgttattaatgggatgtactgattatatatattaatgagtatccgttttaactgtaggacattgtgatatttcctgaagatttgtataagtttgtaatttatataaagaagtttgtaagatgcaattaacatgacattattaaattatatatagaagtctgtgtggtactgatggttgtaatgtagtagagaaatgagtgatggttgtaatgtagtagagaaatgagtgatggttgtaatgtagtagagaaatgggtagattaaatttaaaaaaaattatgtatagctaggatcataaatatattatgaaactttttctcataaaag

SEQ ID NO: 39444 - DNA, 1449 bp, Zea Mays
ccaacctcgctcccccctgtcctctgactcgccagctcccccgtcctcctccatcgcgctgcgcgtttgcaactcccagtcccacctccggcgcgtctgccagccagtagtcagtagacttgatcatgtcgtcgcggaagcatcacgagctgccggagggaggagcaggggaagcggcgccggccgcacggcggtgtgggacaccgagagctccctgtacgactcgtacgagctggccgccgtgcgccggctcctcgacaagcgcctcctcgccctccgcgacgctgaagagacgaggggcaagggcaggcaactggtggtcgtgccggtcgtcagcagcaggggggtccaccacaggaggaaggccacgctgagggcgctcttcagggcggtggccacctgtgcggccccgccgaggcaggcgccgccgctcgcctgtgcctgcgctgctggcatggtccatgaccaccagggtggttccgcggtcgagccggaggatctgccgtcccacggtcaactttgatgatcatccctgtgtttagtccatttgttcttgcattgcattggcgcaagttgtttttttccttttgtgtttatctattgctgtgggggtttttttacgctgtcctgttcatgcgatggttggccattgaagagtactgagcccaccggatctgtatacgtgaatctgcgtgaagcatacgaaagcttttggcgcgacgacaccgctgttgccgcagcccctcaggacgtcttgggtcttggctggcggtgtcggcggagctcagctaacagaagatgacgtagtgccctgggtcgcttgataagcagatgaacttggagctccggcgacgagctgcggaagcccgctatcttcacaacatctctcccggcattcaagagcgaataatgtcaataagtgataatgtcaataatgtcaataacacactaaacatgcctgcatctttcatatgtgtatttgtgctcaaatctttaattgctactgctgttgtttattttctcctgttgattgtgcacacgagaaattatatttgatcctcttagtggatttgatgcatgcagactggttatgggggttcttttcttcctggcataaagcaacggttgttgtcatatattttttgcaagacgtggaatgaggttccatatcagactttggacattgtgatatttcctgaagatttgtataagtttgtaatttatataaagaagtttgtaagatgcaattaacatgacattattaaattatatatagaagtctgtgtggtactgatggttgtaatgtagtagagaaatgagtgatggttgtaatgtagtagagaaatgagtgatggttgtaatgtagtagagaaatgggtagattaaatttaaaaaaaattatgtatagctaggatcataaatatattatgaaactttttctcataaaag

SEQ ID NO: 39445 - DNA, 797 bp, Zea Mays
atgtcagaactcagaagcttcagcttacatgtttattgctattggaaactcgtcaataatttatccaagcttttacctctgttcttaactaaatctatcggtgtattgctaccaaaatccgctattaagtttgagaggtatctgatggatgagattctatcgatcgatgctgatgttagtgaagttgagcttgggagaagacctgctttgtgccaagacaaaggttgccaaagtttgacttgcatctctaggtcgcagcgacaaagaaaggtgggcgatgcggtggcgacgcgggagcacaaccaccagctattggcctacatatctaccaatggacgtgtatcaggaagacagtcctgacttatttactaatgaagaaaaaaatccatgaagtagaatcaatggatatagaattgctgctgactcgtcttctaagcatgaccccaaagcagaacctgtagttctagcaaataagtctaaatggtcaccagagcaggggcaacacaggatctgacgcccattctatgttgctgaagtcgaagcacctgtgctcacaatcgaaaagcatggaacaagaaggtatagtttcttatcccccccattcaacctaacagaattccttggcttctgtattctcattaaagcaaaaatatatgtctttgcatgtacttgtcaaagctaataattagtttccttgttgtcttattgattggtcctcttgatttccttcttttgccgaacctttttaattgttgtggaaggagttttttgcacgggattgtatacttatgctttat

SEQ ID NO: 39446 - DNA, 534 bp, Zea Mays
aatctatcggtgtattgctaccaaaatccgctattaagtttgagaggtatctgatggatgagattctatcgatcgatgctgatgttagtgaagttgagcttgggagaaggtaagtgttggcaccgatccgggcgccaatgagaagggcaagtcgttgtgcctagcagacgccctccgcgcgcaccgcggctatgatagacactggatccaggcatgccatgttcgtccgcctgcacggagaacccgctaatggcagaggacgacatgacaggcgacgaaatccagtcatctcctaagggagcgactttgtacgacagccactacgggtggtggagctgggcgtcgttctcgccgcggtgcacgtgatccaggaccgccatgtcacgacgcacgagacctgctttgtgccaagacaaaggttgccaaagtttgacttgcatctctaggtcgcagcgacaaagaaaggtgggcgatgcggtggcgacgcgggagcacaaccaccaggacattgagttgtccaaagaaataaatgat

SEQ ID NO: 39447 - DNA, 639 bp, Zea Mays
ccgcctactactctccattcctgcagagcacaacctttaggtgtagcggtccagactactactaaatagtatgtatggtattgatttggggacaatagtgggactggagcttgacgtcgacatcgtggcggcgaacacaacgacaaagaagctattggcctacatatctaccaatggacgtgtatcaggaagacagtcctgacttatttactaatgaagaaaaaaatccatgaagtagaatcaatggatatagaattgctgctgactcgtcttctaagcatgaccccaaagcagaacctgtagttctagcaaataagtctaaatggtcaccagagcaggggcaacacaggatctgacgcccattctatgttgctgaagtcgaagcacctgtgctcacaatcgaaaagcatggaacaagaaggtatagtttcttatcccccccattcaacctaacagaattccttggcttctgtattctcattaaagcaaaaatatatgtctttgcatgtacttgtcaaagctaataattagtttccttgttgtcttattgattggtcctcttgatttccttcttttgccgaacctttttaattgttgtggaaggagttttttgcacgggattgtatacttatgctttat

SEQ ID NO: 39448 - DNA, 920 bp, Zea Mays
agagcacaacctttaggtgtagcggtccagactactactaaatagtatgtatggtattgatttggggacaatagtgggactggagcttgacgtcgacatcgtggcggcgaacacaacgacaaagaaggtgaacgctgcatttgtctcgttttgtaggacattgagttgtccaaagaaataaatgattcattcaggcaatcatctcgagctaggacaatgcttccctccagcattgaaataagtggccatgtgcttacaatagggtaaatattttttgccacattgctttgatactagctcttgttacaacatgttcatagctttggagacttgatctcattcatgtgctctagggtcctagcatgacaagctggctttttgatgttgttggtcatgtttgtgtagttctgataaaatatatttgctttacagctattggcctacatatctaccaatggacgtgtatcaggaagacagtcctgacttatttactaatgaagaaaaaaatccatgaagtagaatcaatggatatagaattgctgctgactcgtcttctaagcatgaccccaaagcagaacctgtagttctagcaaataagtctaaatggtcaccagagcaggggcaacacaggatctgacgcccattctatgttgctgaagtcgaagcacctgtgctcacaatcgaaaagcatggaacaagaaggtatagtttcttatcccccccattcaacctaacagaattccttggcttctgtattctcattaaagcaaaaatatatgtctttgcatgtacttgtcaaagctaataattagtttccttgttgtcttattgattggtcctcttgatttccttcttttgccgaacctttttaattgttgtggaaggagttttttgcacgggattgtatacttatgctttat

SEQ ID NO: 39449 - DNA, 1439 bp, Zea Mays
aaggcaatgctgactaggcaattcagttgtatactgaatgaatatcgtcatctaatgcttgagttgtaacccaaacgaaggaatcgatctatttgtgagtaggctagctgttggttcaagagggaaaccctaagcatgagggaaggcataagttactgcaggaagaaagaagtcacccgagtctcctgagacaccacaagacccatctgggaggaaaagacaagaatgaagtgcagaagaagcaaagccctaatcctctacatctaattttcgcactcccatttccatctgcagtagcttatagctctttgctctacttatatgggaagaggattcatacatcatcttggctcaaggattacaaagtgaggaaagagctctgaaaagtgatggctgtcccacaagttgacaagaaaatgcttggtgaacttgaagccatgggattcccaactgcacgttcagttagggcactccatttttcaggtaattccaatcttgaatctgctgtaaactggcttctggaacatgaaagtgacccagatattgatcggctaccactgattccaagagaaataagcattgaatgcggtgacacatcagatgaagtaagaaatgacgttgaaggaatgagggatactgtgcaggagcagaaacctaaagaacacactgaaactgggagacagaatgagacatcccagttggaacgagaaccaaatgcagatggacaggaggaagaagatagaaagaggatattagcactatataagcaaaaacgagacgaggaagggagggcaagagggcggatacggagtcaattacaagaggatcagagggagaggattcgagctgctaaagaccttatggaagcaaagagaagtctcgaggaaaatcaaaggaagcgggtgatggagagtcgggtagcagatcaagaggaggagaaaagagcgagggagaggatacgccagcgtatagctgacgataaggcagagaggaggagacggcttggtctgccgcaggatgatcctagggatcccgccgcaaccatgacgcctgcaaaggtaaagcctgctggacgcgccgtcgttgcgtcagagcagctgagagactgcctgcgaaccgtgaagaagaaccacagggatgaccctgctgcagtggcaagagcgtaccaggtgttgctcaagattgttggcaacgtagcgaagaacccaggggaggagaagttcaggaggatccggctcagcaaccctgtgttcaaggacagggtgggcagcgtgcgaggcggcgtggagttcctggagctgtgcgggttccgcaggttcagcggcatcgggtacctggtgatgccgagggacaaggtcgacgtggctctgctcaccgccgccggcgtcgagatcgcgtcggccttggagaacccctacttcggcctgctctccaagtga

SEQ ID NO: 39450 - DNA, 2531 bp, Zea Mays
atgtccatggatgatgattccatggatgacgagtttgttaaagccgcagaggccgaggaactgctacttgaagctcagaatgagcaagatgatgatcggtgtttcctccttggtagcagttcagctgctgccatcgaggttgatggcattggtgacgatgcgggaacggagacaggaccaggcacggtggatatgcgcaccggatccaccagcccgacggtggatgctagcacatctaccactgcctctggtaagcgctccaggaggaggggaatgacctccaaggtttggttgcattttgaggaagttactaagaagtagggaggtaaggatttccaccattttccctcactgcaagcacaccatgtgtgctaaatctttttcagacatttgatctgtcacctagaactttgccctgctaagaaagaaaaagaaagaactggtagatctcaatccctgcttaagtttaatgctgatggatctgttgtggactgggagtacactccatctattgcaaggactgagctttcttgtatgattgctagactagacctacctctttgttttggtgaatctagtgcatttcaagattacattactcatgctcataatcctcggtttgataagttctctaggcaaactactgctagagacttgattagtctttttaatgatcatgctgaacacctcattaatgtactcaaatctgtttcatttgttgcacttacatcagatatttggtctggaaaggcaaaagaggattacatcagtgttgttgttcattttgtgaactttgattggtgtttagaaaagagtttgctcggtcttagagcaattgaggtagctcatacaggttatgacattgctgagcgtgttgaactggttgctaatgattatggaattactgataaaatctttgctattgtgcttgataattcctcatctaacaaaactgctatggaagttctaaaactagtgttttctggttatattggccatttgattcctatgcctagtagaaatgaatatgatttgagtgttattttcttgcatcagcgttgtggttgccacataattaattttattattaatagttgtttgaaacgtttgcaaccatatcttaaagattttagaattgcaataacattcttgaatgctttaaatcaatgtatggcttcttataaacaatattgccttagtgttggtgtccgccctcgtaaatttggaatggacatggatgttagatggaatttcacttttcttatgctcaagcatttggttccttatcaaagtactttctctgtttggatcagaaccaaccatccttgcaaagttggtgggtcatttttactgcgtgataatcactggtctattgcagaaaagtttttatcttttcttcagttattctatgattcaactttggcattgtctggtgtttattaccctacttcacccttgatgctgcatcatattctaaaaattgctaggcatcttaatgcatatgagaaccatgaattgttaagagatgcagttgttcctatgaaatcaatgtttctgaaatattggagataaatactgattctctatgcatttgctttcattcttgatcctagagctaagatgagagggtttcataaagttcttcagaggttatctactctaaatggtacaaattatagtagattcccatcatctattcataccaaactaactaagatgtttcagatttatgaaaccaaatttggtggagtttgtttgagtattcaaccaatgccaattgctggttcgggtaaggccacagaggcttgggatgatatatggtgatgatgaaacttacaatactagttctggtacttgtactggtagtataccttatgtaggtacacctggtagttcatcttctctatctgagctcacttcttacctagatagtgacactgaaactaagtttggtccagattttaacatgcttagctggtgccaacgccataatcagacctatccaattctttctatacttgctagagatattttgattgtccttgtctctactatatctttataatccactttcagtctagctagcagggtgctcgaggagcggtgacgacgactgacaatggatatagtggaggtgctttcatgcatcaaggactaggaattggctagccaacacaagcaacatactgtggagaaggaaaccaaggaccttgaggtagcttttgaagctatgtatctcgatgatgagaagcaattatcacctgggagcaagagaaaggatcaagaaggaagcaaagatgagcaatggggaagaaggaaggaaaaagcttgaacttcttctggatttatatctatgtatgttgttttataataaccatgaacatggactatgaattggactataaactttataaggaactggttgtactcttttccttcctatggttttctcacgaggtgtgagtttttacctaggaaggtttttaatgatgcagcattgcactaaggctccaatttaattttatattacc

SEQ ID NO: 39451 - DNA, 1089 bp, Zea Mays
atgttgaaagactacatgttcaaactcaaagaaaaagaagagaaatacaggcaacaggagaacaaaaagatacagactctacttgtaaagaggcacgagaattcaataatgtcaagggccaacacaagcttcagccgtccatcaagcagaagcttcaatacaagtcctggctccacatccatctggagcaaccaagtttctgccaaagttcaactgcctgccttagagaacttccctgctgaaaaagatatgcacacaaaaagagttaggaacagagaggatgtgaaagacgccaattaagatgtgtacgcccacttctgttatgatataaaacctgccaagccaatagtcaatgagaggaccagctaaacataaaaacaaagcaaacactcgtggttctgcccaaagccataaatggaaataatatcatacatcagttacaataactccctcttcaagggccacattagtcagttatgcacatcaaggcaagaaccatacatatgtataatgaatacaagtatgccaatagtatttttaaaccatgcccatttcatgtaaccactagccaagctacccaaagaaaatgtttgaacagtatggtgatcctgggagcatgagcctcatggcttcacaggaaaagaggaatttttgacagttgtgtcccttccctagtaagggcacagcaacagcattccttcaaagagaaactgaggctgagtcttggtgcttcactgatgctcaaaaacttcaggagctattttttgtcatgtacaggctagaaaggtcgcaactttcttccttgtaaaaaaggtttgagtgctgtgtagtatttttttcattgcaaccttctgttgtctcatagttgaggcataaaggttgccagttgccttgtataggtttatatcccttttttctctctctataatataaagatacacaactctcctacgtgtttgagaaaaaaaaataactacatcaataagatgtattgcatttctactgatttcagttgttaaccaacaaaacaatccaaacataccttttccagtacgacataacataagccacataagaaactaaaaggac

SEQ ID NO: 39452 - DNA, 1382 bp, Zea Mays
ttcttggtgaggtctacgtgaaggtagtggaacgagatcaccttccgagacgagaaaggaatcactcgttttcctccgggcacattcctccgagttcggacggcaacgccttttatggccgccgttgcctcctccttctcgcggttctccttccgctgcgccgtctgcccctccccgctccgcgtccgcttttcgcagccccatccgcccgcgcggctccgcgtctcctccaccgtcgttgctctccacaagcgcaaccccaagcggctcaagtacgccgccgagcgccagttcacgtctctttggtggctgggttttgcgcgaacgaagagaggggatgccgggttgctgcgggtggaggtggagccctccggcggggacttctggaagcttgaccccattatcgacctcatcaatcgcggcgccgtcggggtgatccctactgacaccgtctactccgtcgtctgtgacctgagtaacaatgaatcgattgagcgccttcgcagactgaaaggcattggagactccaagcctctcagcatcctgtgtcgctcattacgtgacatcgatacctacacaacaggatttcctcaaggcactaaccaagggcaagctaacatttttcgtgttgtcaagcgtgcaatacctgggcctgtatgcaaaaaggaggcaggttggcgtccgaattccagatgatcccatctgccaggcaatattgcaaaatcttgatgaacctttgatatgcacaagtgtcaaatatctatcggaggatgaatggatacttgatccagtaatcattgcagatctttatgagccactggggcttgattttattgttgatggcggacctagaattgctgacccttctaccgtagtagatatgatgggagcaaaccctactgtaattcgtcagggaaagggtctaaagttggattggatggtagcaaaagatgaagaggaggacgaggcacagtcgatgttttctttcaaatcagcttgaaatttgcttcgcctgacctgtatgggctggcactttgctatggtcccccaaccgaagcgtcttctttcaactgcatataggatgtcagttgttagctgtaagcatagatgtcgaacacgaactgcgtgctgtaaatatgcaaggcgatgtaagcgaactggcagaatttgctcagtagcaacctttgctggaggtgatggaaagtttcctgctggttttcttgaactttgccgtgtacgcctaccagaatttccgtcctggaaggttccatattattccaattcatcctgcttctgtgatgcttttaattcgagaagcataactttttgggataattatgattatatccttcgctagacttgtaattattattttaccctct

SEQ ID NO: 39453 - DNA, 1318 bp, Zea Mays
ttcttggtgaggtctacgtgaaggtagtggaacgagatcaccttccgagacgagaaaggaatcactcgttttcctccgggcacattcctccgagttcggacggcaacgccttttatggccgccgttgcctcctccttctcgcggttctccttccgctgcgccgtctgcccctccccgctccgcgtccgcttttcgcagccccatccgcccgcgcggctccgcgtctcctccaccgtcgttgctctccacaagcgcaaccccaagcggctcaagtacgccgccgagcgccagttcacgagaggggatgccgggttgctgcgggtggaggtggagccctccggcggggacttctggaagcttgaccccattatcgacctcatcaatcgcggcgccgtcggggtgatccctactgacaccgtctactccgtcgtctgtgacctgagtaacaatgaatcgattgagcgccttcgcagactgaaaggcattggagactccaagcctctcagcatcctgtgtcgctcattacgtgacatcgatacctacacaacaggatttcctcaaggcactaaccaagggcaagctaacatttttcgtgttgtcaagcgtgcaatacctgggccttacacatttattttacctgcaagcaagcagtttcctaaacaatgtataaagcatggttcttccacaaggtatgcaaaaaggaggcaggttggcgtccgaattccagatgatcccatctgccaggcaatattgcaaaatcttgatgaacctttgatatgcacaagtgtcaaatatctatcggaggatgaatggatacttgatccagtaatcattgcagatctttatgagccactgggtctaaagttggattggatggtagcaaaagatgaagaggaggacgaggcacagtcgatgttttctttcaaatcagcttgaaatttgcttcgcctgacctgtatgggctggcactttgctatggtcccccaaccgaagcgtcttctttcaactgcatataggatgtcagttgttagctgtaagcatagatgtcgaacacgaactgcgtgctgtaaatatgcaaggcgatgtaagcgaactggcagaatttgctcagtagcaacctttgctggaggtgatggaaagtttcctgctggttttcttgaactttgccgtgtacgcctaccagaatttccgtcctggaaggttccatattattccaattcatcctgcttctgtgatgcttttaattcgagaagcataactttttgggataattatgattatatccttcgctagacttgtaattattattttaccctct

SEQ ID NO: 39454 - DNA, 1398 bp, Zea Mays
ttcttggtgaggtctacgtgaaggtagtggaacgagatcaccttccgagacgagaaaggaatcactcgttttcctccgggcacattcctccgagttcggacggcaacgccttttatggccgccgttgcctcctccttctcgcggttctccttccgctgcgccgtctgcccctccccgctccgcgtccgcttttcgcagccccatccgcccgcgcggctccgcgtctcctccaccgtcgttgctctccacaagcgcaaccccaagcggctcaagtacgccgccgagcgccagttcacgtctctttggtggctgggttttgcgcgaacgaagagaggggatgccgggttgctgcgggtggaggtggagccctccggcggggacttctggaagcttgaccccattatcgacctcatcaatcgcggcgccgtcggggtgatccctactgacaccgtctactccgtcgtctgtgacctgagtaacaatgaatcgattgagcgccttcgcagactgaaaggcattggagactccaaggatttcctcaaggcactaaccaagggcaagctaacatttttcgtgttgtcaagcgtgcaatacctgggccttacacatttattttacctgcaagcaagcagtttcctaaacaatgtataaagcatggttcttccacaaggtatgcaaaaaggaggcaggttggcgtccgaattccagatgatcccatctgccaggcaatattgcaaaatcttgatgaacctttgatatgcacaagtgtcaaatatctatcggaggatgaatggatacttgatccagtaatcattgcagatctttatgagccactggggcttgattttattgttgatggcggacctagaattgctgacccttctaccgtagtagatatgatgggagcaaaccctactgtaattcgtcagggaaagggtctaaagttggattggatggtagcaaaagatgaagaggaggacgaggcacagtcgatgttttctttcaaatcagcttgaaatttgcttcgcctgacctgtatgggctggcactttgctatggtcccccaaccgaagcgtcttctttcaactgcatataggatgtcagttgttagctgtaagcatagatgtcgaacacgaactgcgtgctgtaaatatgcaaggcgatgtaagcgaactggcagaatttgctcagtagcaacctttgctggaggtgatggaaagtttcctgctggttttcttgaactttgccgtgtacgcctaccagaatttccgtcctggaaggttccatattattccaattcatcctgcttctgtgatgcttttaattcgagaagcataactttttgggataattatgattatatccttcgctagacttgtaattattattttaccctct

SEQ ID NO: 39455 - DNA, 1020 bp, Zea Mays
ctgctcaatgcttcacttggaactactccgtcgtctgtgacctgagtaacaatgaatcgattgagcgccttcgcagactgaaaggcattggagactccaagcctctcagcatcctgtgtcgctcattacgtgacatcgatacctacacaacaggatttcctcaaggcactaaccaagggcaagctaacatttttcgtgttgtcaagcgtgcaatacctgggccttacacatttattttacctgcaagcaagcagtttcctaaacaatgtataaagcatggttcttccacaaggtatgcaaaaaggaggcaggttggcgtccgaattccagatgatcccatctgccaggcaatattgcaaaatcttgatgaacctttgatatgcacaagtgtcaaatatctatcggaggatgaatggatacttgatccagtaatcattgcagatctttatgagccactggggcttgattttattgttgatggcggacctagaattgctgacccttctaccgtagtagatatgatgggagcaaaccctactgtaattcgtcagggaaagggtctaaagttggattggatggtagcaaaagatgaagaggaggacgaggcacagtcgatgttttctttcaaatcagcttgaaatttgcttcgcctgacctgtatgggctggcactttgctatggtcccccaaccgaagcgtcttctttcaactgcatataggatgtcagttgttagctgtaagcatagatgtcgaacacgaactgcgtgctgtaaatatgcaaggcgatgtaagcgaactggcagaatttgctcagtagcaacctttgctggaggtgatggaaagtttcctgctggttttcttgaactttgccgtgtacgcctaccagaatttccgtcctggaaggttccatattattccaattcatcctgcttctgtgatgcttttaattcgagaagcataactttttgggataattatgattatatccttcgctagacttgtaattattattttaccctct

SEQ ID NO: 39456 - DNA, 1189 bp, Zea Mays
cgattatgccatcattcattggttccatctacttgcggagttcgacgccgacaagcgcagctgcagaaagcgtctggacgggcacaatcgccgccgcaggaagccacagccagacaccatggcttctgctagctttatcgcaagccagcaaggcacgcgattctcaccatttgcgcatccaagactggaggcgagctggccgccgggggtgatgaaaaccgaggagagtccatatcacatcactcaccaaatccctctgggctccagcagcagcagcaggcagcagcatttcgtggctctgggagccgccacgcctgcctacgccaaggaaggccggcgcttccctttcctgcaggagggcgagataagcttcgccaccggcgtggtgctggagccgccggcggcggctccagcgtgccagccgctcctcaggacgggagcaccatccgagagcagcggcgccggcggcagtaagatgttctccgatcaggggctggctcgcgtgctcgactcggactgtgctctctctcttctgtcagcgccggccaactcctccggcatcgacgtcagcaggatggtccgcccgactgaacacgtccccatggcccagcagcccgtggtcccgggcctgcagttcggcagcgcgtcgtggttcccgcgcccccaggcttccacgggcggctccttcgtcccctcctgccccgccgcggtggagggcgagcagcagctgaacgccgtgctgggccccaacgacagcgaggtgagcatgaactacggcgggatgttccacgtcggcggcggcagcggcggcggcgagggctcctcggacggcggcacctcgtcgtcgatgcccttctcgtggcagtagtcgtcgtcacttgtcagcagccgctgcgttctctcatctttcgcgcttcagacgatctggtagggagatactggctttagtgatcactgatcagcattgatttctgttctttttcctgcattcgctttgttgaatcggctctgctcgccagcattcgtgtggacattttttgaacataattctgtgttcgtttccctcacattatctttgctacggtgacacctgccggctgctgaccgtagcatgttccttctcttgtgacttgttctcgagacgtccatttgatgcagggcgcatccagaatttttcagttgcagtgca

SEQ ID NO: 39457 - DNA, 1252 bp, Zea Mays
ggaagaaacctgttcaccgtcaccgcagcccgccccactaactattgactgtcggattccctacccgtcggcgacaatccgctgcccccaatctgcctggtaggtctcgcacctccggtcatggctgccgaagctggcccaatctccaaggtcctcatcgtcatagcaatgcagaaggaggcgacgccgctcgtccacaagttcaatctcgtcgaggcgcccgcccaccaatccacttttcctaaaggtgccccatgggtttggtaccatggcagctacaaaggcctccacattgaccttgtattgcctggaatggatgctgttcttggagtcgacagtgttggtacagtaccagtagctgttgtgactagtttctccattcaaacattgaagccagaccttatcattaatgcgggcactgctggtggcttcaaggccaaaggagcaagcattactgatgtattccttgcatcagatgttgcattccatgacaggaggataccaatacctccattttaatatggacttggtgtgtatgcattagatttttgacatgtatggaactggagcacgcaaaacttttgcagctcctaatatcttgaaggagctcaatttgaaggttggcaagttgtcgactggggattctctggatatgtgtccccaggataaggagttgatactgcgcaatgatgctacaataaaggacatggagggagctgctgtagcatatgtcgctgacatgttctcgacaccagcgatctttgtgaaagctgtgactgatatcgtggatggggtgaagccaacgtatgaggagtttctgcagaacctgattgccgtgacgacggcactggagctggcagtcaccaaagtggtggatttcatcagcgggaaacgcatctccgatctttgaaagctcgtggtcacgaaatccaacatccccctgctctgatgcacgatgctaggctaggatacaatacaacgttgggtcaatgattttttttggaggtgttctatacgtgaggttttaccccttttgcaatggctcttgatctattcctgaataccgaccagagcagttgtctcttgctaaacagaaggaatgtaaagtgagcaaacatgccattgatcgttgcgaccaaactaacaatgtctgtgcgctgctaaggcacgcatcggcgactattctagagacgattcaaaaaatgtccacaataatgctggctagcagagccgattcgacaaaaagtggggg

SEQ ID NO: 39458 - DNA, 1232 bp, Zea Mays
aagaaacctgttcaccgtcaccgcagcccgccccactaactattgactgtcggattccctacccgtcggcgacaatccgctgcccccaatctgcctggtaggtctcgcacctccggtcatggctgccgaagctggcccaatctccaaggtcctcatcgtcatagcaatgcagaaggaggcgacgccgctcgtccacaagttcaatctcgtcgaggcgcccgcccaccaatccacttttcctaaaggtgccccatgggtttggtaccatggcagctacaaaggcctccacattgaccttgtattgcctggaatggatgctgttcttgagctgcgtccttgcaggagtcgacagtgttggtacagtaccagtagctgttgtgactagtttctccattcaaacattgaagccagaccttatcattaatgcgggcactgctggtggcttcaaggccaaaggagcaagcattactgatgtattccttgcatcagatgttgcattccatgacaggaggataccaatacctatttttgacatgtatggaactggagcacgcaaaacttttgcagctcctaatatcttgaaggagctcaatttgaaggttggcaagttgtcgactggggattctctggatatgtgtccccaggataaggagttgatactgcgcaatgatgctacaataaaggacatggagggagctgctgtagcatatgtcgctgacatgttctcgacaccagcgatctttgtgaaagctgtgactgatatcgtggatggggtgaagccaacgtatgaggagtttctgcagaacctgattgccgtgacgacggcactggagctggcagtcaccaaagtggtggatttcatcagcgggaaacgcatctccgatctttgaaagctcgtggtcacgaaatccaacatccccctgctctgatgcacgatgctaggctaggatacaatacaacgttgggtcaatgattttttttggaggtgttctatacgtgaggttttaccccttttgcaatggctcttgatctattcctgaataccgaccagagcagttgtctcttgctaaacagaaggaatgtaaagtgagcaaacatgccattgatcgttgcgaccaaactaacaatgtctgtgcgctgctaaggcacgcatcggcgactattctagagacgattcaaaaaatgtccacaataatgctggctagcagagccgattcgacaaaaagtggggg

SEQ ID NO: 39459 - DNA, 2384 bp, Zea Mays
ctgagacccacgcacgcacgcttatcggcattcggcaacccacgaaagagcacagcgaccgccgaccggtgccggagcctgccgcacaacgatccggtcgcgcccgtccgtggcccagagaagatcccaaccccgcccgtccgccgcggactcccgggcccgccgcctcgtccgttttccgaatcggccgcgcggggtaccgcggcgccgggggccgcccggagctccgtccgagtccgttgccgggagccagccagggcgcaacgcgagcgcaatggcggaggtggggagccgggtgcgcgggttcctgcggaaccggtggctggtgttcgtggcggcgatgtggatgcagtcgtgcgccggggtcggctacctcttcggcagcctctcgccggttatcaaggcctcgctcggctacaaccagcgccaggtcgccgggctcggcgtcgccaaggacctcggcgacagcgtcggcttcctcgccggcacgctctgcgccgtgctcccgctctgggccatgtgcattctaatcttcattggtaacaatggggagacatacttcaacactgccgcacttgtctcgtgtgttcaaaacttccccaagagccgtggaccaattgttggcatcctcaaaggattcgctggattaagtggtgcaattctaacgcagatttatgcaattgtacactctcctgatgatgctgcactgattttcatggttgcagttggcccaacaatggttgttatagctttaatgttcattgtaagacctgttggaggccacagacaagtgcgaccttctgatggcacaagtttcacatttgtatacagtgtctgcttgctgttagcctcttatcttatgggcgtcatgttattggaagaccttgttgacttaagccagtcagtgactgtcgtgttgaccgtgattctaatcatgtttctattagttccaatagtcattccagttctactcagcttcttttcggatgatgacgagactttgtatgcactattgttgccatcacctcggaaagaagaagcaagtgcatcaacatcttctgaggagcaacatgaggttatactcagcgaggtggaggatgaaaagccaaaggatgttgatttacttccagcctcagagaggcaaagaaggatagcagaattgcagacaaggttatttcaggcagctgctgttggtgctgtcagggttaagaggaggaaaggtccacggagaggagaggatttcacactgatgcaagcgctcatcaaggctgatttctggcttctatttttctcccttctgctgggctctggatctggtctcactgtgattgataatcttgggcaaatgagccagtcattgggttacgaggaaacccacatatttgtgtcaatgattagcatctggaactttcttggacgtattggtggagggtatttctcagagattattgtcaaagattacgcatatccaagggcgatcgcattagcgatagctcaagtcctgatggcgatcgggcacttcaacttcgcgatggcttggcccgggacaatgtacatcggcacgctgctcgtcggagtaggctacggcgcgcactgggccatcgtgccagccgcagcctcggagctgttcggggtgaagaacttcggagcgctgtacaacttcctcacggtcgcgaacccagcaggctccctggtcttctcgggggtcatcgcgagtggcatctacgacagtgaagcagcgaagcaggctcagcagcgccacaactccacgtcgctggcgatgagtggcagagtggctggcatggtctctggagccgctccgtcgttgaagtgcgagggcgccgtctgcttcttcctctcatcgctgatcatgtccgggttctgcatcatcgcttttggcttgagcttgatcctggtctaccgcacaaagatcgtgtacacaagtctatacgggaaaccgcgtacttgaaggatcaaccctaaagggacacagggttatcaaagcatacttcaatttttaatttattagtctggtaccccatgcctgtacaggtacagtgtcggtcttcccgttgttgtgcacaggttctcaagcagcatttcaacttttcaagtatgtggctgcaaatgggagcttcagtatagcgaagcatgtgagagtagaaagtccgtctgtggctggactgggacgctgtccttggctcaagttttgctgtatttggttgtgaaaaatttgtgtacacatgtaataagctagagacgtttcgacgcatgtcagagtggagaacatattcttttatgatttgttgaaacttgcgtatttgtatctatcacaaagaaaacagtccaacttgtcaaccggcatgtttgttcgctcctcacta

SEQ ID NO: 39460 - DNA, 1892 bp, Zea Mays
caacatgtcactgcagccacaagagatgtgcattctaatcttcattggtaacaatggggagacatacttcaacactgccgcacttgtctcgtgtgttcaaaacttccccaagagccgtggaccaattgttggcatcctcaaaggattcgctggattaagtggtgcaattctaacgcagatttatgcaattgtacactctcctgatgatgctgcactgattttcatggttgcagttggcccaacaatggttgttatagctttaatgttcattgtaagacctgttggaggccacagacaagtgcgaccttctgatggcacaagtttcacatttgtatacagtgtctgcttgctgttagcctcttatcttatgggcgtcatgttattggaagaccttgttgacttaagccagtcagtgactgtcgtgttgaccgtgattctaatcatgtttctattagttccaatagtcattccagttctactcagcttcttttcggatgatgacgagactttgtatgcactattgttgccatcacctcggaaagaagaagcaagtgcatcaacatcttctgaggagcaacatgaggttatactcagcgaggtggaggatgaaaagccaaaggatgttgatttacttccagcctcagagaggcaaagaaggatagcagaattgcagacaaggttatttcaggcagctgctgttggtgctgtcagggttaagaggaggaaaggtccacggagaggagaggatttcacactgatgcaagcgctcatcaaggctgatttctggcttctatttttctcccttctgctgggctctggatctggtctcactgtgattgataatcttgggcaaatgagccagtcattgggttacgaggaaacccacatatttgtgtcaatgattagcatctggaactttcttggacgtattggtggagggtatttctcagagattattgtcaaagattacgcatatccaagggcgatcgcattagcgatagctcaagtcctgatggcgatcgggcacttcaacttcgcgatggcttggcccgggacaatgtacatcggcacgctgctcgtcggagtaggctacggcgcgcactgggccatcgtgccagccgcagcctcggagctgttcggggtgaagaacttcggagcgctgtacaacttcctcacggtcgcgaacccagcaggctccctggtcttctcgggggtcatcgcgagtggcatctacgacagtgaagcagcgaagcaggctcagcagcgccacaactccacgtcgctggcgatgagtggcagagtggctggcatggtctctggagccgctccgtcgttgaagtgcgagggcgccgtctgcttcttcctctcatcgctgatcatgtccgggttctgcatcatcgcttttggcttgagcttgatcctggtctaccgcacaaagatcgtgtacacaagtctatacgggaaaccgcgtacttgaaggatcaaccctaaagggacacagggttatcaaagcatacttcaatttttaatttattagtctggtaccccatgcctgtacaggtacagtgtcggtcttcccgttgttgtgcacaggttctcaagcagcatttcaacttttcaagtatgtggctgcaaatgggagcttcagtatagcgaagcatgtgagagtagaaagtccgtctgtggctggactgggacgctgtccttggctcaagttttgctgtatttggttgtgaaaaatttgtgtacacatgtaataagctagagacgtttcgacgcatgtcagagtggagaacatattcttttatgatttgttgaaacttgcgtatttgtatctatcacaaagaaaacagtccaacttgtcaaccggcatgtttgttcgctcctcacta

SEQ ID NO: 39461 - DNA, 2035 bp, Zea Mays
ctacagaatgaatgttattccttagagctccaaaaggtgttcttgttcatgttgccactataactcgtgctattgaagtatttaagatcaagataaggttccagaaaaaaaaatggttcaggccaggaactgatatttgccatgccaaatctccttttgtttcacaagatgtgcattctaatcttcattggtaacaatggggagacatacttcaacactgccgcacttgtctcgtgtgttcaaaacttccccaagagccgtggaccaattgttggcatcctcaaaggattcgctggattaagtggtgcaattctaacgcagatttatgcaattgtacactctcctgatgatgctgcactgattttcatggttgcagttggcccaacaatggttgttatagctttaatgttcattgtaagacctgttggaggccacagacaagtgcgaccttctgatggcacaagtttcacatttgtatacagtgtctgcttgctgttagcctcttatcttatgggcgtcatgttattggaagaccttgttgacttaagccagtcagtgactgtcgtgttgaccgtgattctaatcatgtttctattagttccaatagtcattccagttctactcagcttcttttcggatgatgacgagactttgtatgcactattgttgccatcacctcggaaagaagaagcaagtgcatcaacatcttctgaggagcaacatgaggttatactcagcgaggtggaggatgaaaagccaaaggatgttgatttacttccagcctcagagaggcaaagaaggatagcagaattgcagacaaggttatttcaggcagctgctgttggtgctgtcagggttaagaggaggaaaggtccacggagaggagaggatttcacactgatgcaagcgctcatcaaggctgatttctggcttctatttttctcccttctgctgggctctggatctggtctcactgtgattgataatcttgggcaaatgagccagtcattgggttacgaggaaacccacatatttgtgtcaatgattagcatctggaactttcttggacgtattggtggagggtatttctcagagattattgtcaaagattacgcatatccaagggcgatcgcattagcgatagctcaagtcctgatggcgatcgggcacttcaacttcgcgatggcttggcccgggacaatgtacatcggcacgctgctcgtcggagtaggctacggcgcgcactgggccatcgtgccagccgcagcctcggagctgttcggggtgaagaacttcggagcgctgtacaacttcctcacggtcgcgaacccagcaggctccctggtcttctcgggggtcatcgcgagtggcatctacgacagtgaagcagcgaagcaggctcagcagcgccacaactccacgtcgctggcgatgagtggcagagtggctggcatggtctctggagccgctccgtcgttgaagtgcgagggcgccgtctgcttcttcctctcatcgctgatcatgtccgggttctgcatcatcgcttttggcttgagcttgatcctggtctaccgcacaaagatcgtgtacacaagtctatacgggaaaccgcgtacttgaaggatcaaccctaaagggacacagggttatcaaagcatacttcaatttttaatttattagtctggtaccccatgcctgtacaggtacagtgtcggtcttcccgttgttgtgcacaggttctcaagcagcatttcaacttttcaagtatgtggctgcaaatgggagcttcagtatagcgaagcatgtgagagtagaaagtccgtctgtggctggactgggacgctgtccttggctcaagttttgctgtatttggttgtgaaaaatttgtgtacacatgtaataagctagagacgtttcgacgcatgtcagagtggagaacatattcttttatgatttgttgaaacttgcgtatttgtatctatcacaaagaaaacagtccaacttgtcaaccggcatgtttgttcgctcctcacta

SEQ ID NO: 39462 - DNA, 2068 bp, Zea Mays
tttaggtaaactatggggatgtttagatggccgcctaagccgccgccgcccgccacacttcccacgccaccagtgtggcgctcgttttgagcgccacaggtgtggcgcggcgtggccgccggcgcgccgatccaaactagccctatgtatctgcgcaccgtttaacatgtcgccgccggttggaattccctactccattccgagctgccgccatcgccaccactgcgccgccaattcgaatcggatccccactccgttccgagctgccgccatcgccaccgctgcgccgccgattcgaatcggatccccactcctttccaaactgccgccatcgccaccgctgcgtcgccaatgggctcgacgtgcctgtcgtgcggcgagggcgcggtggtggcagacgcggactcgggcgtgctcgtctgcacctcatgcggcatcatccaggacgccggcggcgcggagttcgtccaccagtccaccttcaacgagtcggggggcctcgatcgccgcgtctcctccctcgtccgcaacgactccgactccgcctaccgcgaccagaagctcgccatcgccaccgcgggcatcacctccatcgccacccgcctcggcctgtcccacacccgcgccgaggaggcgctccgcatggccaagtccgccaccgacggccagctcgccaccccgggcagcgccttcctccctgccctcgccgccgcctgcgcccttctcgtcgcgcggtcccaccgcctcccgctctccctcgccgaggccgcggaggccgccttctgctccgcgcccgccctcgccgacctggtctcccgcgtcaccgcccagctatccctccctcccctcccatgcttcgactacaccgccgcgctcgaccgtgccgtgcacctctcgacctcgctcaacgccgccgcgcccgacaagacggacgccattctcgcccaggcccggttcctcttccgctgcgcatccaagtggtcgctcaccacggggcggtttccacttcccctcgtcgcggctctgctcgccttctctgcggaggtgaacggggtcacttctgtctctttggaggacattgcaagggacatctcggcaggattgaggaccagcctgctccgatacaaggagctcgttgacgccctggtgcatgtcgcggggcacctgcttccatggggtgccgatgtcaatgccaagaacctgctcctcaacgctccggtcttgctccggctcatggagatgcggtcacaatcggacccttctgaagagtttcttatgagctgcgctccgaacattgctgcaattgtgcaggctaactctaaagttgatgacgaagtgtctaaataccttcacattactccagtgggttctgatgactttgatttcgataatcttgagccagaggagaaagaatttgaaaatcagaatatctcagagaagggcctatcagatgcttaccaaaatgtcttaaataggcttgcccagctacagaaacttgggaaggttggtaaaggtactgacaggaggaagcgattgaaaggaggactggagctggagccatgcatggacacagtgaataatggttggagaaaggacatgctgcttgaggatgtggtggatattgacgttggctatgatgcacctccaccatcgtttactgctggtttggagttgcagaagcagaggagagcacgtattgaagctgctaagcagcgaattgatgcaactaggaaggctcctgctgctccagctgcaaaagcaaataactcagaagacgttgtaagaaaaaaattgaccatgaagaatcgagggggaaagaagaaggatgatatcgatcatatccttcccagtgacaatatgacaggttgttcaggtgctaggaaaaagagacgaagaggttcctgtgacagtattgattgggaagattgcatcattgagctcctgctactgcatggtgcaaatgaagctgagattgaacaaggccagtacagaagattgttggagttgcatgtattcagtgcagtaagtggggagaattgaaaaatggaagccgcgccattagagggag

SEQ ID NO: 39463 - DNA, 2775 bp, Zea Mays
tttaggtaaactatggggatgtttagatggccgcctaagccgccgccgcccgccacacttcccacgccaccagtgtggcgctcgttttgagcgccacaggtgtggcgcggcgtggccgccggcgcgccgatccaaactagccctatgtatctgcgcaccgtttaacatgtcgccgccggttggaattccctactccattccgagctgccgccatcgccaccactgcgccgccaattcgaatcggatccccactccgttccgagctgccgccatcgccaccgctgcgccgccgattcgaatcggatccccactcctttccaaactgccgccatcgccaccgctgcgtcgccaatgggctcgacgtgcctgtcgtgcggcgagggcgcggtggtggcagacgcggactcgggcgtgctcgtctgcacctcatgcggcatcatccaggacgccggcggcgcggagttcgtccaccagtccaccttcaacgagtcggggggcctcgatcgccgcgtctcctccctcgtccgcaacgactccgactccgcctaccgcgaccagaagctcgccatcgccaccgcgggcatcacctccatcgccacccgcctcggcctgtcccacacccgcgccgaggaggcgctccgcatggccaagtccgccaccgacggccagctcgccaccccgggcagcgccttcctccctgccctcgccgccgcctgcgcccttctcgtcgcgcggtcccaccgcctcccgctctccctcgccgaggccgcggaggccgccttctgctccgcgcccgccctcgccgacctggtctcccgcgtcaccgcccagctatccctccctcccctcccatgcttcgactacaccgccgcgctcgaccgtgccgtgcacctctcgacctcgctcaacgccgccgcgcccgacaagacggacgccattctcgcccaggcccggttcctcttccgctgcgcatccaagtggtcgctcaccacggggcggtttccacttcccctcgtcgcggctctgctcgccttctctgcggaggtgaacggggtcacttctgtctctttggaggacattgcaagggacatctcggcaggattgaggaccagcctgctccgatacaaggagctcgttgacgccctggtgcatgtcgcggggcacctgcttccatggggtgccgatgtcaatgccaagaacctgctcctcaacgctccggtcttgctccggctcatggagatgcggtcacaatcggacccttctgaagagtttcttatgagctgcgctccgaacattgctgcaattgtgcaggctaactctaaagttgatgacgaagtgtctaaataccttcacattactccagtgggttctgatgactttgatttcgataatcttgagccagaggagaaagaatttgaaaatcagaatatctcagagaagggcctatcagatgcttaccaaaatgtcttaaataggcttgcccagctacagaaacttgggaaggttggtaaaggtactgacaggaggaagcgattgaaaggaggactggagctggagccatgcatggacacagtgaataatggttggagaaaggacatgctgcttgaggatgtggtggatattgacgttggctatgatgcacctccaccatcgtttactgctggtttggagttgcagaagcagaggagagcacgtattgaagctgctaagcagcgaattgatgcaactaggaaggctcctgctgctccagctgcaaaagcaaataactcagaagacgttgtaagaaaaaaattgaccatgaagaatcgagggggaaagaagaaggatgatatcgatcatatccttcccagtgacaatatgacaggttgttcaggtgctaggaaaaagagacgaagaggttcctgtgacagtattgattgggaagattgcatcattgagctcctgctactgcatggtgcaaatgaagctgagattgaacaaggccagtacagaagattgttggagttgcatgtattcagtgcagtaagtggggagaattgaaaaatgaagcccgactcgccgcccagcaccgtcgtctgcaaagccagctgccgagtccaggatccaacacattctacccctgcttaattctcaagtgttcgccgttgccttcgctgtattagctgctggtgctatagttctgacactcaatgttctactgctgggtgggaacatcatcttcttccaaagcctcagtcttctcggatactgtctgttcccgctggacgtgggggctctgatttgcatgcttaaggacagcgtcatactaaagatggttgtggtgacggtaacattggcatggagctcttgggcagcataccccctcatgagtgctgctgttaacccaaagagaaaggccctggcgctgtatcccgtgttcctcatgtatatctcagttgcatgtctcataattgctatagattaaggcgggcatggtttctacagaactaacagaagaattacaggattttgttttctagctggatcatcaaaatgcatattattttctttttttggctgcgtatagatctgggttcacattgttattgtagtttttgctggctgcttcaatactttatttcattttgtttaagaaaaaaatcacagggatttagaatgtagtcaatcaaatgtatgaatgttgtatagccatacagatatcttgctgtttcgcatctatgtggataatctggaatggactgctgaagcctgaataagtgaattactctgttttac

SEQ ID NO: 39464 - DNA, 2686 bp, Zea Mays
tttaggtaaactatggggatgtttagatggccgcctaagccgccgccgcccgccacacttcccacgccaccagtgtggcgctcgttttgagcgccacaggtgtggcgcggcgtggccgccggcgcgccgatccaaactagccctatgtatctgcgcaccgtttaacatgtcgccgccggttggaattccctactccattccgagctgccgccatcgccaccactgcgccgccaattcgaatcggatccccactccgttccgagctgccgccatcgccaccgctgcgccgccgattcgaatcggatccccactcctttccaaactgccgccatcgccaccgctgcgtcgccaatgggctcgacgtgcctgtcgtgcggcgagggcgcggtggtggcagacgcggactcgggcgtgctcgtctgcacctcatgcggcatcatccaggacgccggcggcgcggagttcgtccaccagtccaccttcaacgagtcggggggcctcgatcgccgcgtctcctccctcgtccgcaacgactccgactccgcctaccgcgaccagaagctcgccatcgccaccgcgggcatcacctccatcgccacccgcctcggcctgtcccacacccgcgccgaggaggcgctccgcatggccaagtccgccaccgacggccagctcgccaccccgggcagcgccttcctccctgccctcgccgccgcctgcgcccttctcgtcgcgcggtcccaccgcctcccgctctccctcgccgaggccgcggaggccgccttctgctccgcgcccgccctcgccgacctggtctcccgcgtcaccgcccagctatccctccctcccctcccatgcttcgactacaccgccgcgctcgaccgtgccgtgcacctctcgacctcgctcaacgccgccgcgcccgacaagacggacgccattctcgcccaggcccggttcctcttccgctgcgcatccaagtggtcgctcaccacggggcggtttccacttcccctcgtcgcggctctgctcgccttctctgcggaggtgaacggggtcacttctgtctctttggaggacattgcaagggacatctcggcaggattgaggaccagcctgctccgatacaaggagctcgttgacgccctggtgcatgtcgcggggcacctgcttccatggggtgccgatgtcaatgccaagaacctgctcctcaacgctccggtcttgctccggctcatggagatgcggtcacaatcggacccttctgaagagtttcttatgagctgcgctccgaacattgctgcaattgtgcaggctaactctaaagttgatgacgaagtgtctaaataccttcacattactccagtgggttctgatgactttgatttcgataatcttgagccagaggagaaagaatttgaaaatcagaatatctcagagaagggcctatcagatgcttaccaaaatgtcttaaataggcttgcccagctacagaaacttgggaaggttggtaaaggtactgacaggaggaagcgattgaaaggaggactggagctggagccatgcatggacacagtgaataatggttggagaaaggacatgctgcttgaggatgtggtggatattgacgttggctatgatgcacctccaccatcgtttactgctggtttggagttgcagaagcagaggagagcacgtattgaagctgctaagcagcgaattgatgcaactaggaaggctcctgctgctccagctgcaaaagcaaataactcagaagacgttgtaagaaaaaaattgaccatgaagaatcgagggggaaagaagaaggatgatatcgatcatatccttcccagtgacaatatgacaggttgttcaggtgctaggaaaaagagacgaagaggttcctgtgacagtattgattgggaagattgcatcattgagctcctgctactgcatggtgcaaatgaagctgagattgaacaaggccagtacagaagattgttggagttgcatgtattcagtgcagtaagtggggagaattgaaaaatgtgttcgccgttgccttcgctgtattagctgctggtgctatagttctgacactcaatgttctactgctgggtgggaacatcatcttcttccaaagcctcagtcttctcggatactgtctgttcccgctggacgtgggggctctgatttgcatgcttaaggacagcgtcatactaaagatggttgtggtgacggtaacattggcatggagctcttgggcagcataccccctcatgagtgctgctgttaacccaaagagaaaggccctggcgctgtatcccgtgttcctcatgtatatctcagttgcatgtctcataattgctatagattaaggcgggcatggtttctacagaactaacagaagaattacaggattttgttttctagctggatcatcaaaatgcatattattttctttttttggctgcgtatagatctgggttcacattgttattgtagtttttgctggctgcttcaatactttatttcattttgtttaagaaaaaaatcacagggatttagaatgtagtcaatcaaatgtatgaatgttgtatagccatacagatatcttgctgtttcgcatctatgtggataatctggaatggactgctgaagcctgaataagtgaattactctgttttac

SEQ ID NO: 39465 - DNA, 2693 bp, Zea Mays
tttaggtaaactatggggatgtttagatggccgcctaagccgccgccgcccgccacacttcccacgccaccagtgtggcgctcgttttgagcgccacaggtgtggcgcggcgtggccgccggcgcgccgatccaaactagccctatgtatctgcgcaccgtttaacatgtcgccgccggttggaattccctactccattccgagctgccgccatcgccaccactgcgccgccaattcgaatcggatccccactccgttccgagctgccgccatcgccaccgctgcgccgccgattcgaatcggatccccactcctttccaaactgccgccatcgccaccgctgcgtcgccaatgggctcgacgtgcctgtcgtgcggcgagggcgcggtggtggcagacgcggactcgggcgtgctcgtctgcacctcatgcggcatcatccaggacgccggcggcgcggagttcgtccaccagtccaccttcaacgagtcggggggcctcgatcgccgcgtctcctccctcgtccgcaacgactccgactccgcctaccgcgaccagaagctcgccatcgccaccgcgggcatcacctccatcgccacccgcctcggcctgtcccacacccgcgccgaggaggcgctccgcatggccaagtccgccaccgacggccagctcgccaccccgggcagcgccttcctccctgccctcgccgccgcctgcgcccttctcgtcgcgcggtcccaccgcctcccgctctccctcgccgaggccgcggaggccgccttctgctccgcgcccgccctcgccgacctggtctcccgcgtcaccgcccagctatccctccctcccctcccatgcttcgactacaccgccgcgctcgaccgtgccgtgcacctctcgacctcgctcaacgccgccgcgcccgacaagacggacgccattctcgcccaggcccggttcctcttccgctgcgcatccaagtggtcgctcaccacggggcggtttccacttcccctcgtcgcggctctgctcgccttctctgcggaggtgaacggggtcacttctgtctctttggaggacattgcaagggacatctcggcaggattgaggaccagcctgctccgatacaaggagctcgttgacgccctggtgcatgtcgcggggcacctgcttccatggggtgccgatgtcaatgccaagaacctgctcctcaacgctccggtcttgctccggctcatggagatgcggtcacaatcggacccttctgaagagtttcttatgagctgcgctccgaacattgctgcaattgtgcaggctaactctaaagttgatgacgaagtgtctaaataccttcacattactccagtgggttctgatgactttgatttcgataatcttgagccagaggagaaagaatttgaaaatcagaatatctcagagaagggcctatcagatgcttaccaaaatgtcttaaataggcttgcccagctacagaaacttgggaaggttggtaaaggtactgacaggaggaagcgattgaaaggaggactggagctggagccatgcatggacacagtgaataatggttggagaaaggacatgctgcttgaggatgtggtggatattgacgttggctatgatgcacctccaccatcgtttactgctggtttggagttgcagaagcagaggagagcacgtattgaagctgctaagcagcgaattgatgcaactaggaaggctcctgctgctccagctgcaaaagcaaataactcagaagacgttgtaagaaaaaaattgaccatgaagaatcgagggggaaagaagaaggatgatatcgatcatatccttcccagtgacaatatgacaggttgttcaggtgctaggaaaaagagacgaagaggttcctgtgacagtattgattgggaagattgcatcattgagctcctgctactgcatggtgcaaatgaagctgagattgaacaaggccagtacagaagattgttggagttgcatgtattcagtgcagtaagtggggagaattgaaaaatgtctcaagtgttcgccgttgccttcgctgtattagctgctggtgctatagttctgacactcaatgttctactgctgggtgggaacatcatcttcttccaaagcctcagtcttctcggatactgtctgttcccgctggacgtgggggctctgatttgcatgcttaaggacagcgtcatactaaagatggttgtggtgacggtaacattggcatggagctcttgggcagcataccccctcatgagtgctgctgttaacccaaagagaaaggccctggcgctgtatcccgtgttcctcatgtatatctcagttgcatgtctcataattgctatagattaaggcgggcatggtttctacagaactaacagaagaattacaggattttgttttctagctggatcatcaaaatgcatattattttctttttttggctgcgtatagatctgggttcacattgttattgtagtttttgctggctgcttcaatactttatttcattttgtttaagaaaaaaatcacagggatttagaatgtagtcaatcaaatgtatgaatgttgtatagccatacagatatcttgctgtttcgcatctatgtggataatctggaatggactgctgaagcctgaataagtgaattactctgttttac

SEQ ID NO: 39466 - DNA, 2769 bp, Zea Mays
tttaggtaaactatggggatgtttagatggccgcctaagccgccgccgcccgccacacttcccacgccaccagtgtggcgctcgttttgagcgccacaggtgtggcgcggcgtggccgccggcgcgccgatccaaactagccctatgtatctgcgcaccgtttaacatgtcgccgccggttggaattccctactccattccgagctgccgccatcgccaccactgcgccgccaattcgaatcggatccccactccgttccgagctgccgccatcgccaccgctgcgccgccgattcgaatcggatccccactcctttccaaactgccgccatcgccaccgctgcgtcgccaatgggctcgacgtgcctgtcgtgcggcgagggcgcggtggtggcagacgcggactcgggcgtgctcgtctgcacctcatgcggcatcatccaggacgccggcggcgcggagttcgtccaccagtccaccttcaacgagtcggggggcctcgatcgccgcgtctcctccctcgtccgcaacgactccgactccgcctaccgcgaccagaagctcgccatcgccaccgcgggcatcacctccatcgccacccgcctcggcctgtcccacacccgcgccgaggaggcgctccgcatggccaagtccgccaccgacggccagctcgccaccccgggcagcgccttcctccctgccctcgccgccgcctgcgcccttctcgtcgcgcggtcccaccgcctcccgctctccctcgccgaggccgcggaggccgccttctgctccgcgcccgccctcgccgacctggtctcccgcgtcaccgcccagctatccctccctcccctcccatgcttcgactacaccgccgcgctcgaccgtgccgtgcacctctcgacctcgctcaacgccgccgcgcccgacaagacggacgccattctcgcccaggcccggttcctcttccgctgcgcatccaagtggtcgctcaccacggggcggtttccacttcccctcgtcgcggctctgctcgccttctctgcggaggtgaacggggtcacttctgtctctttggaggacattgcaagggacatctcggcaggattgaggaccagcctgctccgatacaaggagctcgttgacgccctggtgcatgtcgcggggcacctgcttccatggggtgccgatgtcaatgccaagaacctgctcctcaacgctccggtcttgctccggctcatggagatgcggtcacaatcggacccttctgaagagtttcttatgagctgcgctccgaacattgctgcaattgtgcaggctaactctaaagttgatgacgaagtgtctaaataccttcacattactccagtgggttctgatgactttgatttcgataatcttgagccagaggagaaagaatttgaaaatcagaatatctcagagaagggcctatcagatgcttaccaaaatgtcttaaataggcttgcccagctacagaaacttgggaaggttggtaaaggtactgacaggaggaagcgattgaaaggaggactggagctggagccatgcatggacacagtgaataatggttggagaaaggacatgctgcttgaggatgtggtggatattgacgttggctatgatgcacctccaccatcgtttactgctggtttggagttgcagaagcagaggagagcacgtattgaagctgctaagcagcgaattgatgcaactaggaaggctcctgctgctccagctgcaaaagcaaataactcagaagacgttgtaagaaaaaaattgaccatgaagaatcgagggggaaagaagaaggatgatatcgatcatatccttcccagtgacaatatgacaggttgttcaggtgctaggaaaaagagacgaagaggttcctgtgacagtattgattgggaagattgcatcattgagctcctgctactgcatggtgcaaatgaagctgagattgaacaaggccagtacagaagattgttggagttgcatgtattcagtgcagtaagtggggagaattgaaaaatggttaatgcccgtgcgttgcgacagcaaaatcgatcgcgagaagcaagaaagagaaatatacctacatgctttgcactctcaagtgttcgccgttgccttcgctgtattagctgctggtgctatagttctgacactcaatgttctactgctgggtgggaacatcatcttcttccaaagcctcagtcttctcggatactgtctgttcccgctggacgtgggggctctgatttgcatgcttaaggacagcgtcatactaaagatggttgtggtgacggtaacattggcatggagctcttgggcagcataccccctcatgagtgctgctgttaacccaaagagaaaggccctggcgctgtatcccgtgttcctcatgtatatctcagttgcatgtctcataattgctatagattaaggcgggcatggtttctacagaactaacagaagaattacaggattttgttttctagctggatcatcaaaatgcatattattttctttttttggctgcgtatagatctgggttcacattgttattgtagtttttgctggctgcttcaatactttatttcattttgtttaagaaaaaaatcacagggatttagaatgtagtcaatcaaatgtatgaatgttgtatagccatacagatatcttgctgtttcgcatctatgtggataatctggaatggactgctgaagcctgaataagtgaattactctgttttac

SEQ ID NO: 39467 - DNA, 1036 bp, Zea Mays
cttacctaccccttctggttctgcgtgttctatctgcaatcaacgacggcgcgtctcgacggtactgctaattagcctcctagccagcctccgcctggaggtccatccccgacctcgacgcttcccggccaaacgccgacgcccctcaccctcggcgcagcgccgcagcgtcgcggtgctccatacccatccccctccatggtcggcgcctgcatcccccggcatcgcggtgctggatcccctccctctctcgcgttacgctagagttcgagaaggggaaaagcgacgtagggttcggcaacgacacctctgtgtcccctcctccctcgcgcactcattttccttcgtctcgttgctactcagagtgcgttccatccgagcggtgatgtgagatgtgtcccccctattcttcatcggtttgcttgcaatgattgagatagatgtgctcattcgccttgcagaaaatgaaaaataaagatatctttgtgcccagattcagagatggtttgactacctaatcatatatgcatgtgcaaaccgtctaaagctgactgttggatggggttggcgaaggtgtgcttgaataaggatcacctgaaggcgtggagtccctggctgctggttgttgtgtgtcctggcgggcgacagtttgaatcccctgcaggcagtggcggctgtaatatgtactagtataagcatgcagacaacaattggaaattgtatgattcatgtgatcattttccttgtatcttttctattgttggttatatatcagattttagaagattcttgtgatccttttccttgtattcttttctattgttggttatatatcagattttagaagattcttgtgatccttttccttgtattcttttctattgttggttatatatcagattttagaagattcatgtgatccttttccttgttttttattcacctgcgtgttttattgatgtgtgtctgagagaacagaaacttctagattgttctttgtatttttcttgtaacatatcaataaattgaatatatt

SEQ ID NO: 39468 - DNA, 1864 bp, Zea Mays
atctgcaatcaacgacggcgcgtctcgacggtactgctaattagcctcctagccagcctccgcctggaggtccatccccgacctcgacgcttcccggccaaacgccgacgcccctcaccctcggcgcagcgccgcagcgtcgcggtgctccatacccatccccctccatggtcggcgcctgcatcccccggcatcgcggtgctggatcccctccctctctcgcgttacgctagagttcgagaaggggaaaagcgacgtagggttcggcaacgacacctctgtgtcccctcctccctcgcgcactcattttccttcgtctcgttgctactcagagtgcgttccatccgagcggtgatgtgagatgtgtcccccctattcttcatcggtttgcttgcaatgattgagatagatgtgctcattcgccttgcagaaaatgaaaaataaagatatctttgtgcccagattcagagatggtttgactacctaatcatatatgcatggtacgtactagcttctggtaaatatgtgcatgggttctttttcttacatatttgctttctctaaatctcggagctcttcctatcaaagctgatatgcaggagtttgtaaatatatacatactttctttcacagaaatatccactctctgaccccttatgtagctaatctctttctgaataatgttgaaaaacaatcaagtctgacagagacaagatcttaaccaatatttctactagtactaatgctttgtggactctaccggtcaacctccttggcattaaaccacaactcagtactacttaacgctcacaaactaatagcccaataactagacatagtacatcaatgtattatttctactaatgcttcgttgtacctatagatttttgcacacaacacttcatttcacgtggcacttgggtgttcaatttcaatgtattatttggtttttgagctgcaacaagggtgtgttcctattttgtctgaaagcaaacataggtgacttctgaaatgacacacaaacgaaaaaactttccaggtttgctgttaatggctcaaaacaagatgaaaccatgtcctatttagaacacgagaacctgcagatttttttaataaaaagtttatagatattagtgtgcatttacttccacacgcgagccactgcaatgttgtccattaactttatatattatcgtaaatgctttaatctcttctatgccatccttccctattatcaccattagttcacatttattttgactaacggacacgatgtgtaattttttgcaggtacaacagccataaaactgaattttatttggctagaacctgaaatggcggaaactctcaggaatcatgtgcaaaccgtctaaagctgactgttggatggggttggcgaaggtgtgcttgaataaggatcacctgaaggcgtggagtccctggctgctggttgttgtgtgtcctggcgggcgacagtttgaatcccctgcaggcagtggcggctgtaatatgtactagtataagcatgcagacaacaattggaaattgtatgattcatgtgatcattttccttgtatcttttctattgttggttatatatcagattttagaagattcttgtgatccttttccttgtattcttttctattgttggttatatatcagattttagaagattcttgtgatccttttccttgtattcttttctattgttggttatatatcagattttagaagattcatgtgatccttttccttgttttttattcacctgcgtgttttattgatgtgtgtctgagagaacagaaacttctagattgttctttgtatttttcttgtaacatatcaataaattgaatatatt

SEQ ID NO: 39469 - DNA, 1074 bp, Zea Mays
atctgcaatcaacgacggcgcgtctcgacggtactgctaattagcctcctagccagcctccgcctggaggtccatccccgacctcgacgcttcccggccaaacgccgacgcccctcaccctcggcgcagcgccgcagcgtcgcggtgctccatacccatccccctccatggtcggcgcctgcatcccccggcatcgcggtgctggatcccctccctctctcgcgttacgctagagttcgagaaggggaaaagcgacgtagggttcggcaacgacacctctgtgtcccctcctccctcgcgcactcattttccttcgtctcgttgctactcagagtgcgttccatccgagcggtgatgtgagatgtgtcccccctattcttcatcggtttgcttgcaatgattgagatagatgtgctcattcgccttgcagaaaatgaaaaataaagatatctttgtgcccagattcagagatggtttgactacctaatcatatatgcatggtacaacagccataaaactgaattttatttggctagaacctgaaatggcggaaactctcaggaatcatgtgcaaaccgtctaaagctgactgttggatggggttggcgaaggtgtgcttgaataaggatcacctgaaggcgtggagtccctggctgctggttgttgtgtgtcctggcgggcgacagtttgaatcccctgcaggcagtggcggctgtaatatgtactagtataagcatgcagacaacaattggaaattgtatgattcatgtgatcattttccttgtatcttttctattgttggttatatatcagattttagaagattcttgtgatccttttccttgtattcttttctattgttggttatatatcagattttagaagattcttgtgatccttttccttgtattcttttctattgttggttatatatcagattttagaagattcatgtgatccttttccttgttttttattcacctgcgtgttttattgatgtgtgtctgagagaacagaaacttctagattgttctttgtatttttcttgtaacatatcaataaattgaatatatt

SEQ ID NO: 39470 - DNA, 268 bp, Zea Mays
ccgggtggtcgtcggtgttgtcctcgccacggctggcgtccgggggtccgcgacgagccgaggtgctttgggtggttgtcagtggatcgcctgtagctagattgggaggaaatcgaccctggggcggctggaattcatcaccgtacacatcgatccgccgcaccgcgtgggtagattggagtactcctggaatcgcgaagagcaagtggctgaggatcccggtgttcagcaggtagaagttgctgaacaggagctcattgaaggcaag

SEQ ID NO: 39471 - DNA, 2193 bp, Zea Mays
tttgttagttacaacactaacgattcctccactttctaagaaagaggttattacaccttgcaacctaactttagtccccttatgctagaactccaaagccttttgtttccaatgataaagcataggatcatagttctgcaaccaatcaaatcctaagataacatcatatgaacccaactctagaattctcatgtcagtgctaaaagaatggccattacaccaccattctactgcaggtaccatagaatcactcaccgactccttaccattagccacctttaccttgacagcaggacaactgatagatggtaaccccacttgctgcacaaaagcagaattaatgaaagtagtagaactgcatgtgtccaccaataacaaaaatgcttgatccttcaccaatgcttgcaaacgaatattctgcatacttttagtaccagaaatagctagcatcgacggtttacaagactccttgtctgatgacagcccccctcgtagaagtcgacctctacctttctccaaaacttcagagtgcaactttgccaatagcacaacacgattcaccgtagttggtacttgacacaacactgagccccgaatatcaggtttgaggcccttcacaaattgttgcccaaagaaaatttcatccaacgtaggattgtgcatagcagtggaataacgtaacccaacaaactcctctacatactcatccactgaacccgactactgcagatgaagcaggtcatgcatagcttgggggtactcataagaaccaaaagtactcaccactacagcagtaaactgattccaatttcaaagaggttgattcaacttgtaaacctgcagctatttcgctgccttgccttccatatgcatagaggctgccatcacccacaacgatgcctgagcatgatagagagtaaagtaatccttgcacttagcaaaccaaatagaaggatggtcaccctgaaagttgggaaaccacaatttcatcatagaagcatttccaccaccatcatcacgtccatgtcgatgtccacctgcaccatgatcatgcattggatgccgcccatcctgatcaaattcatccatctgatgtggagaaggtacgcctccagaatccgaatatagttcagaagaaggttccccaaactggtccatccgctcagccatccgttccaaagtcaaggctaccaccctcttccatatttcatcaatatgccgtgccatgacatcctgatccttcgccacttgctccgccatagatgatgatagacttgctgacccatcaactgttggtgattggtctccaacttttgcaaccgtccactgatggagtccagcgctgcaaacatcttatcccaccgagtctcatccgaacgattcgtctccgccattgcttccaagacgaagcgcgtctgcaccgaaggtcgagcagacggagccatgatgccaccccgacgaacgacgtccctgaaccacccaccaagcacagaaagatgcctcccaggacaatgaatctggtaccagttgtaatgcccctggccgccgaggagagttcctcgcagacgtgagccgcatacatgagtaggagaactgtctccagtacgcgagaggaaaaaggaagcagcgaagaaacctatgcaaacaaggttatccaagctgctaaagaaccagggctacgtccttaccataatccatatccgagagactctcgcgaagcgcgaacaatctactcgttcaaataaaaaccaatatgatatgtgtgggaggcaatgcaactcaatagctgattttgatcttactggacatttagtgtggccaagggcagtcctgatgaacaactaactatctcaacaccctgaaactcttaagggatgttcagtaatcgagctacgatctgggattggtgagaaaattcactgccagactccctgctgcctttggttgtatgaaagctaaatatattatgacctgttgtatgcatttctggcgtattgtgtagccgtttctgcaagggtggtagagcataaatgatgcagttaccttctatacttgcatcattccttattattcagttgaagtgccacacatattgttagataaatgctgcacttcagatatccattgtgtatcgtgttacctgtttaattgcaacacatttgaatgtctttacttacctggtattttttgtgt

SEQ ID NO: 39472 - DNA, 3946 bp, Zea Mays
tttgttagttacaacactaacgattcctccactttctaagaaagaggttattacaccttgcaacctaactttagtccccttatgctagaactccaaagccttttgtttccaatgataaagcataggatcatagttctgcaaccaatcaaatcctaagataacatcatatgaacccaactctagaattctcatgtcagtgctaaaagaatggccattacaccaccattctactgcaggtaccatagaatcactcaccgactccttaccattagccacctttaccttgacagcaggacaactgatagatggtaaccccacttgctgcacaaaagcagaattaatgaaagtagtagaactgcatgtgtccaccaataacaaaaatgcttgatccttcaccaatgcttgcaaacgaatattctgcatacttttagtaccagaaatagctagcatcgacggtttacaagactccttgtctgatgacagcccccctcgtagaagtcgacctctacctttctccaaaacttcagagtgcaactttgccaatagcacaacacgattcaccgtagttggtacttgacacaacactgagccccgaatatcaggtttgaggcccttcacaaattgttgcccaaagaaaatttcatccaacgtaggattgtgcatagcagtggaataacgtaacccaacaaactcctctacatactcatccactgaacccgactactgcagatgaagcaggtcatgcatagcttgggggtactcataagaaccaaaagtactcaccactacagcagtaaactgattccaatttcaaagaggttgattcaacttgtaaacctgcagctatttcgctgccttgccttccatatgcatagaggctgccatcacccacaacgatgcctgagcatgatagagagtaaagtaatccttgcacttagcaaaccaaatagaaggatggtcaccctgaaagttgggaaaccacaatttcatcatagaagcatttccaccaccatcatcacgtccatgtcgatgtccacctgcaccatgatcatgcattggatgccgcccatcctgatcaaattcatccatctgatgtggagaaggtacgcctccagaatccgaatatagttcagaagaaggttccccaaactggtccatccgctcagccatccgttccaaagtcaaggctaccaccctcttccatatttcatcaatatgccgtgccatgacatcctgatccttcgccacttgctccgccatagatgatgatagacttgctgacccatcaactgttggtgattggtctccaacttttgcaaccgtccactgatggagtccagcgctgcaaacatcttatcccaccgagtctcatccgaacgattcgtctccgccattgcttccaagacgaagcgcgtctgcaccgaaggtcgagcagacggagccatgatgccaccccgacgaacgacgtccctgaaccacccaccaagcacagaaagatgcctcccaggacaatgaatctggtaccagttgtaatgcccctggccgccgaggagagttcctcgcagacgtgagccgcatacatgagtaggagaactgtctccagtacgcgagaggtaagaagcgtttgagatttcagtttatgttattcgataccactgatgcttacatattgttatatttatatcctacttgcgataagctaaatctctcaccattactggccataggcctataaactccaactaaattacaactaggacacaacagaactaatactaagcacttatcgactcaccacgtcttcaaacgccggctgcctcccccttccacgcgctcggcctccatccccaagcaccgcgccctggtggtcgccctcgtctctccctgcccatggagcttgccgtcgtcctggaccggccgagaaccctagccagtcgccaggccgctcctcgccttcctcccgctcgtcctccatgggtgcgccgccgcgagctccatgctctgacatccgtgccgccgattcgcccgaccgtcatccccatggctgcaacgccgtcctccactcggcctccctgcaccgcgccatggtgaccgcgggaccggctgtcccctgctcctccctcccttagcctagacgtgctgtcgccggaccgtgcaccgccgtacctcaaacctcgcctcgccgtgctctgccgcgagctcgccgtcgaccctgtccaagaaccggcgttggcaccatgcccctcctctgctcgccgggtccgaagtcgccaagccgccggactcctccatcgcgcccaagaccgagcgccgtcgacctcgctctgccatggatgcccagctcctcgcctctcatcgccggcagcggacctcgccagcgcccaggcccctgcgccggactccggccctgtctcctcgacgtgctgaggcagcttgaggcactcgtattttttagtgcaatccgaggaaaaaggaagcagcgaagaaacctatgcaaacaaggttatccaagctgctaaagaaccagggctacgtccttaccataatccatatccgagaggtaaccttctgtgatgttataataaacacctccatattattctacatagcgagccacaacagaaatttttttgacaacattttttcacattctattcgatattaaattagtttatgaggtaaataattccaaattggtaaaagatgagttcaacattggcccattcttctcacagctgcaggcattagccaacagacctacatcttgcatatgtatttctcttgcatctacttacctctatggatctagcatatggctgcatatatgactgattatgacactgatatatatgtttcgatttccgatgaaatgttaccataacttttttgtcggtcatattcattgttgctagaattctagcagaacaagcatgacaataagcttcgctgctgactctgcagatatccacctgcaatatagtgataaataatagaacatttgtgagatgtcgtggtgccctatcatgctttctttgctttccttcaaattcttcctatgatatggctaacaaaatgaaatggtagattcaggtgacttcacaaccttttgatgtttaggttagaacagtgtgatggtcaagttgtaaaaatggttgcaaaaatgctgaatacatgttgaagaaatggttgcacatatgattgattctggaagaaatgaaatcactagagagaagaaaataggcgctggaatggtaataggaacttgaagtttgtccttttcagacttctacccagaaaatgattttgtttcgttttccttgcttaatattcctaaatttttgactgactaaattagtgctctattgaacactgaatgctgaatgactgacactggattattatttctcgtagcacagactctcgcgaagcgcgaacaatctactcgttcaaataaaaaccaatatgatatgtggtaacttcaccttggtttcatacaccttttcagttgaactgatgaacccatgggcatgggctatttttgcacatacctcaatactaatccatgcatagatgttgtttacacttcgcagtgggaggcaatgcaactcaatagctgattttgatcttactggacatttagtgtggccaagggcagtcctgatgaacaactaactatctcaacaccctgaaactcttaagggatgttcagtaatcgagctacgatctgggattggttgaaatgatcattggatgaatttatagatttagatgcgcatgagatgggacgaagaagcaatgaataccaagaatatttcttatttgtagttatatttcattttgacctttatagacttaacttattctctagaatcgtatcaatgtaaatatcaattgtattttgtggacaagtattatgttttttttaccttcctccaatcaatacaag

SEQ ID NO: 39473 - DNA, 1549 bp, Zea Mays
cccgagttctccgatttttcaaactcccccaactgacggccacctcgaacggaaggggatcccccttaattatgagacaattattgctgaaattattttttttcggaatccaatgaggtagtatttgtgtgattgtgtccaggccctatacataagccgccatttgcagtccggacgcagccccgttcagtcccagcccaggccgacgacggcagagagcgagccgccgccgccgccgcaccctcgtgccaggttacacggtgtgaaaatgtcaggaagggctttgaaagatctcaatgtttctcagtcagcagacctggagaacggaaaagacaattctgtgaaatcctgcatcaccaagcctgtgttgaatggcaacaaatgtgccaacaaggaagaaaaggctccgtctgcttgccacgacgctgtgactaatggaaatgcggctgccattgcagatgtggagtacattgattctgaaaatctagtagatctcccagatgtcgatgcagctctaagtaccttagctaaaagattggattcaaaggactgggttatgacatgtgaagctctcaacaatgttcgtcagttggcaatgtatcacaaggaacgattgcaggagcttctggagcctctagtccctcttatcgtgaaatctgtgaagaacccaagaagtgctgtatgcaaaactgcactaatgacttgtgctgacatctttaaggcctatggtgacttaatggttcactcaatcgatccactgctgcagaggcagctcttatatcgatgacaagttggatctcccctttactactcttgccaagaatgctgccttacctcaagaacaagaatccacggatccgagcaaaagcatcagtgtgtttcagcaagagtgtaccacgccttgatgtggtgggaatcaaagaatatggtatggataagctcatccaaattgcggcaacccaacttagcgaccagcttcctgaatcaagggaggctgctcgcaacctggcactggaactgcaagcattctatgagaagtctcaggcctcaacttctgacgaacacgaggtcgaggcctctgcctcgccagatgctgaatcatgggaggctttctgccagtccaagctctccgcattaagtgcccaagccattcttcgtgtgacctctactactacaaaagagtgcgtcacctctgccccaaaagaagggttggctgtgggttgctagcacaagccacaggggagatattgcgatttttcaccctgttcgctgttttgctgtacatgcttttggtttgtcctgcggtgcacccagtcgtgaaaaggttaatcattggttcaggagttcaggtgtgaccacggtgttaatattggtgtgggatatatatccattatagttggttgtacaatcatttggttccactacttggtattggagtgtagattttttttccatggttcagtgttatacacaacagtccttattttttgtttttgatgctggtcctgttattttgaaggaaatgacatattttgtgtttcggaccttg

SEQ ID NO: 39474 - DNA, 1412 bp, Zea Mays
aaactcccccaactgacggccacctcgaacggaaggggatcccccttaattatgagacaattattgctgaaattattttttttcggaatccaatgaggtagtatttgtgtgattgtgtccaggccctatacataagccgccatttgcagtccggacgcagccccgttcagtcccagcccaggccgacgacggcagagagcgagccgccgccgccgccgcaccctcgtgccaggttacacggtgtgaaaatgtcaggaagggctttgaaagatctcaatgtttctcagtcagcagacctggagaacggaaaagacaattctgtgaaatcctgcatcaccaagcctgtgttgaatggcaacaaatgtgccaacaaggaagaaaaggctccgtctgcttgccacgacgctgtgactaatggaaatgcggctgccattgcagatgtggagtacattgattctgaaaatctagtagatctcccagatgtcgatgcagctctaagtaccttagctaaaagattggattcaaaggactgggttatgacatgtgaagctctcaacaatgttcgtcagttggcaatgtatcacaaggaacgattgcaggagcttctggagcctctagtccctcttatcgtgaaatctgtgaagaacccaagaagtgctgtatgcaaaactgcactaatgacttgtgctgacatctttaaggcctatggtgacttaatggttcactcaatcgatccactgctagtacaactgtttctgaaggcttcacaagataagcgttttgtctgtgaagctgcagaggcagctcttatatcgatgacaagttggatctcccctttactactcttgccaagaatgctgccttacctcaagaacaagaatccacggatccgagcaaaagcatcagtgtgtttcagcaagagtgtaccacgccttgatgtggtgggaatcaaagaatatggtatggataagctcatccaaattgcggcaacccaacttagcgaccagcttcctgaatcaagggaggctgctcgcaacctggcactggaactgcaagcattctatgagaagtctcaggcctcaacttctgacgaacacgaggtcgaggcctctgcctcgccagatgctgaatcatgggaggctttctgccagtccaagctctccgcattaagtgcccaagccattcttcgtgtgacctctactactacaaaagacatgtccctgtgggtatgatgaatatggaaactaggaggaggattggtggagaaggcgccggatgtggatgctgaggtctgaggatgatggttcagctattgcctattgcgaactttctttgtgtccaggtgtcactggatgttagaaagcctcaaagccatgcgtaggggagattttgttggaggtatagatggcaat

SEQ ID NO: 39475 - DNA, 1152 bp, Zea Mays
cggattgaacaggtttacaggcgcgctcccgcacgcatgccccaacccttttttgacaagctcagcgtccaccactaaacgtaagatggcggcggagaccaaaccggctgcggccatcggggttgccggcgagatggaggtggaggcataccgccgcctattcccggtggccttcctggagcgccacctgggccatgctcgcgtcggtcaagctcgaggtgatgtcgccctcggccgagtacccagacgaaggatccgtctctgttgagttccacatgccgcccatctgctccccgctggttaggccaggccgatctgcggaggtggcaccagtcatctccaaggcccttgaagacgttttgatgagttccagaatgctaaatttgaaggacctctgtttgataactgggaaggcttcttggctagcatacctggatatctattgtttgaatgctgatgggtctctgtttgatgctgcacttatttcagcagtggctgcctttacacatttggagattcctttagtttctgttggtgacgatggtaaattatttactgttggaggcaatgacggaaaaaacaaatttgaattggtaaacagagaaaagaggaaactgacacttggcgacattccattgtcccttacatgtgcacttcataaaggatctatactaacggacccaacttctgaagaagaatcaattatagagacctatgtgactgttgtcgttgattcttcagaccgcctagtgtcattacaaaaagttggaggcacagtgacatccatggcaactattaaggagtgcattagcttggcgaaagaaaggaggctgaggctaagagaaattctgatagactctgtcaaagccatggaagtcgaccatactgaataattctgcaaatacattcagttaatctaaccggattatttcttgatggttctctgtgcctcggctgcactgattgtaacagcatttttgttgggttagtccaagtatgtagctatttgtactccgcacatgatttttgacttaagtagccagacaattttatctgatgagcatgtctgcaatgcaccatttctcgcaagttgctatcttgtaacaccctaattcacattttgcagtattttaatttatttttcaagatttc

SEQ ID NO: 39476 - DNA, 814 bp, Zea Mays
acggttcctcccttcttcgatgcattcatttccagaatgctaaatttgaaggacctctgtttgataactgggaaggcttcttggctagcatacctggatatctattgtttgaatgctgatgggtctctgtttgatgctgcacttatttcagcagtggctgcctttacacatttggagattcctttagtttctgttggtgacgatggtaaattatttactgttggaggcaatgacggaaaaaacaaatttgaattggtaaacagagaaaagaggaaactgacacttggcgacattccattgtcccttacatgtgcacttcataaaggatctatactaacggacccaacttctgaagaagaatcaattatagagacctatgtgactgttgtcgttgattcttcagaccgcctagtgtcattacaaaaagttggaggcacagtgacatccatggcaactattaaggagtgcattagcttggcgaaagaaaggaggctgaggctaagagaaattctgatagactctgtcaaagccatggaagtcgaccatactgaataattctgcaaatacattcagttaatctaaccggattatttcttgatggttctctgtgcctcggctgcactgattgtaacagcatttttgttgggttagtccaagtatgtagctatttgtactccgcacatgatttttgacttaagtagccagacaattttatctgatgagcatgtctgcaatgcaccatttctcgcaagttgctatcttgtaacaccctaattcacattttgcagtattttaatttatttttcaagatttc

SEQ ID NO: 39477 - DNA, 840 bp, Zea Mays
cagctccctgcatcgtttaccatggaccatctcctgtaaatcaaaataacagcagttccagaatgctaaatttgaaggacctctgtttgataactgggaaggcttcttggctagcatacctggatatctattgtttgaatgctgatgggtctctgtttgatgctgcacttatttcagcagtggctgcctttacacatttggagattcctttagtttctgttggtgacgatggtaaattatttactgttggaggcaatgacggaaaaaacaaatttgaattggtaaacagagaaaagaggaaactgacacttggcgacattccattgtcccttacatgtgcacttcataaaggatctatactaacggacccaacttctgaagaagaatcaattatagagacctatgtgactgttgtcgttgattcttcagaccgcctagtgtcattacaaaaagttggaggcacagtgacatccatggcaactattaaggagtgcattagcttggcgaaagaaaggaggctgaggctaagagaaattctgatagactctgtcaaagccatggaagtcgaccatactgaataattctgcaaatacattcagttaatctaaccggattatttcttgatggttctctgtgcctcggctgcactgattgtaacagcatttttgttgggttagtccaagtatgtagctatttgtactccgcacatgatttttgacttaagtagccagacaattttatctgatgagcatgtctgcaatgcaccatttctcgcaagttgctatcttgtaacaccctaattcacattttgcagtattttaatttatttttcaagatttc

SEQ ID NO: 39478 - DNA, 812 bp, Zea Mays
aaataatataagttgaataatatgagaaagcgaaccaaggattcaagcacccaggttttcattgagtcaaaactggtataccttgaaagatcaggatatctattgtttgaatgctgatgggtctctgtttgatgctgcacttatttcagcagtggctgcctttacacatttggagattcctttagtttctgttggtgacgatggtaaattatttactgttggaggcaatgacggaaaaaacaaatttgaattggtaaacagagaaaagaggaaactgacacttggcgacattccattgtcccttacatgtgcacttcataaaggatctatactaacggacccaacttctgaagaagaatcaattatagagacctatgtgactgttgtcgttgattcttcagaccgcctagtgtcattacaaaaagttggaggcacagtgacatccatggcaactattaaggagtgcattagcttggcgaaagaaaggaggctgaggctaagagaaattctgatagactctgtcaaagccatggaagtcgaccatactgaataattctgcaaatacattcagttaatctaaccggattatttcttgatggttctctgtgcctcggctgcactgattgtaacagcatttttgttgggttagtccaagtatgtagctatttgtactccgcacatgatttttgacttaagtagccagacaattttatctgatgagcatgtctgcaatgcaccatttctcgcaagttgctatcttgtaacaccctaattcacattttgcagtattttaatttatttttcaagatttc

SEQ ID NO: 39479 - DNA, 818 bp, Zea Mays
atggtggtagctgtcttgttccatgggaagttgtcacggggcctctgaagtttggcgggcttggaatccctaaccttaaattcaaaagctaggcattgcaggcaaaatggttatggttggaaaagacggatctaagcagaccttggcatgggctattcctcccagtgcagtgacagtggagattcctttagtttctgttggtgacgatggtaaattatttactgttggaggcaatgacggaaaaaacaaatttgaattggtaaacagagaaaagaggaaactgacacttggcgacattccattgtcccttacatgtgcacttcataaaggatctatactaacggacccaacttctgaagaagaatcaattatagagacctatgtgactgttgtcgttgattcttcagaccgcctagtgtcattacaaaaagttggaggcacagtgacatccatggcaactattaaggagtgcattagcttggcgaaagaaaggaggctgaggctaagagaaattctgatagactctgtcaaagccatggaagtcgaccatactgaataattctgcaaatacattcagttaatctaaccggattatttcttgatggttctctgtgcctcggctgcactgattgtaacagcatttttgttgggttagtccaagtatgtagctatttgtactccgcacatgatttttgacttaagtagccagacaattttatctgatgagcatgtctgcaatgcaccatttctcgcaagttgctatcttgtaacaccctaattcacattttgcagtattttaatttatttttcaagatttc

SEQ ID NO: 39480 - DNA, 672 bp, Zea Mays
ccaccatctatgcttcagcgcttccttttgtggagattcctttagtttctgttggtgacgatggtaaattatttactgttggaggcaatgacggaaaaaacaaatttgaattggtaaacagagaaaagaggaaactgacacttggcgacattccattgtcccttacatgtgcacttcataaaggatctatactaacggacccaacttctgaagaagaatcaattatagagacctatgtgactgttgtcgttgattcttcagaccgcctagtgtcattacaaaaagttggaggcacagtgacatccatggcaactattaaggagtgcattagcttggcgaaagaaaggaggctgaggctaagagaaattctgatagactctgtcaaagccatggaagtcgaccatactgaataattctgcaaatacattcagttaatctaaccggattatttcttgatggttctctgtgcctcggctgcactgattgtaacagcatttttgttgggttagtccaagtatgtagctatttgtactccgcacatgatttttgacttaagtagccagacaattttatctgatgagcatgtctgcaatgcaccatttctcgcaagttgctatcttgtaacaccctaattcacattttgcagtattttaatttatttttcaagatttc

SEQ ID NO: 39481 - DNA, 2276 bp, Zea Mays
gtcacgaaaggggttaaaataaaaaaaattcgggcccaacggccacgctgaacacgaataggcaattaggcatagcgctctctctcccgctcgccccctcgagtcccgactcccgtcctcgatcgaaattccccggatcttccagctattagacagttttcctgctgattttcgcggcttcttttcttttgctcccggggagataggatggagaggatactcagatgcttcaatctagggccaacaggatccgaagatgatgatataagtttcacactgaccgtggaaacgtttagcttcgaagagctctctgctgcaactgataatttcagtagcaccctcaggataggctctggggggcaagccacagtctatgaaggccacataccccacattggacaggttgctgtcaagcggttgagaaccaatgattttccctctaagcaaagggcatttcttatggaggtctatgtgctcaattcaactaaccaccctcacattgtgaaactactcggttgctgttctgagggaacagaacgacttcttgtgtatgaatatgtaaagggggggacattgcgtcatcgattgaaagagttgaactggtatacgagaatgagaattgcacgtgacacagctacagttctggagaaactccatctccaatccgatccaccaatcatccacagggactttaaatcagacaacattttattaagcacaaaccttagtccaaaggtttctgatttcgggatagctaaaattgccccagctggggatgagcttactgcagcaacatcagaaacgttgggaacgtatggatatgcttcaccagggatttttcgtccattaaatgcgacagtcatgacagatatctacagttttggggttgtgctcttggagatcattactggaaagcctgccattgatcatagtaaagaaggagatgaacattatctagttcactggttttttttggagctgattatgttattaaagagcaagttttggagtagtggttcatttgactgtgtttggaagtccaacgaatctatggacagactaaggttgaaaaatcgtttgtggaactaatgatgatatataaactgatgggcatgtttaggcatacatgtggtttatctgttattttctgaagataaataatactggagagagagagagagttgtcggtacatgtactgttcgtattataattggcttgggagagtgctgcatctgatgggcatgaagatatataaactgctgcatcaaacaggccaatttgaaagaactatcagaaactactgggaacagggactcacttcaggtcgtttatggcatatatgtacttgtccgaagataaacaaatacctgagaaagtgtttggtatcaccatatactgtttgttcttcatcatcttggagatgtgcagcagccatttgtaaactactttggatcaagttcctggtgtcatttctccctagattatcatttcacaaaacaacccctgtgcaggccgcaagcaagtcgaaagatgggaactttgaggaagtacttgatccaaggttacgtggctctgtatccagaatggtgctcagcgaggctcttgctgtggtggataggtgcactgggacagaacctgttggccggcctcggattagagaaatcattagagcccttcgccatgtggtgtccatatctcaggatgatactccgggtgcgtcatcgtcagcagcgagctagatacgtgcatggggtctgtcactccatcttcgatgaagcatataagaggcaaatgctgacaagaaagcaaaaactgtcgactgatgcgcatctgctgtttactgattaaaatataattcatgcatgtgactgttagactgtgtgctatatgtaagagactctgccttccatctcgtacatcctgaaagcttctgtcagccacctgcacagcacttaggtgcgtttggttggagagtcaaatggaatagagtggatccattatagtatttgagaatggagccattctattctacgtttggcaagaataacaaagtcgttctattttttgtttggttgaagagttgaatagagcggagccgttccattctttgtttggtttgagagccgtatgagtatagaggggaggataggagggagagtgcttgcatccggttgtttttggagcgggagcgttccaactacttatagtaaatttccataagtagatccagaagtcgttccactcttattttgttggaaaccaaataaccaaaaaa

SEQ ID NO: 39482 - DNA, 2200 bp, Zea Mays
caattatgcaccctcgcgtctagaaggaaatgccaaatcgatttactgctcttattcgttcctagaaatgcaccagtgagtaggattcttgattttctttttctcttttcctttttcagaggaacgcagtatcactggatggtttctaaacggagggccaacaggatccgaagatgatgatataagtttcacactgaccgtggaaacgtttagcttcgaagagctctctgctgcaactgataatttcagtagcaccctcaggataggctctggggggcaagccacagtctatgaaggccacataccccacattggacaggttgctgtcaagcggttgagaaccaatgattttccctctaagcaaagggcatttcttatggaggtctatgtgctcaattcaactaaccaccctcacattgtgaaactactcggttgctgttctgagggaacagaacgacttcttgtgtatgaatatgtaaagggggggacattgcgtcatcgattgaaagagttgaactggtatacgagaatgagaattgcacgtgacacagctacagttctggagaaactccatctccaatccgatccaccaatcatccacagggactttaaatcagacaacattttattaagcacaaaccttagtccaaaggtttctgatttcgggatagctaaaattgccccagctggggatgagcttactgcagcaacatcagaaacgttgggaacgtatggatatgcttcaccagggatttttcgtccattaaatgcgacagtcatgacagatatctacagttttggggttgtgctcttggagatcattactggaaagcctgccattgatcatagtaaagaaggagatgaacattatctagttcactggagacaagttttttttggagctgattatgttattaaagagcaagttttggagtagtggttcatttgactgtgtttggaagtccaacgaatctatggacagactaaggttgaaaaatcgtttgtggaactaatgatgatatataaactgatgggcatgtttaggcatacatgtggtttatctgttattttctgaagataaataatactggagagagagagagagttgtcggtacatgtactgttcgtattataattggcttgggagagtgctgcatctgatgggcatgaagatatataaactgctgcatcaaacaggccaatttgaaagaactatcagaaactactgggaacagggactcacttcaggtcgtttatggcatatatgtacttgtccgaagataaacaaatacctgagaaagtgtttggtatcaccatatactgtttgttcttcatcatcttggagatgtgcagcagccatttgtaaactactttggatcaagttcctggtgtcatttctccctagattatcatttcacaaaacaacccctgtgcaggccgcaagcaagtcgaaagatgggaactttgaggaagtacttgatccaaggttacgtggctctgtatccagaatggtgctcagcgaggctcttgctgtggtggataggtgcactgggacagaacctgttggccggcctcggattagagaaatcattagagcccttcgccatgtggtgtccatatctcaggatgatactccgggtgcgtcatcgtcagcagcgagctagatacgtgcatggggtctgtcactccatcttcgatgaagcatataagaggcaaatgctgacaagaaagcaaaaactgtcgactgatgcgcatctgctgtttactgattaaaatataattcatgcatgtgactgttagactgtgtgctatatgtaagagactctgccttccatctcgtacatcctgaaagcttctgtcagccacctgcacagcacttaggtgcgtttggttggagagtcaaatggaatagagtggatccattatagtatttgagaatggagccattctattctacgtttggcaagaataacaaagtcgttctattttttgtttggttgaagagttgaatagagcggagccgttccattctttgtttggtttgagagccgtatgagtatagaggggaggataggagggagagtgcttgcatccggttgtttttggagcgggagcgttccaactacttatagtaaatttccataagtagatccagaagtcgttccactcttattttgttggaaaccaaataaccaaaaaa

SEQ ID NO: 39483 - DNA, 1183 bp, Zea Mays
agagcaaagcatacacgcgcgcagtcactcacgcacgcccccagctctctccttctccctgctcgctcgctcgccatggacgctccgagcagctggaagagtcctgcgcgcgccaagtgaccggagaagctgcgagatcagagtagttgcttgccgctcccgtgccaccaaattagattggacgtagctagcagctagctgagccgtagtgcgtagcggcagctaggctgctagctcgatcgttatagctgcgtactagtggtgtcgcagcagaagcagtagccagcttcagtagccgatccggtggtaaaagcaactttttttggacatggcggcggagggagccccggtgctggtgaggcatgctggcggcgtggaggagctgcggcagctcccgccggggttccggttccgccccacggacgaggagctcgtggtgcagtacctccggcgcaaggccttgggcgcgccgctccccgccgccgtcatccccgtcgtccgcgacctctacagcctcgacccctgggacgccgtcgacgtgccggccgcccctgatgcgagcagccaaggcgagagatacttcttcgcggtgcggccggcgggcggcgtcggaagtgctaggagggcgaccgcgagcgggcggtggaggccggcggggaaggagaagccggtggccctgccccgcccgtgcggcggcgggagcctcctggtgggcgtgaagagggcgatggcgttcgttccccggcggaagaagaagaaggcggcggcggcggcggccctggcgatcggctgggtcatgcacgagtaccgcctcgccgcgccgctgcacaagcacggctgcagcctggcccaggctcagggagagtgggtcgtctgccgcgtcttccagaagggcagcggcaggccgaggaggaggaggcaacgaccggtgtcaccgtcaccgtcgtccgctagcagctgcgtcacggacgggtcgtcgtcgtcgagctcggacatggacgaggtcagcagctagctagcggccgccgccccagctagccaaccaagggccggcacgacaagccaagaacacgtataccaccagctgacagctcgcagctagctgccggcggactgcctgctgtgccaatctcaaagagaggcgcaagcgcaactcaagcttgaagagcccgtgaccgaggat

SEQ ID NO: 39484 - DNA, 853 bp, Zea Mays
agagcaaagcatacacgcgcgcagtcactcacgcacgcccccagctctctccttctccctgctcgctcgctcgccatggacgctccgagcagctggaagagtcctgcgcgcgccaagtgaccggagaagctgcgagatcagagtagttgcttgccgctcccgtgccaccaaattagattggacgtagctagcagctagctgagccgtagtgcgtagcggcagctaggctgctagctcgatcgttatagctgcgtactagtggtgtcgcagcagaagcagtagccagcttcagtagccgatccggtggtaaaagcaactttttttggacatggcggcggagggagccccggtgctggtgaggcatgctggcggcgtggaggagctgcggcagctcccgccggggttccggttccgccccacggacgaggagctcgtggtgcagtacctccggcgcaaggccttgggcgcgccgctccccgccgccgtcatccccgtcgtccgcgacctctacagcctcgacccctgggacgccgtcgacgtgccggccgcccctgatgcgagcagccaaggcgagagatacttcttcgcggtgcggccggcgggcggcgtcggaagtgctaggagggcgaccgcgagcgggcggtggaggccggcggggaaggagaagccggtggccctgccccgcccgtgcggcggcgggagcctcctggtgggcgtgaagagggcgatggcgttcgttccccggcggaagaagaagaaggcggcggcggcggcggccctggcgatcggctgggtcatgcacgagtaccgcctcgccgcgccgctgcacaagcacaagagcccgtgaccgagg

SEQ ID NO: 39485 - DNA, 1314 bp, Zea Mays
agagcaaagcatacacgcgcgcagtcactcacgcacgcccccagctctctccttctccctgctcgctcgctcgccatggacgctccgagcagctggaagagtcctgcgcgcgccaagtgaccggagaagctgcgagatcagagtagttgcttgccgctcccgtgccaccaaattagattggacgtagctagcagctagctgagccgtagtgcgtagcggcagctaggctgctagctcgatcgttatagctgcgtactagtggtgtcgcagcagaagcagtagccagcttcagtagccgatccggtggtaaaagcaactttttttggacatggcggcggagggagccccggtgctggtgaggcatgctggcggcgtggaggagctgcggcagctcccgccggggttccggttccgccccacggacgaggagctcgtggtgcagtacctccggcgcaaggccttgggcgcgccgctccccgccgccgtcatccccgtcgtccgcgacctctacagcctcgacccctgggacgccgtcgacgtgccggccgcccctggtacatacacgatcgacgacggcgcttcgaaccaccagcagcatccatcgtttctgtcagtactcagtagtagtaggagaaagaactaaaatcgcaagcttttttctttgctttttccctacgatcgatccagatgcgagcagccaaggcgagagatacttcttcgcggtgcggccggcgggcggcgtcggaagtgctaggagggcgaccgcgagcgggcggtggaggccggcggggaaggagaagccggtggccctgccccgcccgtgcggcggcgggagcctcctggtgggcgtgaagagggcgatggcgttcgttccccggcggaagaagaagaaggcggcggcggcggcggccctggcgatcggctgggtcatgcacgagtaccgcctcgccgcgccgctgcacaagcacggctgcagcctggcccaggctcagggagagtgggtcgtctgccgcgtcttccagaagggcagcggcaggccgaggaggaggaggcaacgaccggtgtcaccgtcaccgtcgtccgctagcagctgcgtcacggacgggtcgtcgtcgtcgagctcggacatggacgaggtcagcagctagctagcggccgccgccccagctagccaaccaagggccggcacgacaagccaagaacacgtataccaccagctgacagctcgcagctagctgccggcggactgcctgctgtgccaatctcaaagagaggcgcaagcgcaactcaagcttgaagagcccgtgaccgagg

SEQ ID NO: 39486 - DNA, 856 bp, Zea Mays
caaacaaagaaaagcttctactagctacatatatatatatataccagccgatgaaccatgcatgcagtcacatgcggcatagaattagcagctagcgacggtgaggaggatcgaaaggaagaagacgtacgagatgaaaagagagcgaggcttacatggcgatgagagtggtagctctggtagccaaggatgacttgcctgtgtgctggccacgctcccctcatgcaaggaccatctcgtgtcgaccgacgagcgagcgagcgatcgatcgatgagaggatgacgaagcttggggtgtacgttggtctctcacgggcagtctccttggctagccctgactcactcttaccgcccatgctagcctctgcatctctcgtgttgctgtacagattactgaatatatttgatgagggcgtggctattttttcttccccatgacggtgaatccaagccgaacgaggacacgagagaaggtcggcgagcgagaagaactgtcctggattgagagaagaactttcctgaagacagtatatatatccagttattatgtactgtacaattcaggttccagctaccagcttctttaatttattagcaagagcacagccagctccaatcggttttcagtccacattactggaccgtttgttacacagctccacctccctagcttacgtttaaaggcttatacgtttaatctattacaagcaaattaattgagccatgtaaatgtactaaatatgtgtctccctagctggctagctgtagacccaaaattaatgtactaaatatgtgtctccctagctgtagacccaaaattaatttcatggagctacagatactcacatctacgaaa

SEQ ID NO: 39487 - DNA, 669 bp, Zea Mays
gtctgtttcttctgctattctaagtcatcacaagaacaaaatccagctatcattcatggacatcctcgatctcaggcgcacccttacccaccgccaccagatgtgtacccgcctccccctcggggccatggacatccaccaccaccccatggcgtgtacccgccgccgccgcagggtccttaccccccaccacagcagcctccaccggggtaccagggctacttcaacgaccagcagcgtccttactacccgccgccgcatggagagcatcaacacaaccaccaccagggaaaccagggtagctcctctgggttcctcaaaggatgtttggctgctctctgctgctgctgcgtgctggaggaatgctgcggctgcttctgagacgtgagatgtccgggaatccgatcgcaagttatcgtcgctagcattcgggagcaccccagttattatcatataatagtaactgtgcttgtaaataatctggagcagcagtgttcatgagctcccagccccgcatttatattctcataatttgtagtacgttctatgatttatccgaaaataaaggactctatatatgggattctaaataaggtatttgcatatttcatgggattcaaacagtttttttttgtccgtaaggcgcatttccggccgtttggacacgtg

SEQ ID NO: 39488 - DNA, 2022 bp, Zea Mays
caccagtccagccagcctactgcatcgatggtacatgtacagttgccagtgtcgtctcaaagtcttgcactccctctctctccctacttgctagcagtagcaggcccagccaccgtcgtcgacagctgacagggtccctccctccctctcttaacaccgccaacttatccatcaatggagattaatgatgatttgctcttaccatccaccctctaccatgcatctttctcacactgtcttctcatctttttgtttttccttatataaaccaccatgagcagccagcaaccttactactctccacttcctgccaagtgccaacaagtcccctcttcttcgtctccaaagagacaaaacccaagagaggatcgtacgtcgtagggatcttgttcaatggcggacgcggacctgacaccaaaccactcgctcctcctcaagatgcctgcggcttcggcccacgcccactccccaagcctctcgagcctcctgttatacggccaggagagccatggcgaagcagcgcctgcaaacgcaaatgcaaatgcggcagcagcaacggtggaggacgccgcctcacttgagacctcttctgcagtggttgacagtgcatctccaatggagaggaagaggaaggctacagcagaagacagtgctgcaatcagctctcctcaaccaaaggactgcaagcaggagagcaagagcaggagggggaagaggccccgaaaggagaccgaggagaagagcagcactgatgaagacgaggcctccaaggggtacatccatgtgagggcgaggaggggccaggcgacagacagccacagcctcgcagagagggtgaggagagagaggatcagcgagaggatgaggatgctgcaggcactggtccctggctgcgacaaggttactggaaaggccatggttttggacgagatcatcaattacgtgcagtccctgcagaaccaggtcgagttcctttccatgaggattgcctccatgagcccagtgctgtacgggttcggaacgaacagtgaaggccttcatgatcatcacgcaccaaagatgggaggcgtgtcgttccaggaagccgccattgcagtgccagcaggtccagcggcagcggtgagccaagctagcagtaggccggctccatctgaagccaccatgaacaccgcttgcactaccacgccctactcagtctcactgcaggcccaggcttccatctcattctctccctctcaggaaaacggcggcacttattacctggtgcagcaagcggtgggggagcaggcaacgaggcaggaggagctgctgctgagccagttggtgttcagcaacatgtgctcgttccagtaggggggcagggcaggcaagagtgtttgcgcgagcggaagcgaggaaagagacccccacccacacacccatgcacattgagtcattgacaataggtactgttgcaagctaagtttcattgattgggaggccgacgactgaaaggaggaaatgatgctgcaagatttggctagtaggagcgccagatgagtttcagatccgagcggcaagcggagcctgctgtttgtttgcacattttgagagactttgtagtttgtaatgtttctagctcctgtatgacgattttctcggcggctgcacctgacctgcccaccgtcaccagctcaccgttgtagtagtctccgatgagcaaatcggttgttaatacgtaagagaggagagctatttttgttcttaggcaaacaatgcttaactgtttcattattcaacgacccaactcccagcatctcaacgaatcatagagtgatggacgatcagttttttccccccatgctatctcttgccgtcgggtatgggcagagctgtcgactgacttcgtgtccttgcattgggtttctttgactagtttttgagacggcctttgaactgtttgctcctgtgacaaagaaactcttgtcatcatatgaataacatttcatcggcatcagaggtctctctctgtgtctttctctg

SEQ ID NO: 39489 - DNA, 1859 bp, Zea Mays
cttaccatccaccctctaccatgcatctttctcacactgtcttctcatctttttgtttttccttatataaaccaccatgagcagccagcaaccttactactctccacttcctgccaagtgccaacaagtcccctcttcttcgtctccaaagagacaaaacccaagagaggatcgtacgtcgtagggatcttgttcaatggcggacgcggacctgacaccaaaccactcgctcctcctcaagatgcctgcggcttcggcccacgcccactccccaagcctctcgagcctcctgttatacggccaggagagccatggcgaagcagcgcctgcaaacgcaaatgcaaatgcggcagcagcaacggtggaggacgccgcctcacttgagacctcttctgcagtggttgacagtgcatctccaatggagaggaagaggaaggctacagcagaagacagtgctgcaatcagctctcctcaaccaaaggactgcaagcaggagagcaagagcaggagggggaagaggccccgaaaggagaccgaggagaagagcagcactgatgaagacgaggcctccaaggggtacatccatgtgagggcgaggaggggccaggcgacagacagccacagcctcgcagagagggtgaggagagagaggatcagcgagaggatgaggatgctgcaggcactggtccctggctgcgacaaggttactggaaaggccatggttttggacgagatcatcaattacgtgcagtccctgcagaaccaggtcgagttcctttccatgaggattgcctccatgagcccagtgctgtacgggttcggaacgaacagtgaaggccttcatgatcatcacgcaccaaagatgggaggcgtgtcgttccaggaagccgccattgcagtgccagcaggtccagcggcagcggtgagccaagctagcagtaggccggctccatctgaagccaccatgaacaccgcttgcactaccacgccctactcagtctcactgcaggcccaggcttccatctcattctctccctctcaggaaaacggcggcacttattacctggtgcagcaagcggtgggggagcaggcaacgaggcaggaggagctgctgctgagccagttggtgttcagcaacatgtgctcgttccagtaggggggcagggcaggcaagagtgtttgcgcgagcggaagcgaggaaagagacccccacccacacacccatgcacattgagtcattgacaataggtactgttgcaagctaagtttcattgattgggaggccgacgactgaaaggtgaaagctgcctctgccacctctgccctctcatgaggaaatgatgctgcaagatttggctagtaggagcgccagatgagtttcagatccgagcggcaagcggagcctgctgtttgtttgcacattttgagagactttgtagtttgtaatgtttctagctcctgtatgacgattttctcggcggctgcacctgacctgcccaccgtcaccagctcaccgttgtagtagtctccgatgagcaaatcggttgttaatacgtaagagaggagagctatttttgttcttaggcaaacaatgcttaactgtttcattattcaacgacccaactcccagcatctcaacgaatcatagagtgatggacgatcagttttttccccccatgctatctcttgccgtcgggtatgggcagagctgtcgactgacttcgtgtccttgcattgggtttctttgactagtttttgagacggcctttgaactgtttgctcctgtgacaaagaaactcttgtcatcatatgaataacatttcatcggcatcagaggtctctctctgtgtctttctctg

SEQ ID NO: 39490 - DNA, 1740 bp, Zea Mays
cttatataaaccaccatgagcagccagcaaccttactactctccacttcctgccaagtgccaacaagtcccctcttcttcgtctccaaagagacaaaacccaagagaggatcgtacgtcgtagggatcttgttcaatggcggacgcggacctgacaccaaaccactcgctcctcctcaagatgcctgcggcttcggcccacgcccactccccaagcctctcgagcctcctgttatacggccaggagagccatggcgaagcagcgcctgcaaacgcaaatgcaaatgcggcagcagcaacggtggaggacgccgcctcacttgagacctcttctgcagtggttgacagtgcatctccaatggagaggaagaggaaggctacagcagaagacagtgctgcaatcagctctcctcaaccaaaggactgcaagcaggagagcaagagcaggagggggaagaggccccgaaaggagaccgaggagaagagcagcactgatgaagacgaggcctccaaggggtacatccatgtgagggcgaggaggggccaggcgacagacagccacagcctcgcagagaggtttctgctccccccgttctctttaggtgaggagagagaggatcagcgagaggatgaggatgctgcaggcactggtccctggctgcgacaaggttactggaaaggccatggttttggacgagatcatcaattacgtgcagtccctgcagaaccaggtcgagttcctttccatgaggattgcctccatgagcccagtgctgtacgggttcggaacgaacagtgaaggccttcatgatcatcacgcaccaaagatgggaggcgtgtcgttccaggaagccgccattgcagtgccagcaggtccagcggcagcggtgagccaagctagcagtaggccggctccatctgaagccaccatgaacaccgcttgcactaccacgccctactcagtctcactgcaggcccaggcttccatctcattctctccctctcaggaaaacggcggcacttattacctggtgcagcaagcggtgggggagcaggcaacgaggcaggaggagctgctgctgagccagttggtgttcagcaacatgtgctcgttccagtaggggggcagggcaggcaagagtgtttgcgcgagcggaagcgaggaaagagacccccacccacacacccatgcacattgagtcattgacaataggaggaaatgatgctgcaagatttggctagtaggagcgccagatgagtttcagatccgagcggcaagcggagcctgctgtttgtttgcacattttgagagactttgtagtttgtaatgtttctagctcctgtatgacgattttctcggcggctgcacctgacctgcccaccgtcaccagctcaccgttgtagtagtctccgatgagcaaatcggttgttaatacgtaagagaggagagctatttttgttcttaggcaaacaatgcttaactgtttcattattcaacgacccaactcccagcatctcaacgaatcatagagtgatggacgatcagttttttccccccatgctatctcttgccgtcgggtatgggcagagctgtcgactgacttcgtgtccttgcattgggtttctttgactagtttttgagacggcctttgaactgtttgctcctgtgacaaagaaactcttgtcatcatatgaataacatttcatcggcatcagaggtctctctctgtgtctttctctg

SEQ ID NO: 39491 - DNA, 650 bp, Zea Mays
atgcttcacggacgaaggacaaaatcatttaacattttatgttgcctcgttcttaattcatagcatttgagaacaagtccccaacatcacacatctcgatatgtacaatcatctttcatcagaatgccaaatctacttcgtgacggaagatgactagaaaataaagagaaataactccatttacaggcttactatgcatcacctgcagcaaacaaaaccaaaccgtttgccagatgactaaatatggatgacttatcctaaacaagcacaaggtgggggaagaaacaacaggcgcgtcatgatactgaagccctataacgacatgtacataggttgctttcatgccataaatttaggattgtctgcacgacaagctggggcctggcggggctggtgccttgttagttgagtcgaccacaccaagagtgcctcgatttactgaaggtattggttgcaagattatctactatgatcctgtaataacgcaagaatgtcttcgtcacttgttccgccattgattgcatactgtaatgctgtcctaccatctcgatccatggcttgtgaatcagcacctctgcatacaaacgggaaaaagaaaagaaaatgagacttcgtgtttggattcctgcagctttgattgaccatttcag

SEQ ID NO: 39492 - DNA, 694 bp, Zea Mays
gcttggaaagtttggaaacacggcaactcatgtgtgtttgaaaatgctacaccaagcatccaggaagtactgaggactgtcagcgctgaaggcactctatggtgtagggctggagcaaaaaagctccaggagctcttggtcagggactcggggtgtcggccatggagttttaaaccttttgtttgtttttgttttttttgtggcgcatctgtttaggcgctatagtagggggttgtggttttcttgtactctagttgggtctattccgactcttacgtgtctttctctatcttaataaaatggcatgcagctctcatgcgtatttcaagaaagaaagaaaaaaaagtagatggacctgacaagttcaagggtcgaccgtataattcgctataaaaatatatttggacaaagttaggatggtttgaatgaacacattcttgatggaatttttttcttgactagagcgagtattgatcataataccaaaaacactactgttgtgagtacatcataagtgttagtagtttgcaggatgaactattattttttccttttcctttagtgccacagaagttgaaaggcaagttctacaggatagcgattaggcctgctatattatatggggctgagtgttggtctaataagagacgacatatccaacaactaactcccagtcttcaacgaacgttatacc

SEQ ID NO: 39493 - DNA, 117 bp, Zea Mays
ttttttttctcgaaaaacgcaagagagctgcgcatctttatattaagaagggaaattaaggtccaagaggaccagtacaaaaaccaccctatggtggccagcaacatgcataaataa

SEQ ID NO: 39494 - DNA, 1845 bp, Zea Mays
cttctctggagtatggtccatggttgatgcgctgcgccggcgcgttcccgggagatctccttatttgtttgtttatttgttttgtgagtacacgtggaaagcgcaattccttccctgcaatctgccctccggtggatcggcatgtggttgtggttccattttattatgaccgctccgcgcatgtattgtcgcatctatttgtttctgctatgtgtgcccgtgctttcgcatgtgtatgctgtgcgtctgcgctgcacttgcatgtcgttgaattgcccgttagtcagatacagtcacttgaggagagtgctgaattgttgagagagagatgtttgaagttccataaaaggttgcctgaagggctaggggaagcatacgatggagatattgcatttgccagctcacttgaaacatttggaggaggccacaatgatccaattagtgttgcttttggtgggcctgtaatgaccaaatttacaattgccttacgagaaattggaacatacaaggaagtcctgcgctcccaggttgagcacatgttaaatgacagattactgaattttgttgacattgatttgcatgatgtgaaggatgctcataagcgctttgacaaggctagcctctcatatgaccagattcgtgagaagtacctatcattgaagaaaggtacccgaccagacataacaacggcaattgaagatgagcttcatagtgctcgatcttcatttgagcaagcccgtttcaacctggtcacttcactttcccatgtcgaggcaaagaagagatatgaatttttggaggctgttagtgcgacgatggactcacatcttcgatattttaaacaagtacctccttgcatattttgccttgtggtgtagctatgttatgcatgaatgtgattaatcctatcaatttctatttttttctcgaacgcgcaggagaactgcgccccattatatattaagcagaggaatagaaaaaacagaacaaaacaaaaaaggttttacagtcctccttacggaggccagaaacaggcatacaaataaagatccataaggggatcaaaaaaatcaaactactcaaatcttcctaaggctctaccaagggtgcagccagatgtgtgaggccttttgcaccagccacttcccatcttcttctttcctcatcagcagctctgaggcttgaagacatacttgggttgcagccatcaaaaatgcatttatttcgatgattccataaagtccaagctcctagaatgatgagagagttaaggcccttttttgtgagaccatgaactgctcctcccaccacttcccaccatcccaggaaggagtttgtagtcggctgtggtgcaagagaatgaagaccaaatttcctgagtaaaaggtaccagaactctcgggcaaaagaacattgcacaaggaggtggtctatattttcttcctcttggtcacataacagacatttctctggatgatttaggcctcgctttgccaatctatcagccgtccaacatctcttatgggccaccaaccaaaggaagaagcgacattttggcaaggcccaggacttccagattcttttataatgctcaaatgtcacagatcctaggaacagtccttcatatgctgatttggctgagtacacaccattcgaggcaatactgaaagtatgcttgtcgtcaacctccggctgtagctcgatgccagatagcaaatcccaaagctgaaggtaatctgtcaaaacccctactgacaaagcccctctgatgtcagaaatccatttggcgctaacaattgcttcttgaactgtcctgcaattgattacccgcttcggaattgtgcc

SEQ ID NO: 39495 - DNA, 1382 bp, Zea Mays
ctgaaagtgactgcaccttgaaacatccctttatagtcggttatttaaatattgaagtgtcaatgttgagcacatgttaaatgacagattactgaattttgttgacattgatttgcatgatgtgaaggatgctcataagcgctttgacaaggctagcctctcatatgaccagattcgtgagaagtacctatcattgaagaaaggtacccgaccagacataacaacggcaattgaagatgagcttcatagtgctcgatcttcatttgagcaagcccgtttcaacctggtcacttcactttcccatgtcgaggcaaagaagagatatgaatttttggaggctgttagtgcgacgatggactcacatcttcgatattttaaacaagtacctccttgcatattttgccttgtggtgtagctatgttatgcatgaatgtgattaatcctatcaatttctatttttttctcgaacgcgcaggagaactgcgccccattatatattaagcagaggaatagaaaaaacagaacaaaacaaaaaaggttttacagtcctccttacggaggccagaaacaggcatacaaataaagatccataaggggatcaaaaaaatcaaactactcaaatcttcctaaggctctaccaagggtgcagccagatgtgtgaggccttttgcaccagccacttcccatcttcttctttcctcatcagcagctctgaggcttgaagacatacttgggttgcagccatcaaaaatgcatttatttcgatgattccataaagtccaagctcctagaatgatgagagagttaaggcccttttttgtgagaccatgaactgctcctcccaccacttcccaccatcccaggaaggagtttgtagtcggctgtggtgcaagagaatgaagaccaaatttcctgagtaaaaggtaccagaactctcgggcaaaagaacattgcacaaggaggtggtctatattttcttcctcttggtcacataacagacatttctctggatgatttaggcctcgctttgccaatctatcagccgtccaacatctcttatgggccaccaaccaaaggaagaagcgacattttggcaaggcccaggacttccagattcttttataatgctcaaatgtcacagatcctaggaacagtccttcatatgctgatttggctgagtacacaccattcgaggcaatactgaaagtatgcttgtcgtcaacctccggctgtagctcgatgccagatagcaaatcccaaagctgaaggtaatctgtcaaaacccctactgacaaagcccctctgatgtcagaaatccatttggcgctaacaattgcttcttgaactgtcctgcaattgattacccgcttcggaattgtgcc

SEQ ID NO: 39496 - DNA, 872 bp, Zea Mays
atccagagacgaatcccatcgtgttgtggccggagagacgagaggactccagagagattccgacaccgctgggctcagatgccgccgccgccgccgccgccgcagcagcagcagcagcagtccggcatgactctctgccgcctccccacggccactcttggccttcccctttctctcccctgtttgctacctcgttcccgcccccgcctgtgcttcgccgcacgtcatgccagggccgtcgccgccagggcttcctcatcctctccatcaccggactcttcattcggttcgcggatggaggagtccgtcaagaagacggtggccgacaaccccgttgtcatctactccaagtcatgatattgcatggaggtgaaggcgctcttcaagcggatcggtgtgcagccccatgttatcgagcttgaccatctcggtgctcaaggaccacaaatacagaaggtattagagaggctgactggacagtctactgttcctaatgttttcatcggtggaaagcatgttggtggctgtacagatactgtgaagctgtatcgcaagggggagctagctagcatgctgtccggcctggatatcaacattaacaactcatgacaagtttgaccatgttttgcaagtatagttttgatgtttgagagacttgggcagtcatgtattgagtttttttaacttatgcagattctttatgtctgcaagaaaaaaaaaagctgtgtcatttacacatttttgtttggtactctgattaaatcattgaatttgaccactgtatgcaaattgctagaaagaaaaacgaacgaactcacagattatgtgttcttggcaatttcttctcttattttttcccccaagcacataca

SEQ ID NO: 39497 - DNA, 466 bp, Zea Mays
gtttgaatacggggatgtgaatgggtgctcaaggaccacaaatacagaaggtattagagaggctgactggacagtctactgttcctaatgttttcatcggtggaaagcatgttggtggctgtacagatactgtgaagctgtatcgcaagggggagctagctagcatgctgtccggcctggatatcaacattaacaactcatgacaagtttgaccatgttttgcaagtatagttttgatgtttgagagacttgggcagtcatgtattgagtttttttaacttatgcagattctttatgtctgcaagaaaaaaaaaagctgtgtcatttacacatttttgtttggtactctgattaaatcattgaatttgaccactgtatgcaaattgctagaaagaaaaacgaacgaactcacagattatgtgttcttggcaatttcttctcttattttttcccccaagcacataca

SEQ ID NO: 39498 - DNA, 4381 bp, Zea Mays
gaaaaatgtgagctccgtatccgtaattccgtatcattgtttctctcctgagtctcctccttatcagagaggagctggggaaagtgctccctccgcctccatccgtccgtcgtcgcccggcgaatcgatcgaagctagcaatcaaatcagaaagagcaagagaagcgcccgagtccctaggccggaaagctatggacagcgccgccaactggcggtcaacgcagggcaccgaccctgccgccggcggcgtcgatccaaacgcggctgcccccgccggaagcgactggcgcacccagcttcagccagaggcgcgccacaggatcgtgaataagataatggagactctgaagaagcacctgccagtatcagtaccagaggggctgactgagcttcacaaaattgctgtgcgttttgaagagaaaatctatactgcagccaccagccagtctgattatttgcggaagatttcgctgaaaatgctgtccatggaaagtcagacaaagacacaacagaaccctggaaatgttcaagtgattccaaatcaaaaccctcctggtccagcacctggccttcctccacaagttagtaatccagcacagtcatcagctatcccattgatttctcagcaacagacacggcaatcaaatgcctctacatctgttcaaggttctcttcctagtcttggtcagaactcgtcgagtgtcagccaggcatcgacgctgcataatatgtctgtcatgccacaaaataccatgaacaatggtttagcacaaggtactccacaagatatgtatgctgcacaaaggcaaatggctggtaggcagcagcaacaacaacaacaacaagcacataatcagttaatttatcaacaacagaaatacttgaaccagaaattgcagcagaattcacttatgccatcgcacattcagcagcagcaacctttattgcagtcaacacagatgcaatcttcacagcagcccatgatgcaaatgtcatctggtcttcagcctgggcagactgccattccacaaactcagtccatgacgatgcattcagctacacaaagtggtattcaacaaaacccattgaattcagtacaacaatctgtgcaaccattactccatcagcctacacaatctgtagtgaggcagcagcaacatccacagtccatgcaccagcagtcttctctgcagcaaactcagccaactcaacagcccaacattcctttgcaacaacaacaaccacaattaatgaaccagcagtcaaatttacagcaaaatcagttaatgaatcaacagagtggtgttgtggagacgcaacagcaacaaaggctgccagttcagtcaaataatcttttgaatatgcagcaaacacagcagatgatgaaccagcaatctatgtccttgcaccagccacaacaattggcaaaccaaggaaatatgtcaagtctacatcagcagcagcatcagcaaaatcagcagcagcagcagcttctcggaactgggccaaatgcccgtatgcatatgttacagcagcaaaaggtaattcagcaaccacagcagcaacagcatgctcagcagacatcaatgggtttgatacaacctcagtctcagcagaaccaacttcagcaacctcagcaacatatgatgtcgcagttccagtctcagcctaatcaaatgcagcaacaattgggaatgcaacaaaggctccaaacttcagctggcatgctcttacaacaaaataacattgatcaaaagcaatatgttcaggcacagaggggccttcaagaagcacccagtacatctgtggattccactgctcaaactggtcatccaggcataggtgatttgcaagaggagttatatcaaatgattaagagtttaaaggaccaatactttgtggaattgaatgaattgtacaataaggtatctatcaagatacaacagattgacaaccaaatgcctgctcaaaagtcagcagagcagtatgaaaagatgaagggctttaaaggaatgctggagcgcactttgcatttcctgcaagttaacaagagcaacattcatccaggtttgagggaaaaaatccccatttacgagaggcaaattctcagtatcctaagttcacaaagaaggaaacctgtgcaggcacctgggcagcaaacgtttcagcaatctagtgggcaagctcctagctctaacatttcacagcaacttcagacttcccaaggtttgcagcagcatgatagtcatactagtcagatgcctcaagcaagtttaccaagtatgaacacaggagtacaaacctctggagcacctgcgcctcaaggaacaaactttggtgttccaacaacacagcaaaatgtcacaaatgcaccacaggctggctctaatttggagaatgctcagggaaataattttaatcatgtgcagcatggttcaatgggtgctgctttgcaacaggaaaggactggtcccatgcagggtgcattgaatgcacagcagcagtccagtagcaacatgatatccaacaatgcaatgagtacaatgcagactaataacaatgcaaatgcgaattcattgcagcagttaaagcagcaacgtcaggagcatcaaatgatgcaaagtcagcaaatgaagcagcgccagcagatgatgcaacagatacaacaaaagcaaacgcttcaaccgcagctcccaatacagcaactaaagaaacaacagcagcaagggcagatgcagtttccacagcttcattctggaaatgatgtgaatgagctaaaggttaggcaaggagctgcaatcaaatctggaatgtatcaacagctgagccagcgtaactattatcagcagataaaacagggtggtgtctttccaatttcttctccgcaaaccctccaaacatcgtccccacaaatttcacaccattctcctcaggttgatcagcacagtctgttgcaatctcaagtcaaaaccgggacaccattgcattcagctaactcaccatttgtcccatctccatcccctcctgtggccccatcaccgatgccaatggattcggataaaccactatccaacttatcttcagttactagtgctgggcaggctggacatcagcaaacatctcttgcacctcaaacacaatctatagccgttaacacaccaggtatatcagcgtcacccttgcttgcagaattcacaagtgctgatggaagtccggccaatgtaccaactcaagttccagccaaatcaagcgcagcagaaaggcctctggaccgtttgcttaaagcattgcgaacaacacagcgtgagtccctaagtgctgcagtcagcgatattggatctgtcgtgagtatgattgacaggattgctggatcagcgcctggtaatggttctagagctgctgtaggagaagatcttgtcgctatgacaaagtgccgcttgcaagccaggaacttcataactcatgacgggagtggtgcatcaaagaaaatgaagcgggacacgagtgctatgcctcttaatgtgtcatcagctggaagcgtgaatgatagcttgaagcaatcatatggtgttggtactccagagctacaatcaactgcaacctcacgtgtcaagtggcaaagggctgaggtaaaccatgctctgatggaggagattcaggagataaaccaacagcttatagatacagagctccatgtctctgaggatgatgctgagtccttcactacatctgaggggggcaaagggacggtcattagatgcacattcactgctgttgctgtttgccccagcttgaaatccgtgtttgcgtcagcgcagatgagtccaattttgccgttgaggttgcttgttcctgctagctacccgaaatgctccccggtgcttctagacaagtttcctgatgaacaatggaactcagacgacctgtctaccaaggccaagacaaagttcagcgtattgctccggggtctagctgagcccatgtcactgcgagaaatcgcaaggacatgggatgcttgcgctcgcaaagtgatcacagagtatgcccagcaaaccggaggaggcagtttcagctcgagctatggttgctgggaaagctgcgtaggcgcttgttaattgcttatattgtatctattattattattataagtatttatgtgtcgagtaaaatagaaaaaaaaacagtgtgtctgctgtatactccatccttttgctattgggtcaatgttggcttgataaatatggtcgtgtacagtacagtgtatgcgtcagtccggttagtatcatgtatgctttgcctctatttacagaacttggttttataactttttttcgtcaccttttatatctaaatattttttaatagtctttttttttccatt

SEQ ID NO: 39499 - DNA, 1869 bp, Zea Mays
aaaatgtgagctccgtatccgtaattccgtatcattgtttctctcctgagtctcctccttatcagagaggagctggggaaagtgctccctccgcctccatccgtccgtcgtcgcccggcgaatcgatcgaagctagcaatcaaatcagaaagagcaagagaagcgcccgagtccctaggccggaaagctatggacagcgccgccaactggcggtcaacgcagggcaccgaccctgccgccggcggcgtcgatccaaacgcggctgcccccgccggaagcgactggcgcacccagcttcagccagaggcgcgccacaggatcgtgaataagataatggagactctgaagaagcacctgccagtatcagtaccagaggggctgactgagcttcacaaaattgctgtgcgttttgaagagaaaatctatactgcagccaccagccagtctgattatttgcggaagatttcgctgaaaatgctgtccatggaaagtcagacaaagacacaacagaaccctggaaatgttcaagtgattccaaatcaaaaccctcctggtccagcacctggccttcctccacaagttagtaatccagcacagtcatcagctatcccattgatttctcagcaacagacacggcaatcaaatgcctctacatctgttcaaggttctcttcctagtcttggtcagaactcgtcgagtgtcagccaggcatcgacgctgcataatatgtctgtcatgccacaaaataccatgaacaatggtttagcacaaggtactccacaagatatgtatgctgcacaaaggcaaatggctggtaggcagcagcaacaacaacaacaacaagcacataatcagttaatttatcaacaacagaaatacttgaaccagaaattgcagcagaattcacttatgccatcgcacattcagcagcagcaacctttattgcagtcaacacagatgcaatcttcacagcagcccatgatgcaaatgtcatctggtcttcagcctgggcagactgccattccacaaactcagtccatgacgatgcattcagctacacaaagtggtattcaacaaaacccattgaattcagtacaacaatctgtgcaaccattactccatcagcctacacaatctgtagtgaggcagcagcaacatccacagtccatgcaccagcagtcttctctgcagcaaactcagccaactcaacagcccaacattcctttgcaacaacaacaaccacaattaatgaaccagcagtcaaatttacagcaaaatcagttaatgaatcaacagagtggtgttgtggagacgcaacagcaacaaaggctgccagttcagtcaaataatcttttgaatatgcagcaaacacagcagatgatgaaccagcaatctatgtccttgcaccagccacaacaattggcaaaccaaggaaatatgtcaagtctacatcagcagcagcatcagcaaaatcagcagcagcagcagcttctcggaactgggccaaatgcccgtatgcatatgttacagcagcaaaaggtaattcagcaaccacagcagcaacagcatgctcagcagacatcaatgggtttgatacaacctcagtctcagcagaaccaacttcagcaacctcagcaacatatgatgtcgcagttccagtctcagcctaatcaaatgcagcaacaattgggaatgcaacaaaggctccaaacttcagctggcatgctcttacaacaaaataacattgatcaaaagcaatatgttcaggcacagaggggccttcaagaagcacccagtaatatgaagagaatttctggttccactttcagttttagccatattaaagcatctctagtggagtgagaaaac

SEQ ID NO: 39500 - DNA, 4295 bp, Zea Mays
ctccgtatccgtaattccgtatcattgtttctctcctgagtctcctccttatcagagaggagctggggaaagtgctccctccgcctccatccgtccgtcgtcgcccggcgaatcgatcgaagctagcaatcaaatcagaaagagcaagagaagcgcccgagtccctaggccggaaagctatggacagcgccgccaactggcggtcaacgcagggcaccgaccctgccgccggcggcgtcgatccaaacgcggctgcccccgccggaagcgactggcgcacccagcttcagccagaggcgcgccacaggatcgtgaataagataatggagactctgaagaagcacctgccagtatcagtaccagaggggctgactgagcttcacaaaattgctgtgcgttttgaagagaaaatctatactgcagccaccagccagtctgattatttgcggaagatttcgctgaaaatgctgtccatggaaagtcagacaaagacacaacagaaccctggaaatgttcaagtgattccaaatcaaaaccctcctggtccagcacctggccttcctccacaagttagtaatccagcacagtcatcagctatcccattgatttctcagcaacagacacggcaatcaaatgcctctacatctgttcaaggttctcttcctagtcttggtcagaactcgtcgagtgtcagccaggcatcgacgctgcataatatgtctgtcatgccacaaaataccatgaacaatggtttagcacaaggtactccacaagatatgtatgctgcacaaaggcaaatggctggtaggcagcagcaacaacaacaacaacaagcacataatcagttaatttatcaacaacagaaatacttgaaccagaaattgcagcagaattcacttatgccatcgcacattcagcagcagcaacctttattgcagtcaacacagatgcaatcttcacagcagcccatgatgcaaatgtcatctggtcttcagcctgggcagactgccattccacaaactcagtccatgacgatgcattcagctacacaaagtggtattcaacaaaacccattgaattcagtacaacaatctgtgcaaccattactccatcagcctacacaatctgtagtgaggcagcagcaacatccacagtccatgcaccagcagtcttctctgcagcaaactcagccaactcaacagcccaacattcctttgcaacaacaacaaccacaattaatgaaccagcagtcaaatttacagcaaaatcagttaatgaatcaacagagtggtgttgtggagacgcaacagcaacaaaggctgccagttcagtcaaataatcttttgaatatgcagcaaacacagcagatgatgaaccagcaatctatgtccttgcaccagccacaacaattggcaaaccaaggaaatatgtcaagtctacatcagcagcagcatcagcaaaatcagcagcagcagcagcttctcggaactgggccaaatgcccgtatgcatatgttacagcagcaaaaggtaattcagcaaccacagcagcaacagcatgctcagcagacatcaatgggtttgatacaacctcagtctcagcagaaccaacttcagcaacctcagcaacatatgatgtcgcagttccagtctcagcctaatcaaatgcagcaacaattgggaatgcaacaaaggctccaaacttcagctggcatgctcttacaacaaaataacattgatcaaaagcaatatgttcaggcacagaggggccttcaagaagcacccagtacatctgtggattccactgctcaaactggtcatccaggcataggtgatttgcaagaggagttatatcaaatgattaagagtttaaaggaccaatactttgtggaattgaatgaattgtacaataaggtatctatcaagatacaacagattgacaaccaaatgcctgctcaaaagtcagcagagcagtatgaaaagatgaagggctttaaaggaatgctggagcgcactttgcatttcctgcaagttaacaagagcaacattcatccaggcacctgggcagcaaacgtttcagcaatctagtgggcaagctcctagctctaacatttcacagcaacttcagacttcccaaggtttgcagcagcatgatagtcatactagtcagatgcctcaagcaagtttaccaagtatgaacacaggagtacaaacctctggagcacctgcgcctcaaggaacaaactttggtgttccaacaacacagcaaaatgtcacaaatgcaccacaggctggctctaatttggagaatgctcagggaaataattttaatcatgtgcagcatggttcaatgggtgctgctttgcaacaggaaaggactggtcccatgcagggtgcattgaatgcacagcagcagtccagtagcaacatgatatccaacaatgcaatgagtacaatgcagactaataacaatgcaaatgcgaattcattgcagcagttaaagcagcaacgtcaggagcatcaaatgatgcaaagtcagcaaatgaagcagcgccagcagatgatgcaacagatacaacaaaagcaaacgcttcaaccgcagctcccaatacagcaactaaagaaacaacagcagcaagggcagatgcagtttccacagcttcattctggaaatgatgtgaatgagctaaaggttaggcaaggagctgcaatcaaatctggaatgtatcaacagctgagccagcgtaactattatcagcagataaaacagggtggtgtctttccaatttcttctccgcaaaccctccaaacatcgtccccacaaatttcacaccattctcctcaggttgatcagcacagtctgttgcaatctcaagtcaaaaccgggacaccattgcattcagctaactcaccatttgtcccatctccatcccctcctgtggccccatcaccgatgccaatggattcggataaaccactatccaacttatcttcagttactagtgctgggcaggctggacatcagcaaacatctcttgcacctcaaacacaatctatagccgttaacacaccaggtatatcagcgtcacccttgcttgcagaattcacaagtgctgatggaagtccggccaatgtaccaactcaagttccagccaaatcaagcgcagcagaaaggcctctggaccgtttgcttaaagcattgcgaacaacacagcgtgagtccctaagtgctgcagtcagcgatattggatctgtcgtgagtatgattgacaggattgctggatcagcgcctggtaatggttctagagctgctgtaggagaagatcttgtcgctatgacaaagtgccgcttgcaagccaggaacttcataactcatgacgggagtggtgcatcaaagaaaatgaagcgggacacgagtgctatgcctcttaatgtgtcatcagctggaagcgtgaatgatagcttgaagcaatcatatggtgttggtactccagagctacaatcaactgcaacctcacgtgtcaagtggcaaagggctgaggtaaaccatgctctgatggaggagattcaggagataaaccaacagcttatagatacagagctccatgtctctgaggatgatgctgagtccttcactacatctgaggggggcaaagggacggtcattagatgcacattcactgctgttgctgtttgccccagcttgaaatccgtgtttgcgtcagcgcagatgagtccaattttgccgttgaggttgcttgttcctgctagctacccgaaatgctccccggtgcttctagacaagtttcctgatgaacaatgcaggaactcagacgacctgtctaccaaggccaagacaaagttcagcgtattgctccggggtctagctgagcccatgtcactgcgagaaatcgcaaggacatgggatgcttgcgctcgcaaagtgatcacagagtatgcccagcaaaccggaggaggcagtttcagctcgagctatggttgctgggaaagctgcgtaggcgcttgttaattgcttatattgtatctattattattattataagtatttatgtgtcgagtaaaatagaaaaaaaaacagtgtgtctgctgtatactccatccttttgctattgggtcaatgttggcttgataaatatggtcgtgtacagtacagtgtatgcgtcagtccggttagtatcatgtatgctttgcctctatttacagaacttggttttataactttttttcgtcaccttttatatctaaatattttttaatagtctttttttttccatt

SEQ ID NO: 39501 - DNA, 4102 bp, Zea Mays
aaaaaattctcagccacgaggggtgacttctatgtgcatttgggtttgttttaagaatggagactctgaagaagcacctgccagtatcagtaccagaggggctgactgagcttcacaaaattgctgtgcgttttgaagagaaaatctatactgcagccaccagccagtctgattatttgcggaagatttcgctgaaaatgctgtccatggaaagtcagacaaagacacaacagaaccctggaaatgttcaagtgattccaaatcaaaaccctcctggtccagcacctggccttcctccacaagttagtaatccagcacagtcatcagctatcccattgatttctcagcaacagacacggcaatcaaatgcctctacatctgttcaaggttctcttcctagtcttggtcagaactcgtcgagtgtcagccaggcatcgacgctgcataatatgtctgtcatgccacaaaataccatgaacaatggtttagcacaaggtactccacaagatatgtatgctgcacaaaggcaaatggctggtaggcagcagcaacaacaacaacaacaagcacataatcagttaatttatcaacaacagaaatacttgaaccagaaattgcagcagaattcacttatgccatcgcacattcagcagcagcaacctttattgcagtcaacacagatgcaatcttcacagcagcccatgatgcaaatgtcatctggtcttcagcctgggcagactgccattccacaaactcagtccatgacgatgcattcagctacacaaagtggtattcaacaaaacccattgaattcagtacaacaatctgtgcaaccattactccatcagcctacacaatctgtagtgaggcagcagcaacatccacagtccatgcaccagcagtcttctctgcagcaaactcagccaactcaacagcccaacattcctttgcaacaacaacaaccacaattaatgaaccagcagtcaaatttacagcaaaatcagttaatgaatcaacagagtggtgttgtggagacgcaacagcaacaaaggctgccagttcagtcaaataatcttttgaatatgcagcaaacacagcagatgatgaaccagcaatctatgtccttgcaccagccacaacaattggcaaaccaaggaaatatgtcaagtctacatcagcagcagcatcagcaaaatcagcagcagcagcagcttctcggaactgggccaaatgcccgtatgcatatgttacagcagcaaaaggtaattcagcaaccacagcagcaacagcatgctcagcagacatcaatgggtttgatacaacctcagtctcagcagaaccaacttcagcaacctcagcaacatatgatgtcgcagttccagtctcagcctaatcaaatgcagcaacaattgggaatgcaacaaaggctccaaacttcagctggcatgctcttacaacaaaataacattgatcaaaagcaatatgttcaggcacagaggggccttcaagaagcacccagtacatctgtggattccactgctcaaactggtcatccaggcataggtgatttgcaagaggagttatatcaaatgattaagagtttaaaggaccaatactttgtggaattgaatgaattgtacaataaggtatctatcaagatacaacagattgacaaccaaatgcctgctcaaaagtcagcagagcagtatgaaaagatgaagggctttaaaggaatgctggagcgcactttgcatttcctgcaagttaacaagagcaacattcatccaggtttgagggaaaaaatccccatttacgagaggcaaattctcagtatcctaagttcacaaagaaggaaacctgtgcaggcacctgggcagcaaacgtttcagcaatctagtgggcaagctcctagctctaacatttcacagcaacttcagacttcccaaggtttgcagcagcatgatagtcatactagtcagatgcctcaagcaagtttaccaagtatgaacacaggagtacaaacctctggagcacctgcgcctcaaggaacaaactttggtgttccaacaacacagcaaaatgtcacaaatgcaccacaggctggctctaatttggagaatgctcagggaaataattttaatcatgtgcagcatggttcaatgggtgctgctttgcaacaggaaaggactggtcccatgcagggtgcattgaatgcacagcagcagtccagtagcaacatgatatccaacaatgcaatgagtacaatgcagactaataacaatgcaaatgcgaattcattgcagcagttaaagcagcaacgtcaggagcatcaaatgatgcaaagtcagcaaatgaagcagcgccagcagatgatgcaacagatacaacaaaagcaaacgcttcaaccgcagctcccaatacagcaactaaagaaacaacagcagcaagggcagatgcagtttccacagcttcattctggaaatgatgtgaatgagctaaaggttaggcaaggagctgcaatcaaatctggaatgtatcaacagctgagccagcgtaactattatcagcagataaaacagggtggtgtctttccaatttcttctccgcaaaccctccaaacatcgtccccacaaatttcacaccattctcctcaggttgatcagcacagtctgttgcaatctcaagtcaaaaccgggacaccattgcattcagctaactcaccatttgtcccatctccatcccctcctgtggccccatcaccgatgccaatggattcggataaaccactatccaacttatcttcagttactagtgctgggcaggctggacatcagcaaacatctcttgcacctcaaacacaatctatagccgttaacacaccaggtatatcagcgtcacccttgcttgcagaattcacaagtgctgatggaagtccggccaatgtaccaactcaagttccagccaaatcaagcgcagcagaaaggcctctggaccgtttgcttaaagcattgcgaacaacacagcgtgagtccctaagtgctgcagtcagcgatattggatctgtcgtgagtatgattgacaggattgctggatcagcgcctggtaatggttctagagctgctgtaggagaagatcttgtcgctatgacaaagtgccgcttgcaagccaggaacttcataactcatgacgggagtggtgcatcaaagaaaatgaagcgggacacgagtgctatgcctcttaatgtgtcatcagctggaagcgtgaatgatagcttgaagcaatcatatggtgttggtactccagagctacaatcaactgcaacctcacgtgtcaagtggcaaagggctgaggtaaaccatgctctgatggaggagattcaggagataaaccaacagcttatagatacagagctccatgtctctgaggatgatgctgagtccttcactacatctgaggggggcaaagggacggtcattagatgcacattcactgctgttgctgtttgccccagcttgaaatccgtgtttgcgtcagcgcagatgagtccaattttgccgttgaggttgcttgttcctgctagctacccgaaatgctccccggtgcttctagacaagtttcctgatgaacaatggaactcagacgacctgtctaccaaggccaagacaaagttcagcgtattgctccggggtctagctgagcccatgtcactgcgagaaatcgcaaggacatgggatgcttgcgctcgcaaagtgatcacagagtatgcccagcaaaccggaggaggcagtttcagctcgagctatggttgctgggaaagctgcgtaggcgcttgttaattgcttatattgtatctattattattattataagtatttatgtgtcgagtaaaatagaaaaaaaaacagtgtgtctgctgtatactccatccttttgctattgggtcaatgttggcttgataaatatggtcgtgtacagtacagtgtatgcgtcagtccggttagtatcatgtatgctttgcctctatttacagaacttggttttataactttttttcgtcaccttttatatctaaatattttttaatagtctttttttttccatt

SEQ ID NO: 39502 - DNA, 2620 bp, Zea Mays
gagatggagaatggtggactgctagagatgctcttaaggcatctgtggattccactgctcaaactggtcatccaggcataggtgatttgcaagaggagttatatcaaatgattaagagtttaaaggaccaatactttgtggaattgaatgaattgtacaataaggtatctatcaagatacaacagattgacaaccaaatgcctgctcaaaagtcagcagagcagtatgaaaagatgaagggctttaaaggaatgctggagcgcactttgcatttcctgcaagttaacaagagcaacattcatccaggtttgagggaaaaaatccccatttacgagaggcaaattctcagtatcctaagttcacaaagaaggaaacctgtgcaggcacctgggcagcaaacgtttcagcaatctagtgggcaagctcctagctctaacatttcacagcaacttcagacttcccaaggtttgcagcagcatgatagtcatactagtcagatgcctcaagcaagtttaccaagtatgaacacaggagtacaaacctctggagcacctgcgcctcaaggaacaaactttggtgttccaacaacacagcaaaatgtcacaaatgcaccacaggctggctctaatttggagaatgctcagggaaataattttaatcatgtgcagcatggttcaatgggtgctgctttgcaacaggaaaggactggtcccatgcagggtgcattgaatgcacagcagcagtccagtagcaacatgatatccaacaatgcaatgagtacaatgcagactaataacaatgcaaatgcgaattcattgcagcagttaaagcagcaacgtcaggagcatcaaatgatgcaaagtcagcaaatgaagcagcgccagcagatgatgcaacagatacaacaaaagcaaacgcttcaaccgcagctcccaatacagcaactaaagaaacaacagcagcaagggcagatgcagtttccacagcttcattctggaaatgatgtgaatgagctaaaggttaggcaaggagctgcaatcaaatctggaatgtatcaacagctgagccagcgtaactattatcagcagataaaacagggtggtgtctttccaatttcttctccgcaaaccctccaaacatcgtccccacaaatttcacaccattctcctcaggttgatcagcacagtctgttgcaatctcaagtcaaaaccgggacaccattgcattcagctaactcaccatttgtcccatctccatcccctcctgtggccccatcaccgatgccaatggattcggataaaccactatccaacttatcttcagttactagtgctgggcaggctggacatcagcaaacatctcttgcacctcaaacacaatctatagccgttaacacaccaggtatatcagcgtcacccttgcttgcagaattcacaagtgctgatggaagtccggccaatgtaccaactcaagttccagccaaatcaagcgcagcagaaaggcctctggaccgtttgcttaaagcattgcgaacaacacagcgtgagtccctaagtgctgcagtcagcgatattggatctgtcgtgagtatgattgacaggattgctggatcagcgcctggtaatggttctagagctgctgtaggagaagatcttgtcgctatgacaaagtgccgcttgcaagccaggaacttcataactcatgacgggagtggtgcatcaaagaaaatgaagcgggacacgagtgctatgcctcttaatgtgtcatcagctggaagcgtgaatgatagcttgaagcaatcatatggtgttggtactccagagctacaatcaactgcaacctcacgtgtcaagtggcaaagggctgaggtaaaccatgctctgatggaggagattcaggagataaaccaacagcttatagatacagagctccatgtctctgaggatgatgctgagtccttcactacatctgaggggggcaaagggacggtcattagatgcacattcactgctgttgctgtttgccccagcttgaaatccgtgtttgcgtcagcgcagatgagtccaattttgccgttgaggttgcttgttcctgctagctacccgaaatgctccccggtgcttctagacaagtttcctgatgaacaatggaactcagacgacctgtctaccaaggccaagacaaagttcagcgtattgctccggggtctagctgagcccatgtcactgcgagaaatcgcaaggacatgggatgcttgcgctcgcaaagtgatcacagagtatgcccagcaaaccggaggaggcagtttcagctcgagctatggttgctgggaaagctgcgtaggcgcttgttaattgcttatattgtatctattattattattataagtatttatgtgtcgagtaaaatagaaaaaaaaacagtgtgtctgctgtatactccatccttttgctattgggtcaatgttggcttgataaatatggtcgtgtacagtacagtgtatgcgtcagtccggttagtatcatgtatgctttgcctctatttacagaacttggttttataactttttttcgtcaccttttatatctaaatattttttaatagtctttttttttccatt

SEQ ID NO: 39503 - DNA, 2793 bp, Zea Mays
atgtcgtgatcttatggtccgaccgtaccggtacatttttagcatcgtacgttgcccgaggaggggtacgatgcggctccatatccttagaggtatgaaggcagaagtcatccttgcatttgcagacatttgcactcatgaggtatatatgaagtgtgacattactatgttactattgtggtttctacctgcgaggtgtggtgactaggtgtgttgtacgttgtatacgtgctgcaccttcgtaataagaaggttgtggaatcaagtggtggtaaaacaatgttcttatgtggttaaacagtttgatattattttacttgctgagatgtgtcatctcactcttgcattactcaatgcaggtacttgatacatgttgggaatgaggggagtagcagcacgtccactttcactctcacaataacgctgcccagacgcggccatgatttaattagaaacttattgtcaaaggaagtttgtttttttaactagtcgtgcgcactagttaattcacttcatgtcgtatgtttaacttctctttgctagccgattaataatacttagtatgtttttgtcatgatatatgtttatacactcttgccccctcatttatgcaattttgcaaggggaatgctgccgaaattttatatatagatgtcagaagtgttgtttagtagcattgcggggtgttggtggaccccggggtgttacatacggctggtggacccacgatgcgatgcgaaggcgctgcgtcccagcgcgaagggctccaccatggttgatgcgatgccttcgcctgtggtgcctgcggtggctgccaggagaatgccctcacctgcatgggctgatgaggtggcagggacgaagtgggccgattttggagaagctaactgggagttgtctatggacgactacttgactgaagatgtgggcatgttcaacgctcatatgggactgtcggctagctgggctaggttttgacagatggtggcagtgtcgacaaagtcggtagaagagatgacccaagcaaagactgcgatggcgacttcgctagacccgtgagcgtgattctacgctgctattgactagggcagagaggtcgctagcacgtctacggttgagggtgtggcggcaactaacatgtggcaacttcgctacatgagtttttttaccgaggtctatgcaatggtaggctgctatcttcactgatcaaatgcatctagggcgctggtggatgttgcgacctcccaactgtgttctgagaagaaatggcaggaggacaagatagaacgcctttggatgcagaatattgaagccattaaggacaagtctgtggccgagaacaagagtcagaacctgttggagaaggttgactcacttgagaaagagaatgaggggctcgatcgccagctaagtgaggagaaagataccgcttaccacaacagggtggatgttatcactcgggttggcgtggacaaggcacatacactttttgttgatacatatcatgatctaggcatggagacaacccccttctacaagtcggggggaggtggggacccgcttcctcgtctggatgcaagaggagttggagtccctcctgtctattgcgacgacctcatgtcttatgcctccctcgttacctgtgaaggggtagcagatgccttgtcccatgagggatgtaggcacttcgaagtctttgaccagagtaacgaggactttgaccacagagtgttccaggtcgaagatgttgtgctaaagagtttgactgaggcactgtatgaccggatgtggggtccccacggtcatggagtcgtccaagagagggctggtcgggtgctggcacaggcgctaagggatgaagagattgaggacctcgctggcttggaaagcttaatggatacgcaagatgctggtgcgaaggcgaatacagaagagcagtcatcgcacgggagggtcggtggtactgaccctgcagcagtggggaccttgcattcgtctgccgctgagcaggttctggtgactgggcttgcgcaagcaaattttggcttcctggacaaagggatggaaatggttggggctgttgaatgtgttacaccattgtcttgttggagttcaacaaagtttagcaacgatggctctgaatttgactcatggtcgtcgtgtagcgaagggtggttgagccctttcgcgaagatggacgaagagtcctcggaagagaatttggatttatttgttgcgttagatgtgtccgcggtggaatctagaatggaggagtcttcatctaggggcccgacgacaactgtggtgaaaagcaaaaggagaagagtgggtgtaccaaaacgaaggctagggagtgccggagcttcaccaagaggaggtgagggctctcgaaggcgtcgtagtatgggactaggaggacctcgcccgtgggtctcactcctcaaggtgcttcgtatgttgcccctgcgccctcaagagagggagggggcgtggtcagaagaggggcctcactggattgtttgtgcgccaacaactgagtgaggttttgaagaacggggccttagggcgctttttgaagacagggagcttaggcttatgttgtttaattttcgggaggctggtctaatcccaaaagcagagcttttgtaatccttagaagatttgtattgtcgtggctcgacgaatttaagtgaaacgctgccctcgccccccttcaccgagggacgactatgcgggtcttcgacttttgaatgtattcatgcattattaacgtttgacttttgtgtgttgttg

SEQ ID NO: 39504 - DNA, 326 bp, Zea Mays
acctacttccaaggaagcaccagtcatccatcaccttgtacatgtttttatgttgcagcactagtggtgtttaattgtcagctgcgatcatgtgagaacctgacctggtacattatgtatataagaagaataagaacctgttaacttatatggtatagtatgtaagttcatggcagaatgttcttgttggttggattcgtgcgcagttgagcagtgctggtgttgtaatgtgatggtcgcgactgcgttgttcgcatttgtgatggttttgcttttcattggtgaatggtgaatggtgaagacaaagctgaatctactaattaccg

SEQ ID NO: 39505 - DNA, 5336 bp, Zea Mays
gcactctctctcggactcgtttatatttctaaacgctaactcggcttgtagttgtgcttaagtttataaatttcagattcgccctattcaccccccctctaggcgactttcactaatacctttaatgtttttctattgaacaggatgagtggaagaggaggacctgaggctcagaagcatactaactttatttttgatgttggacagagacactatcgtgtgaaacctgagtctcaggagcatgcagaccgagtattagagaaaaatgcgaataaggtgtgcaaggatgcatttttcaatgctcgtctacaggttgcgaacgtgtacatgaagcgccgagggcattctatcaaaaactttcgacaatatttggatgtctacttgactgtggaccagtacatggagccgcagtcttttaaggttttgtgtgagatatgcgcttcgctagagtggattgagaagtcaaacaggaatcgacataggcagcgccatcagcaggacgaggacgatgatgaggtcgtagtcaaccatacctatggggcttatggacacattcggttggcgaagcgaatggaggctcaaactggagttgtcccaagcctaatcgatgtttataggcgagggcatagagcgaaaaatagtgaaatctccgatgagctatgtagtcaagaggccattgagcgtatggagacttatgagcaggagatggttaggaagtatggagaagactgattgacgaggagcgcctaccatcgacgctgaagttgtgcattctattggaggaaaggcccatggatggtataaacttgtgaattttttcaataatattgaaactatgaccgaatagctattttttctgtttttcaagatattctatgtttaccggtgtgatcgattcaacggagttgcggtctggtggcggctcttcgtcgcaggtgggttttggtagcagccgtagtcggcgctcgagcatcgaggatgttatgagggagcagcaaaaaaggtttcgtgaagagctgtgacaacaataaatgacattcctccaacaacaatctgagtacatgactgcttacaacgcacaggcgcaacaagcaatgaacgtgagtgtcttatttattctcaacacgatcgtatatttgtcctataactaatatattgtatttgcaacagtcttggtttccggagcagtcacaacaacaaccattcgatttccctcaatttcagccactgatgcctcagtggggattacatgctccgccacctccacctcatgtgcttcaatttagtttagacttgtcgtttgtattaacctttcaaatcttgactaaacttgattttgtagggatccggggttatgggccacaacacgccaccactggtgataccagcactaggaggagcttatggaggggagggagctactacaggagatgttagtttaacaaacaattcgtttgaatagtgatcatgtaaacacagtagttattaatgtcttcttctttctttagacaccaaaccagatgaacgacttcattaacgagttgttcaattctagaggtagtggtcacaactcaaacgatccctatatgtgatgacttgactcttctagtgaattatgagtttgtgttatattgtaatggactatgcgatgtatttgtgaaaaattatgaaccgtggactctagtggtattttggtgaactgtgatgtatttgcgaagaattgtgatattttgtgttaaatgtgtgtaattttggaattattgtttccgtcgtgttattgtgattatattgttgttgaaattgttgttcattcatttctttcatattttttctctgaaattgcttatttttggcggccaaaagtggggccaccgaaaataaccctgggaaaatctcggcggtcaccattttcggcggccggcacacaagctgttgaaaatagcttattttcggcggccgagctctggccacagaaaattagtgtttattttcagcttaattttttggcggccataagctaccgaaaatagatccaaagccaccgaaaatagcttattttcggcggctcttggccaccgaaaatgagctatgtttctataatgatacacaaaaacttcggtttaaagtggggtttcaaatacactaaaaattctatggtatatacaaaaccatagtatttaaaacaaagcttgttacaaaggtagtcaaacagctcttagaaaaaaatactatgatattctctaataccatggttttactttaaaactaaaaaaacaaaaaaaatttgcttccaaacacccctcaactacttgcttgctattctattttctataaaataccaagacacgtatcgtagtagcagcagctctagatgttgttggattgtgcctcttttgacgtacgcgtgtcgtgctaactgagctttgtgcttatcttaatctaattctgtaattcaaagggaagttaaggaaaggtgccggccgcgaggcgtgacagcagggatcatccgacccctttccggcgcccttgcagcctgttgcatgcgcaacttgtgcatggaccaccattagcctagccacactacgggaatctgtgcccattttatacactagcacgcagctgtctgtcattaaatatcactatcacgtctctttgatctcctttcacgcatcattatatggaccgtcgccactaaactaatccttcacctcgtgttgccctttgctctcatctcatgtacgctgtccggcagatagatgtggtcctatactcttgtacctacaatacactacactactactaggactaataataagatgagttctcaactcgagtctaaaggtgtaccagaatttaataaacaacctaagatactatatttagggtctgtttggttcgtggctaactgcgctacactttgtctaaggttaattattcaaatgaaaaattaaccttagatagaaaaattagctaaagtgtggcaaattagtcggggaactaaacatgcccttagtttttttaaggatggatgggtatgtcgtaactcatagacggaaaaacaagtgaactaggctaatctaaaatctatttcataaattaaattttactccttgcggtcttcaaatacacatctgttcacaaatatatgataccgttgatttttttgtcaaaaactttgatcagtcgtcttattcaaaatatttattcaaaaatgtaaaattttaagtcaagcacaaactaccttaaatgataaaacaaatcacaaaaaataataactcattattttttaaaaaacacgagtggttaaagttttttaaaaagtcaacgtgtcatatatctatgaatgaagggggtacttgatattttggacattatctcatatacaaggagcaattaaatatgattttttcttacctatattacccctaataaatacgtttaggttccatttaaaaacatgatattgttaacttagatggctgaaaaactggtattaaaaattgatgcccgggttgtgagattgagttttagatttgtcttttttttatgtttttttttgcagccatagtcctttttttgcgtttttcaggactgatcgatggcactcgtagtatttttttttgcatttttggcactcgttcgggactttttttgtttttttaccggttcagtgcatctctgagtaattagtctgcgtgggagaatatatggagttatggaccacctagatcaagggtagtctagtctaaaatgagctacaaatgctttaacatcaagtatttgcatccaaagtgaaaaccccttaaacatcaagtatttgaagactcgagggagcattgaataacccacttcacactttatacctaagagcattgtctattcaaaaatttcgcttcctaggttccaaacatactctagcatgctagttctaataatataaagacaataattgaattgctcaaatgtaaatgtgtaattctaaaaacagttagcaatacaacgatgttataagaatgttaaatgaaccgagacccattaaataatagagttttggtgattgataatcaatgtaaccatttagatcaacattatttgctagtgcctttggttatagttcaacacatgcaatatgggcttagactaaggaaaagtggtgattaggacgatcatcatcttatgaaaggcattataatactcattgaagatctacaacaacatccaaaagtttaagacataaggtggaaccaagttagacacgaagatcacaaaaaaattaaggcatggaaagggttgaagagcattagacggagaccacaccatctgtgtttatggtgtggttgtaaccatgtactagagggaatgaggtccatgtgattttgtcaagaaactagtagtggagactatagagagtatccgagagtgaccttaatcagaacaacacttggtcctctcacatggactttccttgctggaggctccaatgaggattaaggggaagcttgcatgcttcttaatactttagtaaaaataccaaagccatttattagagtttgaatctctatcagatttaagatttcttatttatactatgtttgcttggttgtgtactttaccttcctagccaagttatatactagtggataggtttggagcctaggttgcataactcctgatgagaaattagagattttctagattaaattctgaatatgaatcatgaataatattaaagaaactaacatacagttccctagcagactagtatgtgtactcataacatatccataagaacagaaaactcaagtacgagactagaagagagcgcatactgtttgaacaaactaaatgaaggtgctaaagcggcaaggatgacatcagcgactcacgtcgagaagaatacaggcagtcacgtgaagacacttcctgaaaaccttattcgccctcttctggtgtaggatctcgagggcgatgggttttggagactgctctccctattgaagttgcatatcattgcttgggatgaagaagaccatgatggcgacgctgcagcaagcagaggcaaaacctaactcatgttgggatatctttggtaaaaaatgttaggcacaatttatagagttgcctccacgtcttacgattcgataaggactcgtgtcatgatcagatctagacccaataaggactaaacttaaaagacaagtaataaaaaatagcaaaaggaagtcacgtccccacaaggagagggaccgaattttggcagacaattcacgtgcacgtcacgtgctcttcgccccggcccatgctcgagctcgacctagttaggcaagacaatcgag

SEQ ID NO: 39506 - DNA, 1335 bp, Zea Mays
gtacgtacgcacgacggaggatatgctaacgcatgaacataaacggatgggaggccatgatcttcatcggcctcaatgccgctatcagtgtccgagtctccaacgagcttggctccggccgtccgagggccgcgtggaacgccgtcatggtcgtcgtcggcgaggcgctggtgatcgggattctgtgcatggcactcatcctcatcttcagagacagcttctccatcattttcaccagcgacaccaccctgcagcgagccgtcgccaggatcgccggcctgctcggcctcaccatggtgctcaacagcgtgcagcccgtggtttcaggggtcgcggttgggggcggatggcagggcctcgtcgcctacatcaacctcggctgctactatatcttcggcctgcccctgggctacttgctcggatacaagttcagctttggagttggggtaattaaactctcgcagctgcatgctgtatgcagtcagaaaagctgccgcatgaacgaaacacgcataattagccaaagaaaaatccttgtagtgaattatattccctcacattttagttttatcgcaggggatttggtccggcatgctttgtggtatcacccttcagacgctcatcttgctaggtgtggtttggaggacagattggaaagcagaggccgcacaagcttcaggccgtgtgcaaaagtggggcggcaaaggcaccgatgaagtcaagcctctcctggaatagaattagtgtagtactatcacgcacgaagctcgtttcatttgaataaacaactgggcaatacgccttatccctttcagaagcacagctcatttgctttcccatcgaatctgatagcttccctttcccctcctccgtgtagttaaattgatgtctctgtatgaacactgtttgaggcgactagtatgaaccctgtttgcggcgactagacgtattgaacatactttttttttcttccagttgactcagcatgacttgaacagtctcaaattgtgtgtaaaggatttactcgctagcagttggtgtaatggtggcaggaatgatgttcttcaggatcagatgagacaagataggaccccttaattttaattttagagactctactatggaggaaaggatggagatacgagtacacttatttaggattaattgttcttttagtggttgacgtgtaagtgattgtgctaaattttcaatatatacacacacaattattattattattatagtacacggcaaagctgctatccgatgtaacagatatttgttgcttgtgtgaatgcgggaatccttgaaagcaacgagagaagcagaagccgc

SEQ ID NO: 39507 - DNA, 1189 bp, Zea Mays
ggaggatatgctaacgcatgaacataaacggatgggaggccatgatcttcatcggcctcaatgccgctatcaggtccgagtctccaacgagcttggctccggccgtccgagggccgcgtggaacgccgtcatggtcgtcgtcggcgaggcgctggtgatcgggattctgtgcatggcactcatcctcatcttcagagacagcttctccatcattttcaccagcgacaccaccctgcagcgagccgtcgccaggatcgccggcctgctcggcctcaccatggtgctcaacagcgtgcagcccgtggtttcaggggtcgcggttgggggcggatggcagggcctcgtcgcctacatcaacctcggctgctactatatcttcggcctgcccctgggctacttgctcggatacaagttcagctttggagttggggggatttggtccggcatgctttgtggtatcacccttcagacgctcatcttgctaggtgtggtttggaggacagattggaaagcagaggccgcacaagcttcaggccgtgtgcaaaagtggggcggcaaaggcaccgatgaagtcaagcctctcctggaatagaattagtgtagtactatcacgcacgaagctcgtttcatttgaataaacaactgggcaatacgccttatccctttcagaagcacagctcatttgctttcccatcgaatctgatagcttccctttcccctcctccgtgtagttaaattgatgtctctgtatgaacactgtttgaggcgactagtatgaaccctgtttgcggcgactagacgtattgaacatactttttttttcttccagttgactcagcatgacttgaacagtctcaaattgtgtgtaaaggatttactcgctagcagttggtgtaatggtggcaggaatgatgttcttcaggatcagatgagacaagataggaccccttaattttaattttagagactctactatggaggaaaggatggagatacgagtacacttatttaggattaattgttcttttagtggttgacgtgtaagtgattgtgctaaattttcaatatatacacacacaattattattattattatagtacacggcaaagctgctatccgatgtaacagatatttgttgcttgtgtgaatgcgggaatccttgaaagcaacgagagaagcagaagccgc

SEQ ID NO: 39508 - DNA, 1866 bp, Zea Mays
atgccaaaggaaacacgacgactactacaaacacaggcacatgagaaggtagactgcggcacaccatcgttgccaagccacgagacatcccactcgagaccgctccgattcttcactagcgagacttccaaaatcttgatccttcgtcccgtctccgccaaatgcctcaccaacgaagcaaaccagcccatgaaaaagggagtctccccatatcatcgttaccgagctacacccccagacgtagtagcttcgacttcacgaattatacgttgccagaggttcaaaactgactgcagatattccttagtattttatttctttcatattgttgccgtgtcaacccgtcaattttcagttttgaaccctacgagcagcggtgcgactaggagcaaacctctcaccatgtcgtgggctgcaatagagaatgatcctggtgtttttacagaactgttgcagcagatgcaactgaagggtcttcaagccaatatatgggctaatagtgctatacaaatggcgacctccagaaaaggatgagcgtcctgtcatcaaggatgcaattccaaaccttttctttgccaaccagataattaacaacgcgtgtgcaacccaagctatcctttcggttctgttgaactctcctggcatcaccctcagtgatgaacttaaaaagctgaaggaatttgcaaaggatttgccacccgagctcaaaggattggctatcgttaattgtgaaagcattcgcatgataaacaactcgttggcaaggtcagaggtctctgaggagcagaaacgacctagcaacggcgacgatgtttaccatttcataagctatgttccagtggatggtgtcctgtatgagcttgatgggctaaaggaaggaccaatatgcctggaaaaatgcccaggtggtgttggtgatgcagggtggcttaggctagcgcagcctgtcattaaagggcacattgatctgttctctcagaatgatgtaagatgcagtgtgatggcaatcttaaagaaccggaaggagatgtgcacggtggaactcaaagaactaaagaggaagagggagagcctcttgcaacagacgggctatccttctgcaattaggcacgtgccatctgttgagcagtcactagcggaggtgtcagctcagatagaggctgtgacggagaagatgataatggaggaagagaaggtgaagacgtggaagacggagaacttgagaaggaagcataattacgttcccttcctgttcaatttcctcaagattcttgaggagaagcagcaattgaatcccctgatagagaaggcaaaggcgaagcagaagtcgcactgccccagtcctaggtgaaagatgcaatgatgccatttcattcacatattagtaacgtaatgggtaatcaacaacattaaattatgtttgtttaagtaacgtaatgggtaatgcaatgattcgtagttgggtccttgttttcttgaccagtatttgaaccttatgtttatctctactagttttattaggtagtgcacaaatggctgccattacatgtttgaggtgaacgagtcttgacgagacgagtgcctcgtggactgtatgcagtcatactgatgtgtttgaacaccatccatgaaatggcttacacagtttctttgttcctggcaaactagtggtgtcgtttactgacacatgtcaagcctcgtttctttctgaaacgtagaggatgacgcaatcgcgaacatgcctagggtctgtttgtgtcctcagcgcctaggcaacatccctggccaccgatttcggatgcctaatggccaggatcgaatgccagctgcttgggaggccgtgatccaaacacgccttagagtttg

SEQ ID NO: 39509 - DNA, 2124 bp, Zea Mays
atgccaaaggaaacacgacgactactacaaacacaggcacatgagaaggtagactgcggcacaccatcgttgccaagccacgagacatcccactcgagaccgctccgattcttcactagcgagacttccaaaatcttgatccttcgtcccgtctccgccaaatgcctcaccaacgaagcaaaccagcccatgaaaaagggagtctccccatatcatcgttaccgagctacacccccagacgtagtagcttcgacttcacgaattatacgttgccagaggttcaaaactgactgcagatattccttagtattttatttctttcatattgttgccgtgtcaacccgtcaattttcagttttgaaccctacgagcagcggtgcggtgcggtgcgggtgctctcgcctgggggctgattggctgaacaacgtccaccccgcacggccgcaccacgcttcatcataaatacgagttcacccgacgtgcgttcttcctgtctctcccccctctccgcgaccactacggccgccgacgccgccctacaccaggtgccgaggccttcgttggctcttggccggcgacgagcacctgccagactaggagcaaacctctcaccatgtcgtgggctgcaatagagaatgatcctggtgtttttacagaactgttgcagcagatgcaactgaagggtcttcaagttgatgaaatctattcacttgacctggatgctctcaatgatcttcagccaatatatgggctaatagtgctatacaaatggcgacctccagaaaaggatgagcgtcctgtcatcaaggatgcaattccaaaccttttctttgccaaccagataattaacaacgcgtgtgcaacccaagctatcctttcggttctgttgaactctcctggcatcaccctcagtgatgaacttaaaaagctgaaggaatttgcaaaggatttgccacccgagctcaaaggattggctatcgttaattgtgaaagcattcgcatgataaacaactcgttggcaaggtcagaggtctctgaggagcagaaacgacctagcaacggcgacgatgtttaccatttcataagctatgttccagtggatggtgtcctgtatgagcttgatgggctaaaggaaggaccaatatgcctggaaaaatgcccaggtggtgttggtgatgcagggtggcttaggctagcgcagcctgtcattaaagggcacattgatctgttctctcagaatgatgtaagatgcagtgtgatggcaatcttaaagaaccggaaggagatgtgcacggtggaactcaaagaactaaagaggaagagggagagcctcttgcaacagacgggctatccttctgcaattaggcacgtgccatctgttgagcagtcactagcggaggtgtcagctcagatagaggctgtgacggagaagatgataatggaggaagagaaggtgaagacgtggaagacggagaacttgagaaggaagcataattacgttcccttcctgttcaatttcctcaagattcttgaggagaagcagcaattgaatcccctgatagagaaggcaaaggcgaagcagaagtcgcactgccccagtcctaggtgaaagatgcaatgatgccatttcattcacatattagtaacgtaatgggtaatcaacaacattaaattatgtttgtttaagtaacgtaatgggtaatgcaatgattcgtagttgggtccttgttttcttgaccagtatttgaaccttatgtttatctctactagttttattaggtagtgcacaaatggctgccattacatgtttgaggtgaacgagtcttgacgagacgagtgcctcgtggactgtatgcagtcatactgatgtgtttgaacaccatccatgaaatggcttacacagtttctttgttcctggcaaactagtggtgtcgtttactgacacatgtcaagcctcgtttctttctgaaacgtagaggatgacgcaatcgcgaacatgcctagggtctgtttgtgtcctcagcgcctaggcaacatccctggccaccgatttcggatgcctaatggccaggatcgaatgccagctgcttgggaggccgtgatccaaacacgccttagagtttg

SEQ ID NO: 39510 - DNA, 2565 bp, Zea Mays
atggtgttccggaaaggcccctggcctttcttatagcccaagccacttccttcttcctcctctcacctctctcgaaactttccccaatcccatctcctgccccccctctcccaaccctatccacgccgccgccagccctgctcgggtggtgcgcatacatgaaccatccgtcctcgtcgtcgtcctccgcccagccgccgccagccccggcggtggcggccgaggccacctccctcgcgccgggcttccgcttccaccccaccgatgaggagctcgtctcctactacctcaagcgcaaggtcctcggccgcccgctcaaggttgatgccatcgccgatgtggacctttacaagctcgagccctgggacctgcccgcccgctcccgcctccgctcccgcgactcccagtggtatttcttcagccgcctcgaccgcaagcacgccaaccgcgcccgcaccaaccgcgccacgtcgggagggtactggaagaccaccgggaaggacagggaggtgcgccatgggcccagacttgtcgggatgaagaagacgctcgtcttccacgcgggacgcgcccccaagggcgaacgcaccaactgggtcatgcacgaataccgcctcgagggcgatgacgccgcagggataccgcagaaagctggaccaggtcctcagaatggcgcacagtatggagcgcctttcgttgaggaggaatgggaggaggatgacacagatgatggtttgcttccagtggagggtgttgctgctgctgaccctgaggttccccttgcttctgtggagatccctggtgctttggatagaggctatcttcaaatgagtgatctcattcagggtttggatgatcaaaatggaaatggtacacctagtttgccagtttctgatacttcaaataatagcaaccattctgaagacgtagatggaaattctggggacattttaagtgacccaaaccttggctctaattttcttcagtatgctgaacctggggagcaaaatagcttaatgcttaatggaactatcatatcaaatgcaaatgctggagatttttttgataattccagccacagtgatgggtttctagagctgaaggattttggagatgctgcaaatctggatttccctttgggcaatggatcatccatctggcctttggattgttgggcatggaaaacacctgactcagcggaatctttaaatggaactaatgatgagattcctccacttcctgatgaccagactttccagccagatgagctggaacaactgttacagtcaatacaagaagattcccatttaggctcaagtatcattgaccccccacattcttctatgacaaattcagttctgcctgatgaggattgtttgatgttctatgatgcaccgttcgattccaccatgtgtgatgatgggtttgcacagaatgggatccttggctctgcagcaaccaatctatctggtattggcatggtggacgatggtatgccatactttgatgcaatggatggtaatttatttaatgacattctgggctccatacagcagccagatggtagcagttcccatgcttttaatggcccagtccttacccaagaggtcaacaataccatgtttacatatagtccaactcaaaaggttttagaacctaatattgtagttggcgcaccatcgtctgctaggttacctgaagctggtagtcagttaaattgtgttgttttaccagatggtcaggctaagagtagtactattggaaagggatttgtaaggattttggattcgatctctgctcccccagcttttgcaggagagttcccatctaaccaccgcaaatccttggctcgtatttctggagcgcgccccaacacactccatgtttctgctgaagtgatccatataggaagtttagctgttccttctggcgcagataagtgggcgctgcaaaaggatcaaggcatggagctgctcttctctgcagattttgaacctgatgcccgtatacattgtggctgcaacaccattaccgcggtgctgcgtggtggcttctgccttttcttcgtttcagcaataatgctcttagtgagctacgaggtgggcatgtgcatctatggcaagtagcaacctggtactggtctaagataaatctcacagcatttaggttaatcctatgttttgaggcagactcaactggggtctggggcctcctgctagcttttaagtgtgccgcattgcatggcatggacctgtggggtgtttagcactagcagtaccattttgcagctcgagagctaatggtgtatgtatgaattcagtgctatttagaaatactatgagaattgcctcattggcgtgtgatgatgccatttgccatgcttgtggtcgcagtggtcaatgttagtgcaaaatattgtatatatatttgagatccaccataggaatcatgatgcttgtgcagtacagttgtgttggtgttttgagtgtttgcaggtttcaaaatgaatgttaatcgtgttgcaagccatgaatgaaagttttgaagaaaacccaagttaaaaaa

SEQ ID NO: 39511 - DNA, 2665 bp, Zea Mays
atggtgttccggaaaggcccctggcctttcttatagcccaagccacttccttcttcctcctctcacctctctcgaaactttccccaatcccatctcctgccccccctctcccaaccctatccacgccgccgccagccctgctcgggtggtgcgcatacatgaaccatccgtcctcgtcgtcgtcctccgcccagccgccgccagccccggcggtggcggccgaggccacctccctcgcgccgggcttccgcttccaccccaccgatgaggagctcgtctcctactacctcaagcgcaaggtcctcggccgcccgctcaaggttgatgccatcgccgatgtggacctttacaagctcgagccctgggacctgcccgcccgctcccgcctccgctcccgcgactcccagtggtatttcttcagccgcctcgaccgcaagcacgccaaccgcgcccgcaccaaccgcgccacgtcgggagggtactggaagaccaccgggaaggacagggaggtgcgccatgggcccagacttgtcgggatgaagaagacgctcgtcttccacgcgggacgcgcccccaagggcgaacgcaccaactgggtcatgcacgaataccgcctcgagggcgatgacgccgcagggataccgcaggactcatttgtggtgtgccggatcttccagaaagctggaccaggtcctcagaatggcgcacagtatggagcgcctttcgttgaggaggaatgggaggaggatgacacagatgatggtttgcttccagtggagggtgttgctgctgctgaccctgaggttccccttgcttctgtggagatccctggtgctttggatagaggctatcttcaaatgagtgatctcattcaggtagcaagttctatgagatcacaactacaagaatcatgatatcatagtattcaggtctgaacattaaaagggtttggatgatcaaaatggaaatggtacacctagtttgccagtttctgatacttcaaataatagcaaccattctgaagacgtagatggaaattctggggacattttaagtgacccaaaccttggctctaattttcttcagtatgctgaacctggggagcaaaatagcttaatgcttaatggaactatcatatcaaatgcaaatgctggagatttttttgataattccagccacagtgatgggtttctagagctgaaggattttggagatgctgcaaatctggatttccctttgggcaatggatcatccatctggcctttggattgttgggcatggaaaacacctgactcagcggaatctttaaatggaactaatgatgagattcctccacttcctgatgaccagactttccagccagatgagctggaacaactgttacagtcaatacaagaagattcccatttaggctcaagtatcattgaccccccacattcttctatgacaaattcagttctgcctgatgaggattgtttgatgttctatgatgcaccgttcgattccaccatgtgtgatgatgggtttgcacagaatgggatccttggctctgcagcaaccaatctatctggtattggcatggtggacgatggtatgccatactttgatgcaatggatggtaatttatttaatgacattctgggctccatacagcagccagatggtagcagttcccatgcttttaatggcccagtccttacccaagaggtcaacaataccatgtttacatatagtccaactcaaaaggttttagaacctaatattgtagttggcgcaccatcgtctgctaggttacctgaagctggtagtcagttaaattgtgttgttttaccagatggtcaggctaagagtagtactattggaaagggatttgtaaggattttggattcgatctctgctcccccagcttttgcaggagagttcccatctaaccaccgcaaatccttggctcgtatttctggagcgcgccccaacacactccatgtttctgctgaagtgatccatataggaagtttagctgttccttctggcgcagataagtgggcgctgcaaaaggatcaaggcatggagctgctcttctctgcagattttgaacctgatgcccgtatacattgtggctgcaacaccattaccgcggtgctgcgtggtggcttctgccttttcttcgtttcagcaataatgctcttagtgagctacgaggtgggcatgtgcatctatggcaagtagcaacctggtactggtctaagataaatctcacagcatttaggttaatcctatgttttgaggcagactcaactggggtctggggcctcctgctagcttttaagtgtgccgcattgcatggcatggacctgtggggtgtttagcactagcagtaccattttgcagctcgagagctaatggtgtatgtatgaattcagtgctatttagaaatactatgagaattgcctcattggcgtgtgatgatgccatttgccatgcttgtggtcgcagtggtcaatgttagtgcaaaatattgtatatatatttgagatccaccataggaatcatgatgcttgtgcagtacagttgtgttggtgttttgagtgtttgcaggtttcaaaatgaatgttaatcgtgttgcaagccatgaatgaaagttttgaagaaaacccaagttaaaaaa

SEQ ID NO: 39512 - DNA, 2512 bp, Zea Mays
atggtgttccggaaaggcccctggcctttcttatagcccaagccacttccttcttcctcctctcacctctctcgaaactttccccaatcccatctcctgccccccctctcccaaccctatccacgccgccgccagccctgctcgggtggtgcgcatacatgaaccatccgtcctcgtcgtcgtcctccgcccagccgccgccagccccggcggtggcggccgaggccacctccctcgcgccgggcttccgcttccaccccaccgatgaggagctcgtctcctactacctcaagcgcaaggtcctcggccgcccgctcaaggttgatgccatcgccgatgtggacctttacaagctcgagccctgggacctgcccgcccgctcccgcctccgctcccgcgactcccagtggtatttcttcagccgcctcgaccgcaagcacgccaaccgcgcccgcaccaaccgcgccacgtcgggagggtactggaagaccaccgggaaggacagggaggtgcgccatgggcccagacttgtcgggatgaagaagacgctcgtcttccacgcgggacgcgcccccaagggcgaacgcaccaactgggtcatgcacgaataccgcctcgagggcgatgacgccgcagggataccgcaggactcatttgtggtgtgccggatcttccagaaagctggaccaggtcctcagaatggcgcacagtatggagcgcctttcgttgaggaggaatgggaggaggatgacacagatgatggtttgcttccagtggagggtgttgctgctgctgaccctgaggttccccttgcttctgtggagatccctggtgctttggatagaggctatcttcaaatgagtgatctcattcagggtttggatgatcaaaatggaaatggtacacctagtttgccagtttctgatacttcaaataatagcaaccattctgaagacgtagatggaaattctggggacattttaagtgacccaaaccttggctctaattttcttcagtatgctgaacctggggagcaaaatagcttaatgcttaatggaactatcatatcaaatgcaaatgctggagatttttttgataattccagccacagtgatgggtttctagagctgaaggattttggagatgctgcaaatctggatttccctttgggcaatggatcatccatctggcctttggattgttgggcatggaaaacacctgactcagcggaatctttaaatggaactaatgatgagattcctccacttcctgatgaccagactttccagccagatgagctggaacaactgttacagtcaatacaagaagattcccatttaggctcaagtatcattgaccccccacattcttctatgacaaattcagttctgcctgatgaggattgtttgatgttctatgatgcaccgttcgattccaccatgtgtgatgatgggtttgcacagaatgggatccttggctctgcagcaaccaatctatctgcagccagatggtagcagttcccatgcttttaatggcccagtccttacccaagaggtcaacaataccatgtttacatatagtccaactcaaaaggttttagaacctaatattgtagttggcgcaccatcgtctgctaggttacctgaagctggtagtcagttaaattgtgttgttttaccagatggtcaggctaagagtagtactattggaaagggatttgtaaggattttggattcgatctctgctcccccagcttttgcaggagagttcccatctaaccaccgcaaatccttggctcgtatttctggagcgcgccccaacacactccatgtttctgctgaagtgatccatataggaagtttagctgttccttctggcgcagataagtgggcgctgcaaaaggatcaaggcatggagctgctcttctctgcagattttgaacctgatgcccgtatacattgtggctgcaacaccattaccgcggtgctgcgtggtggcttctgccttttcttcgtttcagcaataatgctcttagtgagctacgaggtgggcatgtgcatctatggcaagtagcaacctggtactggtctaagataaatctcacagcatttaggttaatcctatgttttgaggcagactcaactggggtctggggcctcctgctagcttttaagtgtgccgcattgcatggcatggacctgtggggtgtttagcactagcagtaccattttgcagctcgagagctaatggtgtatgtatgaattcagtgctatttagaaatactatgagaattgcctcattggcgtgtgatgatgccatttgccatgcttgtggtcgcagtggtcaatgttagtgcaaaatattgtatatatatttgagatccaccataggaatcatgatgcttgtgcagtacagttgtgttggtgttttgagtgtttgcaggtttcaaaatgaatgttaatcgtgttgcaagccatgaatgaaagttttgaagaaaacccaagttaaaaaa

SEQ ID NO: 39513 - DNA, 1718 bp, Zea Mays
caacctcaagataataaaagaagtgaggtagcaagttctatgagatcacaactacaagaatcatgatatcatagtattcagggtttggatgatcaaaatggaaatggtacacctagtttgccagtttctgatacttcaaataatagcaaccattctgaagacgtagatggaaattctggggacattttaagtgacccaaaccttggctctaattttcttcagtatgctgaacctggggagcaaaatagcttaatgcttaatggaactatcatatcaaatgcaaatgctggagatttttttgataattccagccacagtgatgggtttctagagctgaaggattttggagatgctgcaaatctggatttccctttgggcaatggatcatccatctggcctttggattgttgggcatggaaaacacctgactcagcggaatctttaaatggaactaatgatgagattcctccacttcctgatgaccagactttccagccagatgagctggaacaactgttacagtcaatacaagaagattcccatttaggctcaagtatcattgaccccccacattcttctatgacaaattcagttctgcctgatgaggattgtttgatgttctatgatgcaccgttcgattccaccatgtgtgatgatgggtttgcacagaatgggatccttggctctgcagcaaccaatctatctgcagccagatggtagcagttcccatgcttttaatggcccagtccttacccaagaggtcaacaataccatgtttacatatagtccaactcaaaaggttttagaacctaatattgtagttggcgcaccatcgtctgctaggttacctgaagctggtagtcagttaaattgtgttgttttaccagatggtcaggctaagagtagtactattggaaagggatttgtaaggattttggattcgatctctgctcccccagcttttgcaggagagttcccatctaaccaccgcaaatccttggctcgtatttctggagcgcgccccaacacactccatgtttctgctgaagtgatccatataggaagtttagctgttccttctggcgcagataagtgggcgctgcaaaaggatcaaggcatggagctgctcttctctgcagattttgaacctgatgcccgtatacattgtggctgcaacaccattaccgcggtgctgcgtggtggcttctgccttttcttcgtttcagcaataatgctcttagtgagctacgaggtgggcatgtgcatctatggcaagtagcaacctggtactggtctaagataaatctcacagcatttaggttaatcctatgttttgaggcagactcaactggggtctggggcctcctgctagcttttaagtgtgccgcattgcatggcatggacctgtggggtgtttagcactagcagtaccattttgcagctcgagagctaatggtgtatgtatgaattcagtgctatttagaaatactatgagaattgcctcattggcgtgtgatgatgccatttgccatgcttgtggtcgcagtggtcaatgttagtgcaaaatattgtatatatatttgagatccaccataggaatcatgatgcttgtgcagtacagttgtgttggtgttttgagtgtttgcaggtttcaaaatgaatgttaatcgtgttgcaagccatgaatgaaagttttgaagaaaacccaagttaaaaaa

SEQ ID NO: 39514 - DNA, 1640 bp, Zea Mays
gttctatgagatcacaactacaagaatcatgatatcatagtattcagggtttggatgatcaaaatggaaatggtacacctagtttgccagtttctgatacttcaaataatagcaaccattctgaagacgtagatggaaattctggggacattttaagtgacccaaaccttggctctaattttcttcagtatgctgaacctggggagcaaaatagcttaatgcttaatggaactatcatatcaaatgcaaatgctggagatttttttgataattccagccacagtgatgggtttctagagctgaaggattttggagatgctgcaaatctggatttccctttgggcaatggatcatccatctggcctttggattgttgggcatggaaaacacctgactcagcggaatctttaaatggaactaatgatgagattcctccacttcctgatgaccagactttccagccagatgagctggaacaactgttacagtcaatacaagaagattcccatttaggctcaagtatcattgaccccccacattcttctatgacaaattcagttctgcctgatgaggattgtttgatgttctatgatgcaccgttcgattccaccatgtgtgatgatgggtttgcacagaatgggatccttggctctgcagcaaccaatctatctggtattggcatggtggacgatggtatgccatactttgatgcaatggatggtaatttatttaatgacattctgggctccatacagcagccagatggtagcagttcccatgcttttaatggcccagtccttacccaagagatggtcaggctaagagtagtactattggaaagggatttgtaaggattttggattcgatctctgctcccccagcttttgcaggagagttcccatctaaccaccgcaaatccttggctcgtatttctggagcgcgccccaacacactccatgtttctgctgaagtgatccatataggaagtttagctgttccttctggcgcagataagtgggcgctgcaaaaggatcaaggcatggagctgctcttctctgcagattttgaacctgatgcccgtatacattgtggctgcaacaccattaccgcggtgctgcgtggtggcttctgccttttcttcgtttcagcaataatgctcttagtgagctacgaggtgggcatgtgcatctatggcaagtagcaacctggtactggtctaagataaatctcacagcatttaggttaatcctatgttttgaggcagactcaactggggtctggggcctcctgctagcttttaagtgtgccgcattgcatggcatggacctgtggggtgtttagcactagcagtaccattttgcagctcgagagctaatggtgtatgtatgaattcagtgctatttagaaatactatgagaattgcctcattggcgtgtgatgatgccatttgccatgcttgtggtcgcagtggtcaatgttagtgcaaaatattgtatatatatttgagatccaccataggaatcatgatgcttgtgcagtacagttgtgttggtgttttgagtgtttgcaggtttcaaaatgaatgttaatcgtgttgcaagccatgaatgaaagttttgaagaaaacccaagttaaaaaa

SEQ ID NO: 39515 - DNA, 2379 bp, Zea Mays
agggaacgttgaagagtcccgtcccgtcgtgcaccaacatgccgccgcagctgctcgccagctccattattgcctctactccgccatctccttcctaatcgctcgcctcgtttcatcacctgagctctcctaatctcattcaccgttgcttgctctttgaattgcctttgcccccatttgctttcctgtttcttccatcccatccgtaccagctgacggtgcccgggttccatgcccagcggccagcgccttgtgacctgatccgcggctcgtccattcctccctccgtgaatggctcctccagcagggtctggggcagcgacggagggagggccggcacggcggcgcggcaccggcaccggtaccagccccggccgcaccaaagtgtgggtcgagccgccgggcaagagccaccaccagaccccggcgcggtcgctgcccccgccctcgcccccggccccgtcggtggcggccaagagggtgtccgtggtgtactacctttgccgcaaccgccatctggagcacccgcacttaatcgaggtgccgctcgccgccccggaggaaggtctctacctgcgagatgtgattaaccgcctcaacgtgctgcgcgggaagggcatgtcctccaagtattcctggtcttgcaagaggagctacaagaacggcttcgtgtggcacgatctgtccgacgacgacctggtgctccccgcgcagggcaacgagtacatcctcaagggctccgagcttcttgaccgctcgccgccgctagatcggcagcagaatggcgttagcaacccaaaggtggagggcctcaagccatgcaaggaagagtcccctcagtcgcggggctcgcaagaaggatgctcgtcgtcatcgtcttcgtctgcccttggcaaggagatctcacctccacctgccactcgacggccacagcagcaggcgcaatcagcagtgctgccatcgtcgtcggcttccaccaaccatgaagatgacctgtgcccgaccgcgcattcaggctcgtccggcaaccagtcccctgaacctgcaggaagaaatgctccattgtcagaggctagctccccgggaccttccgaatacagggtctgcagacccatcggagctcaggatgccgcgacacaaacagatgacagtgagagggatgttgctaaaacccatacttgcgtggtcggagtgtccatggatacgacgttagatgctgagattcaggaatgtcatcaaaggagctcactgctgtcaccaaaggtacccaagattgttcaggaatcaccggccctgtgttcctctgatgcttcaccgggtgtcagagttgagaccttggagtccctaataagagcagaagcctgtaggagaagtagctttagaacactagaggaggaacacatgcttggcccaattggtgtgaaactgaagccagccaatttgctaatgcagcttatcacttgtggatctatatctgttaaagaacaccgaggctttgggttcatcccaacgtacaggcctcggtttacacaagttgagttcccttcgtcagtgttctccactcctgtggcattgcgacaccttgacaaaatcccctgcaatacaagaacaatcgggacgagagctccagagtctgaacgtttcagtgggagcttggttgagaccaagatgcaggacgagtcaaggagaggaatcagctcactcaaacgctcatcatcttatgacgaggataggtttatagagcagcacattccaaaagtgatacagaaaactcttgtgagtcaggtagtttcaggtgtcttccgcagactatcagaatcatatcatgtaagcaatcgagaaatggaacaatactctcccctttctctgatgtgagaaacagctctagtcaacaagaatatagtactagatcctcaccactgggttcatcaaagagtgcaagcaataggatgactgatccatcactgggtaaagtagattcattccacaaggaaaaggacatgatcaagatcgaagaaagcttccttctggagctcgggttataatccaatctgcacctttgtgtgaagatagtgatggcagcaatgaatcactgtagcatggttacttgaacgcccttccttccttgagagagggatcgaatggcccaggttctgtgagggagggtgtatgcagctatgggcagtggatctgatccgataatgctgcgccatggagagcgacgtgccctcagggcaacgccagatgcacatgtatttgtggaactgtgaagcaggaatacaagctgtgtttggctctgaattatttgatcctcagtggcatgtttctgaagtctgaacgtgaaacgatagtatctggctctgaattttcttgtctttc

SEQ ID NO: 39516 - DNA, 2380 bp, Zea Mays
agggaacgttgaagagtcccgtcccgtcgtgcaccaacatgccgccgcagctgctcgccagctccattattgcctctactccgccatctccttcctaatcgctcgcctcgtttcatcacctgagctctcctaatctcattcaccgttgcttgctctttgaattgcctttgcccccatttgctttcctgtttcttccatcccatccgtaccagctgacggtgcccgggttccatgcccagcggccagcgccttgtgacctgatccgcggctcgtccattcctccctccgtgaatggctcctccagcagggtctggggcagcgacggagggagggccggcacggcggcgcggcaccggcaccggtaccagccccggccgcaccaaagtgtgggtcgagccgccgggcaagagccaccaccagaccccggcgcggtcgctgcccccgccctcgcccccggccccgtcggtggcggccaagagggtgtccgtggtgtactacctttgccgcaaccgccatctggagcacccgcacttaatcgaggtgccgctcgccgccccggaggaaggtctctacctgcgagatgtgattaaccgcctcaacgtgctgcgcgggaagggcatgtcctccaagtattcctggtcttgcaagaggagctacaagaacggcttcgtgtggcacgatctgtccgacgacgacctggtgctccccgcgcagggcaacgagtacatcctcaagggctccgagcttcttgaccgctcgccgccgctagatcggcagcagaatggcgttagcaacccaaaggtggagggcctcaagccatgcaaggaagagtcccctcagtcgcggggctcgcaagaaggatgctcgtcgtcatcgtcttcgtctgcccttggcaaggagatctcacctccacctgccactcgacggccacagcagcaggcgcaatcagcagtgctgccatcgtcgtcggcttccaccaaccatgaagatgacctgtgcccgaccgcgcattcaggctcgtccggcaaccagtcccctgaacctgcaggaagaaatgctccattgtcagaggctagctccccgggaccttccgaatacagggtctgcagacccatcggagctcaggatgccgcgacacaaacagatgacagtgagagggatgttgctaaaacccatacttgcgtggtcggagtgtccatggatacgacgttagatgctgagattcaggaatgtcatcaaaggagctcactgctgtcaccaaaggtacccaagattgttcaggaatcaccggccctgtgttcctctgatgcttcaccgggtgtcagagttgagaccttggagtccctaataagagcagaagcctgtaggagaagtagctttagaacactagaggaggaacacatgcttggcccaattggtgtgaaactgaagccagccaatttgctaatgcagcttatcacttgtggatctatatctgttaaagaacaccgaggctttgggttcatcccaacgtacaggcctcggtttacacaagttgagttcccttcgtcagtgttctccactcctgtggcattgcgacaccttgacaaaatcccctgcaatacaagaacaatcgggacgagagctccagagtctgaacgtttcagtgggagcttggttgagaccaagatgcaggacgagtcaaggagaggaatcagctcactcaaacgctcatcatcttatgacgaggatagagtttatagagcagcacattccaaaagtgatacagaaaactcttgtgagtcaggtagtttcaggtgtcttccgcagactatcagaatcatatcatgtaagcaatcgagaaatggaacaatactctcccctttctctgatgtgagaaacagctctagtcaacaagaatatagtactagatcctcaccactgggttcatcaaagagtgcaagcaataggatgactgatccatcactgggtaaagtagattcattccacaaggaaaaggacatgatcaagatcgaagaaagcttccttctggagctcgggttataatccaatctgcacctttgtgtgaagatagtgatggcagcaatgaatcactgtagcatggttacttgaacgcccttccttccttgagagagggatcgaatggcccaggttctgtgagggagggtgtatgcagctatgggcagtggatctgatccgataatgctgcgccatggagagcgacgtgccctcagggcaacgccagatgcacatgtatttgtggaactgtgaagcaggaatacaagctgtgtttggctctgaattatttgatcctcagtggcatgtttctgaagtctgaacgtgaaacgatagtatctggctctgaattttcttgtctttc

SEQ ID NO: 39517 - DNA, 1886 bp, Zea Mays
gccatccctctctcaataaagatgtgattaaccgcctcaacgtgctgcgcgggaagggcatgtcctccaagtattcctggtcttgcaagaggagctacaagaacggcttcgtgtggcacgatctgtccgacgacgacctggtgctccccgcgcagggcaacgagtacatcctcaagggctccgagcttcttgaccgctcgccgccgctagatcggcagcagaatggcgttagcaacccaaaggtggagggcctcaagccatgcaaggaagagtcccctcagtcgcggggctcgcaagaaggatgctcgtcgtcatcgtcttcgtctgcccttggcaaggagatctcacctccacctgccactcgacggccacagcagcaggcgcaatcagcagtgctgccatcgtcgtcggcttccaccaaccatgaagatgacctgtgcccgaccgcgcattcaggctcgtccggcaaccagtcccctgaacctgcaggaagaaatgctccattgtcagaggctagctccccgggaccttccgaatacagggtctgcagacccatcggagctcaggatgccgcgacacaaacagatgacagtgagagggatgttgctaaaacccatacttgcgtggtcggagtgtccatggatacgacgttagatgctgagattcaggaatgtcatcaaaggagctcactgctgtcaccaaaggtacccaagattgttcaggaatcaccggccctgtgttcctctgatgcttcaccgggtgtcagagttgagaccttggagtccctaataagagcagaagcctgtaggagaagtagctttagaacactagaggaggaacacatgcttggcccaattggtgtgaaactgaagccagccaatttgctaatgcagcttatcacttgtggatctatatctgttaaagaacaccgaggctttgggttcatcccaacgtacaggcctcggtttacacaagttgagttcccttcgtcagtgttctccactcctgtggcattgcgacaccttgacaaaatcccctgcaatacaagaacaatcgggacgagagctccagagtctgaacgtttcagtgggagcttggttgagaccaagatgcaggacgagtcaaggagaggaatcagctcactcaaacgctcatcatcttatgacgaggatagagtttatagagcagcacattccaaaagtgatacagaaaactcttgtgagtcaggtagtttcaggtgtcttccgcagactatcagaatcatatcatgtaagcaatcgagaaatggaacaatactctcccctttctctgatgtgagaaacagctctagtcaacaagaatatagtactagatcctcaccactgggttcatcaaagagtgcaagcaataggatgactgatccatcactgggtaaagtagattcattccacaaggaaaaggacatgatcaagatcgaagaaagcttccttctggagctcgggttataatccaatctgcacctttgtgtgaagatagtgatggcagcaatgaatcactcttttggagtaggttcaaaggtattgattttgtaaactgtgaatgtgatagtcaacattttctcacaccttgaagaagagaatactttatcttgctttaaaaggtctgcttttgtatcttaatgcagtcagtttactggctttatttcttcatcaagtaaacaagcatgggttgtttatcaggcaacgactgctatgcaagcagtgcttctgtgcaagcgtggaagcaaaccatctgatccattatattacgatctaaccacagatacaaccatggtttgttagggggttttttttataaagattattgagctggtggtggaaaggtttaagtgttgaatgtgacttacg

SEQ ID NO: 39518 - DNA, 1245 bp, Zea Mays
atgagctgcttccagcccggaaccgaggctaactccgccagccgactcggaccggtggtggtgtcgtggaagctgcgcagccacgggcgggcctgttcgctgttcgcagccgtgcctcgatcgccgcccgtgccagaggtctctctccaatggcggtgacgagcgccgcagcccgccgcttcctcgcgctcgcgcccgcccggggaccccgcgccttctggtcggcctcgtgtccacccgaccccgacgcaccttccgcctcgtcgacgtctaccgacaacaacagcaggaggaagaagaaggagccgtccgggtccgcccaccaccgcctcgccgccgtcatggacgccgtcaacgagcgcaagctcccacccgagctcagtgggcgcggcaacgcagtaaggaaatatggaggacgatctgaaggctggtggagaagatcatctagtcgggacgacagcctaggtggagccgtggtgaagaaccaatatgttggacatgtgagaggtctgaaactgacattgtaaatgtcgttgaacaaagaatatggcattcaatggaggaagggcactttgaaaatctaccagggaagggcaaacccttaaacctcacttcaaatcctcatgccgatcctgccgaagacaccctttacaggatactttcaaagaatggttgtgcacctgaatgggttgaactgaataaggaaattcgtggcatgatcttgagctggaggtcggcattaaggaaagcatgggcaaaccgctctgaagatgatgattctaactggagtgatgacagcagggctctccaggagcgaattcgccagataaatgataaggttttccggtacaacctgatagtaccctttgggcgtcagttgtttggtctgaactgggacaaggagctggacaagttgaaggaagaataaaggacaaagaggtggacacattggtgaacatagcatggaggacttttgttgtatcaaaatgacctgtaactaggaatacctgataggacatacacatacttaagaaaaaccatgaaagctgagtataggtatttacacgtaggcttttattagtttatatatttttggagaaccaagttttccggtgtttccggtgctgtagccgattttgtgataaaactctgtcacatgggtaaaacctgagataatttcttagcggtaaaactcgatctatgccacatgggctaagctccattaggtcttcttttcaatcttgt

SEQ ID NO: 39519 - DNA, 782 bp, Zea Mays
gtcattgttgctccatccatggccgccgacacaaggcgaccttggtctgaaactgacattgtaaatgtcgttgaacaaagaatatggcattcaatggaggaagggcactttgaaaatctaccagggaagggcaaacccttaaacctcacttcaaatcctcatgccgatcctgccgaagacaccctttacaggatactttcaaagaatggttgtgcacctgaatgggttgaactgaataaggaaattcgtggcatgatcttgagctggaggtcggcattaaggaaagcatgggcaaaccgctctgaagatgatgattctaactggagtgatgacagcagggctctccaggagcgaattcgccagataaatgataaggttttccggtacaacctgatagtaccctttgggcgtcagttgtttggtctgaactgggacaaggagctggacaagttgaaggaagaataaaggacaaagaggtggacacattggtgaacatagcatggaggacttttgttgtatcaaaatgacctgtaactaggaatacctgataggacatacacatacttaagaaaaaccatgaaagctgagtataggtatttacacgtaggcttttattagtttatatatttttggagaaccaagttttccggtgtttccggtgctgtagccgattttgtgataaaactctgtcacatgggtaaaacctgagataatttcttagcggtaaaactcgatctatgccacatgggctaagctccattaggtcttcttttcaatcttgt

SEQ ID NO: 39520 - DNA, 763 bp, Zea Mays
gtgggaagcagaagagtcgcccaaggtctgaaactgacattgtaaatgtcgttgaacaaagaatatggcattcaatggaggaagggcactttgaaaatctaccagggaagggcaaacccttaaacctcacttcaaatcctcatgccgatcctgccgaagacaccctttacaggatactttcaaagaatggttgtgcacctgaatgggttgaactgaataaggaaattcgtggcatgatcttgagctggaggtcggcattaaggaaagcatgggcaaaccgctctgaagatgatgattctaactggagtgatgacagcagggctctccaggagcgaattcgccagataaatgataaggttttccggtacaacctgatagtaccctttgggcgtcagttgtttggtctgaactgggacaaggagctggacaagttgaaggaagaataaaggacaaagaggtggacacattggtgaacatagcatggaggacttttgttgtatcaaaatgacctgtaactaggaatacctgataggacatacacatacttaagaaaaaccatgaaagctgagtataggtatttacacgtaggcttttattagtttatatatttttggagaaccaagttttccggtgtttccggtgctgtagccgattttgtgataaaactctgtcacatgggtaaaacctgagataatttcttagcggtaaaactcgatctatgccacatgggctaagctccattaggtcttcttttcaatcttgt

SEQ ID NO: 39521 - DNA, 2340 bp, Zea Mays
cccccggacccccgtttccttccgatccccatccgccatcccccgttcccgttcttctccttccgtccgaccgtccctcgacactgccgaggccgaacctagcagccgcccacccgacgcccaatccgccggtgcaatcgcaatctccgagggttaatcgactaccggcggctacggcgccgccagtctcctggcttaggctgccaggggatgcgaggagccagcgcagcgcggccgccggccagccgcccccgccccactgcctataccgccagctacagtcggaaacggctgcaaggcagtcggaagagggaagccgcagccgggcactgactccgatccccactctagccaaccccacgcggaccggtccacctcggacgaccacgacgccatctcgcacgcgtgcttccacccaaccacacaaatcttctctcccaggcctaaccttcctccccgcgagctgcctctactgattttgcactggcatgccgtgacgcggaaagatgtggagatccatcttggactgatttcttccttactcggtgaggaactccaaaccatccagctaggttattcgccctctgccggcgcaagatccattttagtttgcccccctcccccaaattggactacccaaggtgcggggacatccgcctatgtttgaacagttctgttggagcatgctctgttttaaattgactgaacctccatgccctatgctgaatttgcttctcagagagctattttttcattaatgttttttatgtttgctgcaaaagctttaatttttcttgtcaaactagattgtgttgtttagggagcttgcacaacgattaattggaaggaacatacgaaagaaaagaaccggaaggattaatcatgctgtatatatataagctatccttgacgctgcttgttgtttgctggttattgcaggttgaagataccttggtagtcagagcatagaataagggtggactgttattaattttccataggatggaatccttgtggaagctgacctacttgctcgagccggcatcacttgctctcattgccacagctatctctgtggcctatgcatccgcatcgcgtgctctagattatggcaaagagatggagagaaacttggatttttcagaggcttccattacattggatcggtcacaggcactaatgattccccttgcaagctcatgcagtctgttgctgatgttctacttgttctcgtctgtctcacatcttgtgactgcttttactgctgtggcctctgcgatggcactgttcttttgcctgtctccgtatgtcacttatctcaagatgcagttcaatctaatggacccattcgtgtccaggtgttgttcaaagtcttttacacggttgcaaggtttgctgatgctcttctgcatagccacagtcttagcctggttggtttctgggcattggttgctaaataacctactgggaatttccatatgtatagcgtttgtcagccatgtgaggcttcccaacataaaaatctgtgcgctgcttcttgcctgcttgtttgtgtatgatattttctgggtgttcttctcagaaaggttctttggagcaaatgtcatggtttctgttgccacccagaaggcatctaatcctgttcacacagtagcaaataagctcagcctgcccggattgcaattgattacaaagaagctggagcttccagtcaagcttgtatttccaaggaatttgttgggtgggattgttccaggaagcaatcctggtgactacatgatgcttggccttggagacatggccattccagggatgcttctagctctggtactcttttttgataatcggaagttcaaggatgtgaattttccaccagatgtgtctcccccaaaacggcggaattatgtgtggtatgctgtaacaggttatggtattggcttggtagctgcactagctgctgggatcttgtctcagtctcctcaaccagccttactgtacctggtgccatcgacactgggacctgtcatgtacttgtcatggttacggaatgagctatgggagctatgggaagggtctgggacgattctgaacgagaaagctcatttgttggaggtctgagatccaagtggacaataagaaggatctgaacccaccgtgattgaatctaattaaacaatacttgacctcctcataccgaaggagagtatttataagctagaatgttcagtcatgtaagccatcacctagtttcgctcgcaagaggaaacacttacaaatcatgtaactgtttgtaatagaaaagttcaatgcatttcagctttttaaccatgggttcagttg

SEQ ID NO: 39522 - DNA, 2313 bp, Zea Mays
cccccggacccccgtttccttccgatccccatccgccatcccccgttcccgttcttctccttccgtccgaccgtccctcgacactgccgaggccgaacctagcagccgcccacccgacgcccaatccgccggtgcaatcgcaatctccgagggttaatcgactaccggcggctacggcgccgccagtctcctggcttaggctgccaggggatgcgaggagccagcgcagcgcggccgccggccagccgcccccgccccactgcctataccgccagctacagtcggaaacggctgcaaggcagtcggaagagggaagccgcagccgggcactgactccgatccccactctagccaaccccacgcggaccggtccacctcggacgaccacgacgccatctcgcacgcgtgcttccacccaaccacacaaatcttctctcccaggcctaaccttcctccccgcgagctgcctctactgattttgcactggcatgccgtgacgcggaaagatgtggagatccatcttggactgatttcttccttactcggttattcgccctctgccggcgcaagatccattttagtttgcccccctcccccaaattggactacccaaggtgcggggacatccgcctatgtttgaacagttctgttggagcatgctctgttttaaattgactgaacctccatgccctatgctgaatttgcttctcagagagctattttttcattaatgttttttatgtttgctgcaaaagctttaatttttcttgtcaaactagattgtgttgtttagggagcttgcacaacgattaattggaaggaacatacgaaagaaaagaaccggaaggattaatcatgctgtatatatataagctatccttgacgctgcttgttgtttgctggttattgcaggttgaagataccttggtagtcagagcatagaataagggtggactgttattaattttccataggatggaatccttgtggaagctgacctacttgctcgagccggcatcacttgctctcattgccacagctatctctgtggcctatgcatccgcatcgcgtgctctagattatggcaaagagatggagagaaacttggatttttcagaggcttccattacattggatcggtcacaggcactaatgattccccttgcaagctcatgcagtctgttgctgatgttctacttgttctcgtctgtctcacatcttgtgactgcttttactgctgtggcctctgcgatggcactgttcttttgcctgtctccgtatgtcacttatctcaagatgcagttcaatctaatggacccattcgtgtccaggtgttgttcaaagtcttttacacggttgcaaggtttgctgatgctcttctgcatagccacagtcttagcctggttggtttctgggcattggttgctaaataacctactgggaatttccatatgtatagcgtttgtcagccatgtgaggcttcccaacataaaaatctgtgcgctgcttcttgcctgcttgtttgtgtatgatattttctgggtgttcttctcagaaaggttctttggagcaaatgtcatggtttctgttgccacccagaaggcatctaatcctgttcacacagtagcaaataagctcagcctgcccggattgcaattgattacaaagaagctggagcttccagtcaagcttgtatttccaaggaatttgttgggtgggattgttccaggaagcaatcctggtgactacatgatgcttggccttggagacatggccattccagggatgcttctagctctggtactcttttttgataatcggaagttcaaggatgtgaattttccaccagatgtgtctcccccaaaacggcggaattatgtgtggtatgctgtaacaggttatggtattggcttggtagctgcactagctgctgggatcttgtctcagtctcctcaaccagccttactgtacctggtgccatcgacactgggacctgtcatgtacttgtcatggttacggaatgagctatgggagctatgggaagggtctgggacgattctgaacgagaaagctcatttgttggaggtctgagatccaagtggacaataagaaggatctgaacccaccgtgattgaatctaattaaacaatacttgacctcctcataccgaaggagagtatttataagctagaatgttcagtcatgtaagccatcacctagtttcgctcgcaagaggaaacacttacaaatcatgtaactgtttgtaatagaaaagttcaatgcatttcagctttttaaccatgggttcagttg

SEQ ID NO: 39523 - DNA, 3370 bp, Zea Mays
cccccggacccccgtttccttccgatccccatccgccatcccccgttcccgttcttctccttccgtccgaccgtccctcgacactgccgaggccgaacctagcagccgcccacccgacgcccaatccgccggtgcaatcgcaatctccgagggttaatcgactaccggcggctacggcgccgccagtctcctggcttaggctgccaggggatgcgaggagccagcgcagcgcggccgccggccagccgcccccgccccactgcctataccgccagctacagtcggaaacggctgcaaggcagtcggaagagggaagccgcagccgggcactgactccgatccccactctagccaaccccacgcggaccggtccacctcggacgaccacgacgccatctcgcacgcgtgcttccacccaaccacacaaatcttctctcccaggcctaaccttcctccccgcgagctgcctctactgattttgcactggcatgccgtgacgcggaaagatgtggagatccatcttggactgatttcttccttactcggttattcgccctctgccggcgcaagatccattttagtttgcccccctcccccaaattggactacccaaggtgcggggacatccgcctatgtttgaacagttctgttggagcatgctctgttttaaattgactgaacctccatgccctatgctgaatttgcttctcagagagctattttttcattaatgttttttatgtttgctgcaaaagctttaatttttcttgtcaaactagattgtgttgtttagggagcttgcacaacgattaattggaaggaacatacgaaagaaaagaaccggaaggattaatcatgctgtatatatataagctatccttgacgctgcttgttgtttgctggttattgcaggttgaagataccttggtagtcagagcatagaataagggtggactgttattaattttccataggatggaatccttgtggaagctgacctacttgctcgagccggcatcacttgctctcattgccacagctatctctgtggcctatgcatccgcatcgcgtgctctagattatggcaaagagatggagagaaacttggatttttcagaggcttccattacattggatcggtcacaggcactaatgattccccttgcaagctcatgcagtctgttgctgatgttctacttgttctcgtctgtctcacatcttgtgactgcttttactgctgtggcctctgcgatggcactgttcttttgcctgtctccgtatgtcacttatctcaagatgcagttcaatctaatggacccattcgtgtccaggtgttgttcaaagtcttttacacggttgcaaggtttgctgatgctcttctgcatagccacagtcttagcctggttggtttctgggcattggttgctaaataacctactgggaatttccatatgtatagcgtttgtcagccatgtgaggcttcccaacataaaaatctgtgcgctgcttcttgcctgcttgtttgtgtatgatattttctgggtgttcttctcagaaaggttctttggagcaaatgtcatggtttctgttgccacccagaaggcatctaatcctgttcacacagtagcaaataagctcagcctgcccggattgcaattgattacaaagaagctggagcttccagtcaagcttgtatttccaaggaatttgttgggtgggattgttccaggaagcaatcctggtgactacatgatgcttggccttggagacatggtaggcccaataaattgtatcttgcaaatatttattgctttattttgcttttagtccttttctttttataacgtctgctgttagtccttgaaccctccttgagtggttctacttttaataccccaatgtttgctgagcttcatattgtttgtcttgtctatatgtatgaactctattttgtttcagaataagaccaaatgacatgttagttaaaccctctatggttttattgacatgcaaaggtaggtcataccaaagaaaaaagttactcttcgtgaactcaagtccactgttcaatgcctaccactttttggcaaatcttagtttatccaggcagcaagatatgcactgcacactcctctatcagcttgataacaattaacttttggtttacagtaatgcacttaactactgtacagatctatatgtaattggtcaggatgcaagtgggtacacactttgtagctctgggtcactgccgagggccagtttggtcaatgcctatgccacaactaaccttaggcagaacttggtagctgcaagaagtggagaacgattagttcatttgtgttctatttttgtttcttcgaaatcatataagttcattttaatgagttttgagtcaatccaatgacccagagagagaacttgcatccctactgattgggaaaatcagcttccttcctgcatgttgcttctccaaagttcagttcagagatgaagcagaccaagtaacagctttgacattataaatagtagaagtatgtctgatcttgcaagtttttaaccctaaaaattatccaatggcactgacgagagctacgttctgtgtactcccgtagtttcgacatacagtgcacctgcttctggttattgatgatttgcgaattcacctcaggattttttttttcaaaagcagcatgactgcatcatacagatttgattctttttttctgcctagtctgtaatctatcaactttgctcttgttttttgagtaaaatttattcgtatcactgatgtcttgaatttaatcacctagattttttcttcctccaggccattccagggatgcttctagctctggtactcttttttgataatcggaagttcaaggatgtgaattttccaccagatgtgtctcccccaaaacggcggaattatgtgtggtatgctgtaacaggttatggtattggcttggtagctgcactagctgctgggatcttgtctcagtctcctcaaccagccttactgtacctggtgccatcgacactgggacctgtcatgtacttgtcatggttacggaatgagctatgggagctatgggaagggtctgggacgattctgaacgagaaagctcatttgttggaggtctgagatccaagtggacaataagaaggatctgaacccaccgtgattgaatctaattaaacaatacttgacctcctcataccgaaggagagtatttataagctagaatgttcagtcatgtaagccatcacctagtttcgctcgcaagaggaaacacttacaaatcatgtaactgtttgtaatagaaaagttcaatgcatttcagctttttaaccatgggttcagttg

SEQ ID NO: 39524 - DNA, 355 bp, Zea Mays
caggttatacggtcaggtgccatcgacactgggacctgtcatgtacttgtcatggttacggaatgagctatgggagctatgggaagggtctgggacgattctgaacgagaaagctcatttgttggaggtctgagatccaagtggacaataagaaggatctgaacccaccgtgattgaatctaattaaacaatacttgacctcctcataccgaaggagagtatttataagctagaatgttcagtcatgtaagccatcacctagtttcgctcgcaagaggaaacacttacaaatcatgtaactgtttgtaatagaaaagttcaatgcatttcagctttttaaccatgggttcagttg

SEQ ID NO: 39525 - DNA, 3237 bp, Zea Mays
cttatcttatatttcaacggctagtgcaagccgcgccacagctttactttgtttcaggtttggctgccaggtgctgaactgtaacatgcagtgccctattcccaggtttttggaccgacagcaaagcagaaggaattgtatgaccaggccattattcctattgtaaatgaggttttagagggatttaattgcaccatatttgcgtatggccagacaggcactggaaaaacatacaccatggaaggcgagtgcaggagagccaagagtggaccgaagggtcaattacctgcagacgctggagttatacctcgggcagtgaagcaaatctttgataccctggagaggcagaacaccgagtacagtgttaagatcacgttccttgagctgtacaatgaggaaattacagatcttcttgctcctgaagagatatctaaggctgcatttgaggataaacagaagaaagccttacctcttaatcttatggaggatgggaagggtggagttcttgttcgaggtctcgaggaagaaattgttacgaacgcgagtgaaatattctctctgttagaaagggggtctgcaaaacgccgcactgcagagacattactgaacaagcaatctagccggtcccactctctattctcaatcactattcacataaaagaggcaacccctgaaggagaagagctgataaaatgcgggaagttaaatctagttgacttggctgggtccgagaacatctctcgttctggagctaaggagggccgtgcaagggaggctggcgaaattaataaaagcttgcttactctgggtcgtgtgattacggcattggtcgaacaccttggacatgttccttacagggacagcaaactcacaagattgctgcgtgattcattaggaggaagaacaaagacttgtattatcgctactgtttcaccctctgtgcattgtctcgaagaaaccctgagtacattggattatgctcaccgggcaaagagcattaagaacaggcctgaggtaaatcagaaaatgatgaaatctacattaattaaagatctttatggtgaaattgaccgacttaaggcagaggtatacgctgctcgagaaaaagttggggtgtacattcccaaagacaggtatcagcaagaggaaaatgagcgaaaggcgatggctgatcagatagaacaaatgaatgcttctttggaagtaaaccataagctaattagtgatctgcaacaaaattatgattctgagcttcaacattctgctgatttgagcaaaaagcttgaagtcacagagaaatgtctggaccacacaagcaacctactctctacgacaaaagaagatcttaaacaggcacagtataatctaaatgagaaagattatataatttcagagcagaagaaagcagaaaatgctttaacacaccaaacgtatgtgctgagatcagatctggaacaatatactcgtgataatacttcactatattcaaagattgctaggggagacaagctaagtgcaacaaataggtcagtcgtgaatacattccaaactgaccttgcttcgaagttggatattctttccaatacactcaatgcatcaatagaccaacaaaatatgcatctaaaatctgtggaggacttatgccaatcttatgttgattcccatgacaaggctacttctgagctgaaaaagaagattttggcttcaaaatcattatacatgtcacatatggaagctttcctaaatgttgtcctcgtacataaagcaagtgcaaatggcacactagaagatatatcatcactgtctgctgcaagctgctgtagtcttgaccagctactagtttgtgttgagggagaggcacagaatatatttaatgacatccataatttgttaaccatccaccgaagcgaaatgacgcacttcactcaagaattaagggagagtttccaaataagcttggataggacaaaagaaatgtccacctatattattgggctctttgacaagtacgttgaggaaacctccaaattgcacagtcactcaaataatactcatgaagcacaaatgaaaagcattgaagactttcagatggtttatgaggagcaatcaaaatcagtggagcagaagcttttagcggagataagcagtttagtatctaaacatattactcgacaaagagagttggtgggcgttagattgagctctctgggcgatgctgcccgtggaaataaggcatttttggatgaacacacatcggccatggagtttgtcacaaaagatgctaagaggaagtgggaaacgtttgcagagcaggctgaaaatgactgcaaagctggctccagcttttctgcagctaagcatagccgcatggaaaccatgcttcaggagtgcaatggaagaagtcacatgctgctgttaacgatctcagcagaaagcaagttgctgaagttgaagcactcgtcaggactgcaattgagaacaacgagcaacatgaactggaagttgcatcttctcgagctgtggctgaagaagacgcctccaataacagcaaggacatagctcagggcgttgaaaatctgttggaagaggcacggaattcaagttcaagagtggtctcaacggtggaggctcacttcggtgagctacagatgctgcaagagagccactcgagccaggctgccggtatcaacatgcacgccgacaaggctctccaaaccagttacaaggactacgaaccctcaggtgaaactccggtgaggtctgagccgaacgtgccaagcaaaggctcgattgaatcgctgcgagccatgcccgtggagaccatgatgaatgagttccgtgagaaccatccgtatgaacatgaatcgagcaaagaatctaagttatctcagatacctcgcttgccgctcgcgacaatcaactgagacattcacttccctatgtgcagtgtacttttattagtagggcgtcaatttgccggttttggtgtcccttgtgcacttgtgctaggttaaccatggggtgtgagctgccttggctctctccagtgcatttcccttttttcccgcattcaattatctgtaatgttctgttgtgccttgtacgatactgatattgtacagcatcagatatgtgccaaagctagcttgaattgcatgactcattacattggaatctgaatgttgcgttgcattgtgcaaataattgataaggttttgatataaggttgcattgcac

SEQ ID NO: 39526 - DNA, 3226 bp, Zea Mays
ctgccaggtgctgaactgtaacatgcagtgccctattcccaggtttttggaccgacagcaaagcagaaggaattgtatgaccaggccattattcctattgtaaatgaggttttagagggatttaattgcaccatatttgcgtatggccagacaggcactggaaaaacatacaccatggaaggcgagtgcaggagagccaagagtggaccgaagggtcaattacctgcagacgctggagttatacctcgggcagtgaagcaaatctttgataccctggagaggcagaacaccgagtacagtgttaagatcacgttccttgagctgtacaatgaggaaattacagatcttcttgctcctgaagagatatctaaggctgcatttgaggataaacagaagaaagccttacctcttaatcttatggaggatgggaagggtggagttcttgttcgaggtctcgaggaagaaattgttacgaacgcgagtgaaatattctctctgttagaaagggggtctgcaaaacgccgcactgcagagacattactgaacaagcaatctagccggtcccactctctattctcaatcactattcacataaaagaggcaacccctgaaggagaagagctgataaaatgcgggaagttaaatctagttgacttggctgggtccgagaacatctctcgttctggagctaaggagtaatgcacttcctcttgactatagggccgtgcaagggaggctggcgaaattaataaaagcttgcttactctgggtcgtgtgattacggcattggtcgaacaccttggacatgttccttacagggacagcaaactcacaagattgctgcgtgattcattaggaggaagaacaaagacttgtattatcgctactgtttcaccctctgtgcattgtctcgaagaaaccctgagtacattggattatgctcaccgggcaaagagcattaagaacaggcctgaggtaaatcagaaaatgatgaaatctacattaattaaagatctttatggtgaaattgaccgacttaaggcagaggtatacgctgctcgagaaaaagttggggtgtacattcccaaagacaggtatcagcaagaggaaaatgagcgaaaggcgatggctgatcagatagaacaaatgaatgcttctttggaagtaaaccataagctaattagtgatctgcaacaaaattatgattctgagcttcaacattctgctgatttgagcaaaaagcttgaagtcacagagaaatgtctggaccacacaagcaacctactctctacgacaaaagaagatcttaaacaggcacagtataatctaaatgagaaagattatataatttcagagcagaagaaagcagaaaatgctttaacacaccaaacgtatgtgctgagatcagatctggaacaatatactcgtgataatacttcactatattcaaagattgctaggggagacaagctaagtgcaacaaataggtcagtcgtgaatacattccaaactgaccttgcttcgaagttggatattctttccaatacactcaatgcatcaatagaccaacaaaatatgcatctaaaatctgtggaggacttatgccaatcttatgttgattcccatgacaaggctacttctgagctgaaaaagaagattttggcttcaaaatcattatacatgtcacatatggaagctttcctaaatgttgtcctcgtacataaagcaagtgcaaatggcacactagaagatatatcatcactgtctgctgcaagctgctgtagtcttgaccagctactagtttgtgttgagggagaggcacagaatatatttaatgacatccataatttgttaaccatccaccgaagcgaaatgacgcacttcactcaagaattaagggagagtttccaaataagcttggataggacaaaagaaatgtccacctatattattgggctctttgacaagtacgttgaggaaacctccaaattgcacagtcactcaaataatactcatgaagcacaaatgaaaagcattgaagactttcagatggtttatgaggagcaatcaaaatcagtggagcagaagcttttagcggagataagcagtttagtatctaaacatattactcgacaaagagagttggtgggcgttagattgagctctctgggcgatgctgcccgtggaaataaggcatttttggatgaacacacatcggccatggagtttgtcacaaaagatgctaagaggaagtgggaaacgtttgcagagcaggctgaaaatgactgcaaagctggctccagcttttctgcagctaagcatagccgcatggaaaccatgcttcaggagtgcgcatgcactgttgactccgccgttcagcaatggaagaagtcacatgctgctgttaacgatctcagcagaaagcaagttgctgaagttgaagcactcgtcaggactgcaattgagaacaacgagcaacatgaactggaagttgcatcttctcgagctgtggctgaagaagacgcctccaataacagcaaggacatagctcagggcgttgaaaatctgttggaagaggcacggaattcaagttcaagagtggtctcaacggtggaggctcacttcggtgagctacagatgctgcaagagagccactcgagccaggctgccggtatcaacatgcacgccgacaaggctctccaaaccagttacaaggactacgaaccctcaggtgaaactccggtgaggtctgagccgaacgtgccaagcaaaggctcgattgaatcgctgcgagccatgcccgtggagaccatgatgaatgagttccgtgagaaccatccgtatgaacatgaatcgagcaaagaatctaagttatctcagatacctcgcttgccgctcgcgacaatcaactgagacattcacttccctatgtgcagtgtacttttattagtagggcgtcaatttgccggttttggtgtcccttgtgcacttgtgctaggttaaccatggggtgtgagctgccttggctctctccagtgcatttcccttttttcccgcattcaattatctgtaatgttctgttgtgccttgtacgatactgatattgtacagcatcagatatgtgccaaagctagcttgaattgcatgactcattacattggaatctgaatgttgcgttgcattgtgcaaataattgataaggttttgatataaggttgcattgcac

SEQ ID NO: 39527 - DNA, 992 bp, Zea Mays
aaacctgtacgtcgtccctctagatccagccctcaatccacggtcatctgttatcccctcctcgagctaaacggccacccttcctgcactccaaaccctaggtctagtcgcagcaggtggatctcggcctctcacgctgccatggcctcgtagcacccacagccgtagtccctctgcacgcgcgtccccgatgccaccctcgtttccatctccaccttgcactatcccctttgtaccatcgacctctccctcttccatgggttccgcctccactgcgccgactgtgtatagagccgcccacctgccccacgccgtgtcgtcaccgcgttgggagggggcatccgtcacctctaatccaaataaggaggagctgtggccagacatgggcggcagagtagtatctggatccgctgaacacccaccggtggtatctagctttcctatcaatcattgggtttcaaaggtatgctcctattgtgtgtgtactaatttttaatttattattgttcactcttgctttgtttgcttgttgttgatgcatctcctctcgtactctactgcattcattgaagcactttgcactttcatcaagacaactcagagagtgtctcgctcatgtgtttgtaatggccaaataatatcgaatgtctggccatgtttgacgcattaatgtcttttgagcattttgtcaaacaggttcacatcgttaggcattgtgtcttgggtattactccattattaaatcgtgtttgtactgaaaattaaattttgtaggcagcatcagttactcatttctggagtgggaacctgtgagagtaatttgttctgccaatgttgctattcctatttgctaattaaggctactggggttaaagattatggatcacatttattgttcttttttaggtaccctgaagactccctttctgtttttaatgaacggtaactaattcgttgtgccatctgcacacaatgttttgatatcattgtcg

SEQ ID NO: 39528 - DNA, 1025 bp, Zea Mays
aaacctgtacgtcgtccctctagatccagccctcaatccacggtcatctgttatcccctcctcgagctaaacggccacccttcctgcactccaaaccctaggtctagtcgcagcaggtggatctcggcctctcacgctgccatggcctcgtagcacccacagccgtagtccctctgcacgcgcgtccccgatgccaccctcgtttccatctccaccttgcactatcccctttgtaccatcgacctctccctcttccatgggttccgcctccactgcgccgactgtgtatagagccgcccacctgccccacgccgtgtcgtcaccgcgttgggagggggcatccgtcacctctaatccaaataagtaatccccatcccaatccgatcctaaatatgaggaggagctgtggccagacatgggcggcagagtagtatctggatccgctgaacacccaccggtggtatctagctttcctatcaatcattgggtttcaaaggtatgctcctattgtgtgtgtactaatttttaatttattattgttcactcttgctttgtttgcttgttgttgatgcatctcctctcgtactctactgcattcattgaagcactttgcactttcatcaagacaactcagagagtgtctcgctcatgtgtttgtaatggccaaataatatcgaatgtctggccatgtttgacgcattaatgtcttttgagcattttgtcaaacaggttcacatcgttaggcattgtgtcttgggtattactccattattaaatcgtgtttgtactgaaaattaaattttgtaggcagcatcagttactcatttctggagtgggaacctgtgagagtaatttgttctgccaatgttgctattcctatttgctaattaaggctactggggttaaagattatggatcacatttattgttcttttttaggtaccctgaagactccctttctgtttttaatgaacggtaactaattcgttgtgccatctgcacacaatgttttgatatcattgtcg

SEQ ID NO: 39529 - DNA, 1160 bp, Zea Mays
aaacctgtacgtcgtccctctagatccagccctcaatccacggtcatctgttatcccctcctcgagctaaacggccacccttcctgcactccaaaccctaggtctagtcgcagcaggtggatctcggcctctcacgctgccatggcctcgtagcacccacagccgtagtccctctgcacgcgcgtccccgatgccaccctcgtttccatctccaccttgcactatcccctttgtaccatcgacctctccctcttccatgggttccgcctccactgcgccgactgtgtatagagccgcccacctgccccacgccgtgtcgtcaccgcgttgggagggggcatccgtcacctctaatccaaataagtaatccccatcccaatccgatcctaaatatgaggaggagctgtggccagacatgggcggcagagtagtatctggatccgctgaacacccaccggtggtatctagctttcctatcaatcattgggtttcaaagaaacagtacggaaggccctattgttatgtattataaagaatattaggtaacaaaaactggtatggccctactgctggataaacaaattgtgggaacatgcccaaatctgcacaagtcaaccagtgatgtaactgtataatcatgcaaaaatccagtttcttgtcatatcctctataagctattcaactagctgtccagtaatactcagccttcactagaggaactaagctatggctttatgtggcacaaatattcaagcaatccaaataagattatcgcgatgagcctaaagtgcttgctatcatcactgctgctgatgtaaacgtgacctccttcagcagtcttcgttttgccagattgtaactcggagatgaacagttttttgatttcaattgaagatagaaaaggcagctctttaatctcaaccattgaacgacaacacacaacatgagggccatgactttgattctcatttaatttagcgttattagtgatgagatcgatgagtctacttatgagtctggtttatgagtcatcctttgtttgtttcatactgtcatagaaaaacatcaattcacacattatgtaatgaattaagttgtggatgatattttgtaatggcactactatttttaatacagacttatttcaaattatttgtcat

SEQ ID NO: 39530 - DNA, 1288 bp, Zea Mays
aatttattgttctgaattcctcgtgagtcatctatatctacagaaaagttctgtccatagatgaatatgcatcatattataaagatatagacccctggctcttttcaggacttggaaagttgggcaaatagacagttacatatctaccaaagtgcacccatcatatgatgtttatgtatatcgagttaacggagtatttgttgtcagcgatcctgttgactggggaagagatctacatgtacttctttcatgcctgggtctcactaatagaaaactttcttgggttgcatttgtttgatattcatagaatatcttaatgagtgacccataaacaccttttcctctaaagtgcatttgtttcatgtgaaattgtgattacttcctattgatatacaaaagttcaataatctgattttttaaaacaatacgaaaggtactctgtgacatctcgtctactcatgaacttcctaggactgaaatagtgggtcatattgatgcctttcctcttcttcctcctcccgtcctctatctctagcaccccatccatcagcactcctccgcattgttcttgatcccaaccagtactacgattctcccccaagatcaaaggccgaaggagaaggaagaaagtacggaaggccctattgttatgtattataaagaatattaggtaacaaaaactggtatggccctactgctggataaacaaattgtgggaacatgcccaaatctgcacaagtcaaccagtgatgtaactgtataatcatgcaaaaatccagtttcttgtcatatcctctataagctattcaactagctgtccagtaatactcagccttcactagaggaactaagctatggctttatgtggcacaaatattcaagcaatccaaataagattatcgcgatgagcctaaagtgcttgctatcatcactgctgctgatgtaaacgtgacctccttcagcagtcttcgttttgccagattgtaactcggagatgaacagttttttgatttcaattgaagatagaaaaggcagctctttaatctcaaccattgaacgacaacacacaacatgagggccatgactttgattctcatttaatttagcgttattagtgatgagatcgatgagtctacttatgagtctggtttatgagtcatcctttgtttgtttcatactgtcatagaaaaacatcaattcacacattatgtaatgaattaagttgtggatgatattttgtaatggcactactatttttaatacagacttatttcaaattatttgtcat

SEQ ID NO: 39531 - DNA, 1929 bp, Zea Mays
aatttattgttctgaattcctcgtgagtcatctatatctacagaaaagttctgtccatagatgaatatgcatcatattataaagatatagacccctggctcttttcaggacttggaaagttgggcaaatagacagttacatatctaccaaagtgcacccatcatatgatgtttatgtatatcgagttaacggagtatttgttgtcagcgatcctgttgactggggaagagatctacatgtacttctttcatgcctgggtctcactaatagaaaactttcttgggttgcatttgtttgatattcatagaatatcttaatgagtgacccataaacaccttttcctctaaagtgcatttgtttcatgtgaaattgtgattacttcctattgatatacaaaagttcaataatctgattttttaaaacaatacgaaaggtactctgtgacatctcgtctactcatgaacttcctaggactgaaatagtgggtcatattgatgcctttcctcttcttcctcctcccgtcctctatctctagcaccccatccatcagcactcctccgcattgttcttgatcccaaccagtactacgattctcccccaagatcaaaggccgaaggagaaggaagaaaggtagttatcgcctctcatgttgctgtattttccttaattggctttacatgtaattttttttaaaattgtgcagtccaactggtgaactccgtcaaattttatccctttccctcaaaactttatcctgtgtgttaagaaattgatcaccgccggattgggctctcgatcctcgacatctttgtttctttgtttgactgaattggagcatgtttctacttaggagtttctttagatgtgacaaacttggttatgacatgagttgataggagtttcttatgattgcatttttagtgcttgcatactatcaggcatgcacaaaaaaatatgttgttcttgacatcaaaaacacttggaattcatcagctttgaatgaaaggaacagttgacctcacaggtatgaccggactgctaaccaatgttactataacatcgggtgccctgtcatgacttctcttccacaaccctagcctgtagtatcattcctccatttccctaagcttgaaacttgaatgtagatcaatttacatttggtggctgcataagcttttgcattgtcgatatggactatgactacagtttgtcgttctgtccttgaaaactgtatgttctgctactaacagttttttagtttgtagaaacagtacggaaggccctattgttatgtattataaagaatattaggtaacaaaaactggtatggccctactgctggataaacaaattgtgggaacatgcccaaatctgcacaagtcaaccagtgatgtaactgtataatcatgcaaaaatccagtttcttgtcatatcctctataagctattcaactagctgtccagtaatactcagccttcactagaggaactaagctatggctttatgtggcacaaatattcaagcaatccaaataagattatcgcgatgagcctaaagtgcttgctatcatcactgctgctgatgtaaacgtgacctccttcagcagtcttcgttttgccagattgtaactcggagatgaacagttttttgatttcaattgaagatagaaaaggcagctctttaatctcaaccattgaacgacaacacacaacatgagggccatgactttgattctcatttaatttagcgttattagtgatgagatcgatgagtctacttatgagtctggtttatgagtcatcctttgtttgtttcatactgtcatagaaaaacatcaattcacacattatgtaatgaattaagttgtggatgatattttgtaatggcactactatttttaatacagacttatttcaaattatttgtcat

SEQ ID NO: 39532 - DNA, 1938 bp, Zea Mays
ctcgcttcgacgcggcgtggtggaagatggcgaagttgggtacggacagacggttccttagccaagttgctcacgcccgcacgactgctcacaacatgcacgcgtcgtcgtcacggtgcatgagatcggcatggccaactcaactagctaggacggacgacacggagaagaaaacagatcgcgccaacacgcataagatggaaaaaagtcagggtgcagggcccgtttctgttgctcggcacccgtcccatcccacccacctgctcacgacgacaggccagcacgacacggagggaggaagtagccaggccacctcgcctcgcctctactctcccgcggtcccgccccataccatgtccgactacaaccgctacggccacagctacagctacggcggcgggtacggccaagggccagcgccctcggccccgccggcaccgcacatgcccaccgctacatccgccgccccgccctcctcctcctcatacggcgcgtacgccgggtacccgcccgcctaccctccgccgccctcgcaggcggcgggcggattcggtcccgctggctccggctacggcttcgtccccgtcgcgttcccgccggggacgcacccggacgtcgagcgcgccttccgggccgccgaccgcgactgcagcggcgccatcgacgagcgcgagctgcagggagcgctctcctccgcctaccaccgcttcagcgtccgcaccgttcgcctcctcatgttcctcttcaacgacccctcctcctccacgccgtcacggatggggccaacacagttcgtatccctctgggattgccttgggcaatggcggggaatttttgacaggtacgacagggaccggagcggcaaaatcgactcccgtgagctgaccgaggctctccggagccttggatatgctgttccaccttctgtcatcgagcttcttatagcgaattacagcaatggtgtgcccagcaatggcgcgctagactttgacaactttgtggaatgtgggatgattgtgaagggtttaaccgagaaattcaaggagaaggatacgcgctacaccggctcggctactcttacatacgatggtttcttgtcaatggtgatccccttcatcgtcccttagctgtgctgtatgtagttcggtaacttgatagtagtcatcaaccatggttctagtaggagtgctctcccctagtctgtgcgaaaggttttttttttctcttcttcgtttctgagtcttgtctaccttgttcgttttgtacattaataacctcgatttgtttgtttcatgggatttacatcgttttggactatgaaatcttccaaggattgaaagtcatatgccatccttcagtattcctggatgggtccccgttggggctgcattgctaacaattctggcgactcgaatacacattttttggtgcggagcccattcgcagttatacaatatgcaactgcatatttcatccgaagagctagacagtttttggctgaagttgattgatttctgcaaacggccattgaggctgaaggagcgctgggagaagagccaaaccgtgagcagcgaagcgagagccacacctggcggctagaggagctggttaaagaccgaaaatcgatcgagacccaaaaaactgaagacgggagacaccaaatacctgaaaattcggtccttggttttttgtacgagtatatcgatcggtctcaagtctggagacaccgattttcattgcgtctacgaggtaggttgtcgtgcttcgctccacatgctccagcacacttgtgctcgaggacgaagtgtggtggtttgcattcatgctgctttacaagtgtaaatcaaagaaaggtcaagcagagacgatttgtcgtggccagagaccacgcccgtgttagcgcgtgcagtagatcgcacgcagccaacagaaggcccg

SEQ ID NO: 39533 - DNA, 2021 bp, Zea Mays
gtcgtcgtcacgggtgtttccttcccctctcccccctttctcatctcgcggttcttctccaaatctcggagagttttgatcagaaacttcacgtcgcttccatgacgcgtgcagtgcatgagatcggcatggccaactcaactagctaggacggacgacacggagaagaaaacagatcgcgccaacacgcataagatggaaaaaagtgtatggatagatagatagatactcgtcacaccgcatgcgcacttgcgcagcatctgctcctgaattcctccgttcctgaaccagtagatcattttgtttaacagcagggtgcagggcccgtttctgttgctcggcacccgtcccatcccacccacctgctcacgacgacaggccagcacgacacggagggaggaagtagccaggccacctcgcctcgcctctactctcccgcggtcccgccccataccatgtccgactacaaccgctacggccacagctacagctacggcggcgggtacggccaagggccagcgccctcggccccgccggcaccgcacatgcccaccgctacatccgccgccccgccctcctcctcctcatacggcgcgtacgccgggtacccgcccgcctaccctccgccgccctcgcaggcggcgggcggattcggtcccgctggctccggctacggcttcgtccccgtcgcgttcccgccggggacgcacccggacgtcgagcgcgccttccgggccgccgaccgcgactgcagcggcgccatcgacgagcgcgagctgcagggagcgctctcctccgcctaccaccgcttcagcgtccgcaccgttcgcctcctcatgttcctcttcaacgacccctcctcctccacgccgtcacggatggggccaacacagttcgtatccctctgggattgccttgggcaatggcggggaatttttgacaggtacgacagggaccggagcggcaaaatcgactcccgtgagctgaccgaggctctccggagccttggatatgctgttccaccttctgtcatcgagcttcttatagcgaattacagcaatggtgtgcccagcaatggcgcgctagactttgacaactttgtggaggtttaaccgagaaattcaaggagaaggatacgcgctacaccggctcggctactcttacatacgatggtttcttgtcaatggtgatccccttcatcgtcccttagctgtgctgtatgtagttcggtaacttgatagtagtcatcaaccatggttctagtaggagtgctctcccctagtctgtgcgaaaggttttttttttctcttcttcgtttctgagtcttgtctaccttgttcgttttgtacattaataacctcgatttgtttgtttcatgggatttacatcgttttggactatgaaatcttccaaggattgaaagtcatatgccatccttcagtattcctggatgggtccccgttggggctgcattgctaacaattctggcgactcgaatacacattttttggtgcggagcccattcgcagttatacaatatgcaactgcatatttcatccgaagagctagacagtttttggctgaagttgattgatttctgcaaacggccattgaggctgaaggagcgctgggagaagagccaaaccgtgagcagcgaagcgagagccacacctggcggctagaggagctggttaaagaccgaaaatcgatcgagacccaaaaaactgaagacgggagacaccaaatacctgaaaattcggtccttggttttttgtacgagtatatcgatcggtctcaagtctggagacaccgattttcattgcgtctacgaggtaggttgtcgtgcttcgctccacatgctccagcacacttgtgctcgaggacgaagtgtggtggtttgcattcatgctgctttacaagtgtaaatcaaagaaaggtcaagcagagacgatttgtcgtggccagagaccacgcccgtgttagcgcgtgcagtagatcgcacgcagccaacagaaggcccg

SEQ ID NO: 39534 - DNA, 1072 bp, Zea Mays
gccagactctcttccttgctcctgtctctcctcacgccatctcttctctctgtccctaggctgcacgacagcagcagggagcaggcgtctctcccatggccgttggcctcccctagcacgcgatgcccccttgcttcatctcccccacacctccatggcatttctctggtatgggacgtcgattgggagcaaccctgaggcccccactgcagcttctccgctccccggctccctgaccaagggacctcaagctccagcaagccatggatggcgctcttcctcagctcgggcttggcctccgctaggccgctgtctgttcatctgcgtcgggctctaggacgccacctctctcactgctcggctcgccatgcatatcggccacggcgtggtcaagcccaatcgatgagcctgctgtgcatgcgtccagcacaaggaccgagagatgacgatcgtgcaagtgatatggtgccaacaacaagatgcagttggtggacgacctgaagagtgatgaacttaaccagtagatgctcgccaagcgggtgtcatccagcaaacactatctaagtgttaaattaaaggcaagccccggttttatgcataaccgtttatatatgctattttactacacttaatgtttgtaggcttgtaccgtgcacttaagtgtaggagttgcctgaaaccctagttgcatgaactcaggattccttttgagatggatactagtatgctaggtcgagtagctgctatgctaaatcaggatctcggtagaagtcgagtgatttttctagcactcgcgcgaggtcaggaattggttgtatccatttttgataacagaaggatgatggtatgtggacacggatccatggggatgcgttgtctacgagacgaaattggaataaggattaacgtgcggatacctatgtcaagcgtttgaatgtactaaacacatgtcgggaaaaatggtaaccggtaaacctagtacctgagtgaagtcgggcgcggacttttatccctcacgcgacttgagactgggtctcccattctagatatggtgggtacaagtgcggtcact

SEQ ID NO: 39535 - DNA, 1650 bp, Zea Mays
tagcgctcttcgattttttttccagccaccgctttggacttctgcatcatccccgacgccgctctaatcccaggagttccatctcccatagctgtacttggtcttatccgtgtacagagctcgttcatctctccaacacgacatccctctccagctcattccagcgcactccaccctttgctcgatgtcatccccagctccttcaagcagctgacatctagattcttttcttcactcggaccatgctgctgctccattcatggctgcgagtccacctccgccgagctgccagtgctccagctcgctccttcctcgccttcaatctcttggtcgccgcgcccctcagctcgcgtagcttgctggtggcccggccactcgccctcggcctcaccttcaggccgcaacgccatcggctcctcgtccggctttaacttcgtcgtggccaacagcttcaaatccttgtagcgtgtctccgcactctgcgtcatcgccgtcatggtttttggagttcatcgtgacacgctgtcgatgatctacgtatggcggaagatcttcgcaagttcacgcagcttcgtggtaattaattttgatggcgatctgcgttatttagcgctatgtttgtttcctttgtgtgtttttgtgtgcgatcgtagagggagatttgatgctgaagccgaagccagcgtgatgcttctcggttgttcgatgaaatggtcgagttaagtattagtgaactatattctctacctctgttagcagagtcattagatagattggctaagtatgttgatttgattatcttgtttgccatatacccattgtggcggtgttagatattggttaaactgcttcatatatacggtgtgtagtttaattaatatcgtgaagtatagttttagtattcgaagcgattagctgttaagtcccgatattgttgattgtactaattgtatttatatagtgaagtcgatagcctgtcttagttgtctttttatcctatatgtagtagtagattaaatatcatggttatgtgtagatgtcaaatgtggttgtattgatagacatatatgggatgtttaggcgagttgatgacgtaaaagataggtttagtatttctatcggctagttgatagattttctagtgttattacgtcgatttggttaattgatgtagtcgatgccctgcttaattagttagtttattctaggtttggtgtttagttcgatgtcatgagggatgtgtaaattacctcgagtaattaatagtgaatggcacgacctatttaatttgtgtggaattcaagataattgagaaatgcgatttaaaaggctaattagattgttcatatgctgattttaagacttcggctttcaataatggtgagtctaactttattagacttccgatgatatattgtaactaaggatgatagtatgtgtttataattttgtcggggaccataattaggggtaccctcaaggctcctaattctcagctggtaacccccatcagcataaagctgcaaaggccggatgggtgcgattaagtcagggatcggtccattcgaaggacgcgatcacgcctcgcccgagcctagcctcagacaagggcagccgaccccggaggatctccgcctcgcccgaggcccc

SEQ ID NO: 39536 - DNA, 1873 bp, Zea Mays
ccactcgccacctaccatggctgccggcctgctaacgcgtttcacccaaactcctcccctcttctctctctgcccctggtatgttaagcaattgatgattactaatccactctaacataaactaatcccacgataattacgtcccggcggatatcacccacatctcctgttgctactggagctcgactcatctcgtcctccgtcgcgagacaagaaagtagtaggaagggaggaagatagaggggttgcgtcccagccccacctgctatctcctctcttcttccccttcctcggcggctttccaccattcaggttcagactggaggggccttcctgccaatctccagtgcgtgttcttcagtggaggcgccggccggactcgcgatggagcgggacggccagcagacccgccgcgacaagctcatcatcgatacggatcccggcatcgatgatagcatggctatcctaatggcgttcagagcacatactctggaaatcattgggctcacgaccatattcggcaacgtcgacacagaaggcgcaacatgtaatgcactattgctgtgtgagagagcaggacatcctgaggttccagtagcagagggcagccacgagcccctaaagggaggaaagccccgtattgctgattttgttcatgggtcagatggcattgggaatctgtttcttcctgcaccctctgctaagaaggttgaggaaagtgctgctgatttcatggttaataaggtctctgagtttccaggagaggtctctgtgcttgctttgggacccctgacaaatgtagcattggccatcaaacgagacccttcctttgcaagcaaggtgaataaaatagttgtactgggtggagctttcttcgtggctggaaatgtcaaccctgctgctgaagcaaatgagcagatgtcattgtggttggcattaacataacaacacaagtctgtttgacagatgagggtctcttggagctaagaaactcaaaagggaagcatgcaccgttcttatctgagacgtgcaagttctacagagattggcatgtcaagtctgatggcttccatggaattttccttcatgatcctgtgagcttcactgccgtgcttcatcccgagtacttcacattcaagaagggtgtggtgagagtggagacccagggcatttgcactggccacactttgatggatcagggattgaaaaagtggaattcagagaacccttggtcagggtataaaccgatttcagttgcatggacggttgatgtgccaaaggttattggctttgtaaagaagctgctcatggcaccatgagcaaggtaccgccatttagcgacatcaatgctctctgatgcccaagaaaatttggcaagtacagagccactctcccagctgcattatacttatttcctggacctggaaagcttcctgttcctccaatagtaagaggatcaccatggttcttttagttgaggtcttaatgatttagatcgacttctatactgcgactaaaaatatcgatatcacaagagtggataaccgtgtctaagccatttcgtccttcaaatctgggagtcaaattgtgaaagcttatgcagcagtctcaaataccatgatgtaaattctggcgtatgacagcatgtctcacacatttgtatcaatacatttcgaatcaatgagatttcccataccctcagtgcatgcaaagatcgtaatcttgttttaatgtgcctctcgtgtaaagcaaagtgccaagaaaaggcacatgataatttgcgttagaaaataaacatgtgatggtgacagttatctcgccaaatgacatgtcacttggcttgcacccgtccctttgtatatatatgtaatca

SEQ ID NO: 39537 - DNA, 2053 bp, Zea Mays
cggcctgctaacgcgtttcacccaaactcctcccctcttctctctctgcccctggtatgttaagcaattgatgattactaatccactctaacataaactaatcccacgataattacgtcccggcggatatcacccacatctcctgttgctactggagctcgactcatctcgtcctccgtcgcgagacaagaaagtagtaggaagggaggaagatagaggggttgcgtcccagccccacctgctatctcctctcttcttccccttcctcggcggctttccaccattcaggttcagactggaggggccttcctgccaatctccagtgcgtgttcttcagtggaggcgccggccggactcgcgatggagcgggacggccagcagacccgccgcgacaagctcatcatcgatacggatcccggcatcgatgatagcatggctatcctaatggcgttcagagcacatactctggaaatcattgggctcacgaccatattcggcaacgtcgacacagaaggcgcaacatgtaatgcactattgctgggaggaaagccccgtattgctgattttgttcatgggtcagatggcattgggaatctgtttcttcctgcaccctctgctaagaaggttgaggaaagtgctgctgatttcatggttaataaggtctctgagtttccaggagaggtctctgtgcttgctttgggacccctgacaaatgtagcattggccatcaaacgagacccttcctttgcaagcaaggtgaataaaatagttgtactgggtggagctttcttcgtggctggaaatgtcaaccctgctgctgaagcaaatattcttggagacccagaagcagctgacatagtttttacttcaggagcagatgtcattgtggttggcattaacataacaacacaagtctgtttgacagatgagggtctcttggagctaagaaactcaaaagggaagcatgcaccgttcttatctgagacgtgcaagttctacagagattggcatgtcaagtctgatggcttccatggaattttccttcatgatcctgtgagcttcactgccgtgcttcatcccgagtacttcacattcaagaagggtgtggtgagagtggagacccagggcatttgcactggccacactttgatggatcagggattgaaaaagtatgcctttttttctgaataactcataaagattgactatttgatgtttgttagtttcaacaatcttacatacactacatacacattaatatgacataaatctcaccaaattacttataactcttggagtaagcaaaccaaggcaaaagttaccccacaggactatgtttcaacaaatttctatttcacaattgtttctgcttgttcctactatggtgcaggtggaattcagagaacccttggtcagggtataaaccgatttcagttgcatggacggttgatgtgccaaaggttattggctttgtaaagaagctgctcatggcaccatgagcaaggtaccgccatttagcgacatcaatgctctctgatgcccaagaaaatttggcaagtacagagccactctcccagctgcattatacttatttcctggacctggaaagcttcctgttcctccaatagtaagaggatcaccatggttcttttagttgaggtcttaatgatttagatcgacttctatactgcgactaaaaatatcgatatcacaagagtggataaccgtgtctaagccatttcgtccttcaaatctgggagtcaaattgtgaaagcttatgcagcagtctcaaataccatgatgtaaattctggcgtatgacagcatgtctcacacatttgtatcaatacatttcgaatcaatgagatttcccataccctcagtgcatgcaaagatcgtaatcttgttttaatgtgcctctcgtgtaaagcaaagtgccaagaaaaggcacatgataatttgcgttagaaaataaacatgtgatggtgacagttatctcgccaaatgacatgtcacttggcttgcacccgtccctttgtatatatatgtaatca

SEQ ID NO: 39538 - DNA, 1792 bp, Zea Mays
cactctaacataaactaatcccacgataattacgtcccggcggatatcacccacatctcctgttgctactggagctcgactcatctcgtcctccgtcgcgagacaagaaagtagtaggaagggaggaagatagaggggttgcgtcccagccccacctgctatctcctctcttcttccccttcctcggcggctttccaccattcaggttcagactggaggggccttcctgccaatctccagtgcgtgttcttcagtggaggcgccggccggactcgcgatggagcgggacggccagcagacccgccgcgacaagctcatcatcgatacggatcccggcatcgatgatagcatggctatcctaatggcgttcagagcacatactctggaaatcattgggctcacgaccatattcggcaacgtcgacacagaaggcgcaacattgtgagagagcaggacatcctgaggttccagtagcagagggcagccacgagcccctaaagggaggaaagccccgtattgctgattttgttcatgggtcagatggcattgggaatctgtttcttcctgcaccctctgctaagaaggttgaggaaagtgctgctgatttcatggttaataaggtctctgagtttccaggagaggtctctgtgcttgctttgggacccctgacaaatgtagcattggccatcaaacgagacccttcctttgcaagcaaggtgaataaaatagttgtactgggtggagctttcttcgtggctggaaatgtcaaccctgctgctgaagcaaatattcttggagacccagaagcagctgacatagtttttacttcaggagcagatgtcattgtggttggcattaacataacaacacaagtctgtttgacagatgagggtctcttggagctaagaaactcaaaagggaagcatgcaccgttcttatctgagacgtgcaagttctacagagattggcatgtcaagtctgatggcttccatggaattttccttcatgatcctgtgagcttcactgccgtgcttcatcccgagtacttcacattcaagaagggtgtggtgagagtggagacccagggcatttgcactggccacactttgatggatcagggattgaaaaagtggaattcagagaacccttggtcagggtataaaccgatttcagttgcatggacggttgatgtgccaaaggttattggctttgtaaagaagctgctcatggcaccatgagcaaggtaccgccatttagcgacatcaatgctctctgatgcccaagaaaatttggcaagtacagagccactctcccagctgcattatacttatttcctggacctggaaagcttcctgttcctccaatagtaagaggatcaccatggttcttttagttgaggtcttaatgatttagatcgacttctatactgcgactaaaaatatcgatatcacaagagtggataaccgtgtctaagccatttcgtccttcaaatctgggagtcaaattgtgaaagcttatgcagcagtctcaaataccatgatgtaaattctggcgtatgacagcatgtctcacacatttgtatcaatacatttcgaatcaatgagatttcccataccctcagtgcatgcaaagatcgtaatcttgttttaatgtgcctctcgtgtaaagcaaagtgccaagaaaaggcacatgataatttgcgttagaaaataaacatgtgatggtgacagttatctcgccaaatgacatgtcacttggcttgcacccgtccctttgtatatatatgtaatca

SEQ ID NO: 39539 - DNA, 1910 bp, Zea Mays
caaaatctgacttgctatacgcatgcatgcttcctggttcctgcctctaaacataatggccatggtccaactgcacccacgttatgcatcatgcaacaacaacctccagcaattcttcttcaattaatacggggtgatagacacggagctgttcggcctgctgagagagaaacacggcaagggcttccagcagttcgtagaggccaaggtcgtcgctttggccggagacatcgtatacgacggcctggggctggaggcagccgtgctggacgcgctggccaaggacgtcgacgtcatcgtcaacatcgcagcaaccaccaacttctacgaaagatacgatgtttcgctggacgtgaacgtgctgggagtgaagcacctgtgcatgttcgccaagcagtgcgcgaggctcaggatgctcatgcacgtctccactgccttcgtctcgggcttcagggagggcctcatcctggagaagcccatcaagcccggcgagtcgctgcgggagggcacgtacctggacgtggacgcggagctgcgcctcgtcaaggaggtgaagaagtcgctggcggcgaacggcgatggcgacggcgacagcacggagcggaaggccatgaaggagctgggcctccggcgggcgcggcacttcgggtggtccaacacgtacgtgttcaccaaggccatgggggaggccgtgctgggccagcagctccggggcggcgacgtccccgtggcggtgatgcggcccagcatcatcaccagcgtccggcgcgacccgctgcccgggtggatgcagggcacccgcaccatcgacagcatcatcatcggctacgccaagcagaacctgtcctgcttcctcgccgacctccgcctcgtcatggacgtcatccccggggacatggtggtcaacgccatgatggcggccgtggtggcgcactcggaggcgttcgcgccgccgctgccgcaggtggtggtgtaccacgccacctcgtcgctgcgcaacccggccacctacgacgtgctctaccagtccggacgccgccatttctacgagaacccgcgcgtcggcaaggacggcagggtcatccccaccagggagatgtacttcttcaccagcatcgccaggttccacctctacatgactctcatctacaaggtgccattagagattctgcaccttgtgaatctgctgctctgtggccttctctcgcggctctacaacgacctcaaccgcaagtacaagtttgtgatgcatctggttgacgtctacggcccattcgccttcttcaaaggatgcttcgatgacataaacctggagcggctaaggctggcaatggcgatgaagacccctgaggatcaaatgttcaatttcgaccctaagaccatcgactgggacgattacttcaccagaatccacatccctggtattctcaagtatgtgtgcaagtgaagccttctttcttcagtctatttgcagcatgcacatgcttcttcttcgccttcttactatcgaaagttaatggctcatattctttatgaaagaaatttataccactctgtttggttgtacctgttctatggatcgaccgggtgttaccaagaaacaaaaataattcgatctctgctagattgatatagttctgtatgggagagactgaggcccctcatatcgtaaatcaatagtgatcgtcaaacgagtgtatgctgtgttaggtggcagccaatatgtatcttgattaattgagaacttgtaatctgtgtcatatgtacgcgtgtcactgtcagtgacaatgaaaagcaaatgtaatatctatttataatggcagtgaaattcaggaaagagaactagttaatcagaaagtagggttttctgatatggatggagatgtatatatatatacacacactctatt

SEQ ID NO: 39540 - DNA, 2224 bp, Zea Mays
atcggcgtcgccatctccggagtgccacgcctaggagctattctctctagtactgcggcgacttcactccaagcctcccccttcagcgatcagcacacatcacgtaaagcgcaaccaaatgatttccaccaccgtcgctgctcaccccgccaccgtcacagcgctgcggcgaaggtacccgcttcgccctcgccagccactctgtgctccaatcttcacggcggcgacgaggcagtgcatggctacggcgaagccctcggtcacaaacgcgctcgctaacctatccgttgagagcgcccccgcggcgcttcccaagctttcgttcccgatactggtgaatagttgcactgggaaaatggggaaggctgttgctgaagcagctgtctcggctggtcttcagttagttcctgtatcattcagtgccattgaggtccctgatcgaaagattgaaatatgtgatagagaaatttttattcatgacccatctgaaagtgaaaaaattctgcctaccattgttaaagaatacccaaatgtcatagttgtagattacactgtgcctgatgctgttaatgcaaatgctgaactctattgcaaatttggtttgccatttgtaatgggcacaactggtggaaataggcaactcttgcacaaaactgtgcatgatgcgaatatctacgctgtgatatcccctcagatggggaagcaggttgttgcttttcttgctgccatggaaattatgtcagagcaatttcctggtgcattttcaggttacaagctggaggtcatggagtctcatcaagcaacaaaattggacatttctgggactgccaaggctgttatctcttgttttcagaagttgggtgtatcgtttgacatgaatgaggtaaagcaagttagggatcctgaggagcaggtaacgttagtgggtgtcccagaagaacatctcgggggccatgccttccacatgtaccatctcacttcgcctgatgggacagtttcgtttgagttccagcacaatgtatgtggccgttcaatatacgcagaaggaactgttgatgcagctatgtttctctacacaaagattcaatcgggtgcgagcaagaaattgtatgacatgattgatgtcttgagagaagggaacatgagatgaggtccatgttggcgtcagatgagctttcatgtaccaatttgcaagctcaattccaccgtgaattaggttacttttacaatgtacccttcccaatttaccagttaactcactttcagttttgaattggctgcttcaatgatggaaggtactccgttccagagtgtatgcaattttagtttctctaggtatattgattttggcgttttgctatacacctatatgcaatctatagattgtagtaaaaaaaatgtattcagaaaggccagaatgatctacaatttgaaacggagtaatgcttagggacttaatgctttgagtcacgtccagccaaggatgctcgctcaatttattaactttatcacactggtggctgctagttgggtcaacccttggacgtgagtagcaaccataggaaatcaaaggtggtctgtggtttacctttctgacttttgggagttgggacttgcacaccatctaatattccacctggatctcagagttagttggctcacttctgagttaaagcacttgatgtcttggttggttctaacccttctggcttttattgtactagtgtattgctgtgcgcatgcgcgcggtgttaggtgttaaatccgtttgtgagattttaatgtgtacacaaataagaaacaaagaatgtactctccacccattgcttctttcagcgcgtcatcattgtcaaaccattgataaaggattttaagttgtgcataaataagagacagaatgtactctccatccattgcttctttcagcgcatcatcatcgtcaaaccattgataacgtttgtcatgtgtcttttagagtgatgctagatgtcggcaaatatcaaatactggtcctaaatctatttcacagttactataacaacatattttgtcagaaagtgggcagtttaaaggttttccttctactttttgagctatacagaacgaaaagtttctgttgcaaaacatgttatttcattatgaccaacccaaggggttcgacagcttctcccgagaggacacaccttttggggatatatcccttcatgttgtatatatatctatg

SEQ ID NO: 39541 - DNA, 4805 bp, Zea Mays
ctcccttcttctcgagctgtagtcctagtccactacaaaggtgttggagtcctggtattcttgctggtgtgcatcctctctttcagccaccaagtttgttgtctagtgcatcgcgtgtcatggtgaccacgcccactcgagctcaccctcaccatggccagcattcgtcggaggttgtctcggtcatgtggtgccagttccctactcctcgtagaactcccagcaggaatgaagattcaagctgaagtggtgactgaagagaaatctactccggtgattgaagaggaatctagacctcttcactgcaacaaaggcaagccccggtgcatgcaacccctttcttgtatttttaaaagacttttatacactttaagtctagtgaaatgtgcattaagtttataggagttgcttggaaactatttgatacattgactaccttgatatccattcctattatagatacttctttggaagtatcaaatattgtttataaaaattgcttagccctgcctagaggtaaatcttgcagatataatttgtcctttgcattaatgcctagctcagggtttatcctgaggaaggatggctctacctacaagaatattttcatcgggatcatggggagatctaaagtaaggttccctgtgatgttttaatcatcctaagatacataaataagttcgaaggatgaaagtacttaattcgagacttgggctaggaataggtgatgttctgcccaggttgattaaggattatagggaatgtaggcttgatgatcgaggactatattaactagccacatgtcctggtatgggacagggtaagcctaatcttagcttgaccaataccagaaaggctaccacgcaatgggagtggagagatggcgagagtagcatgtacctgttgaaagctaaaaagagcctcgcggacggtccggacagtccgcggtggtggcgcggacggtccgcgtgtccgcagagtcagttagggttcctagtttctcgcgggatttgttacctaaaatcgcgggattaactcagaaaacagtttgaagcggatccatacctccccctttatatagatgaagggctacgaccgattgaaccccaacaatcgatcaaatcaagtctatttctcgttttttaccttgtgcattaggagtagctctagtttagttctagtttagtatttcaatccccaaattctccgcttctcttcggctctacgtcgattagaggagtctaggtcggcctgccgagcctagacaacatctcggatctctcctccccgacggggtccctcccgggagcgagatccaagcgccgccggcaacctttggcgcccctgcgcacgcgcggaccgttcgacctttaggcgcggaccgtccggccgtcaggcagggaacccaagcccctattccaggtggcgaactgtccagcccctggccgcggaccgtccgcgcctctgcagagggcaccgccaccggttctcgttatagtgattggcgccctaaaaggtgtcaacatacttttggcgactccgctggggacaggtgtttagatctaaaaatcaggccctcaaatgtcggttctaaagatcacatcgatatctccccggacaatatcctaaagccgcctgttgaaagtctgacgaccgatgagcaacaacaatatgaggactacatgcgtcaagcgaaggagaaattcttatcacaatacatggtggatcgccaccagaaagttatcaaacatggagagaccgacgtcgcatctcttctatcttcgcttcaagtccccaacgtaagtaaacccgacaacatccaatctattaaacagtatgtagatcatcagcaaaatcaaatgaaacaacagattggagggttagaagagtcaattagaaaattaacgcgtacgttggaaaagtctgttgctcctagttttccatcatacgaaactagtaatagggtatttatgtctgatgtatcggcaacaaatggggattcgcaaccccagcctttgtatggtatgccgatgaactcatattcagggcaaatacaaccaccgccgtccctgcttggcagatcggcacccctgaacatggtcggaccgtccgagcctctgcccggaccgtccggcccatacgcagaccgtatggcttgctctggcggacagtccagggccgccctaggaccaccgccatccctgattggcagatcggtgaccctagacgcagtcggaccatccgagcttctacccggaccgtctggcccttacgcggaccgttcaactttccctatcggacagtccagggccgcaccaggactaccatgtggtgtctcgataatggccaacgcaaccggtcagttcggatttaccaccggacaaaccggatacgcatatgcagaacctgttgttgcacaccttgcaccaaattattacacaccacagcagtagtatgtttcaccctttacatacttaaaccataacgcaccatacaatcatagactgatcaacactatcgatcggtcacggcaagaaggtcggtatgctaatgcccgaccaaatgagccccacagcccaggatccggtggtctaccatcgggtgcaatggaaaaaattagggaagagatgactgagctatttcaagataagttcgtagttagtgtagccagagtggggcaatcataccaaaagccatataatcaccgttttgacactgtcccatatccacaaggggcaaggataccagaattttctaagttttctggtgagaatggaagaaacacacacgaacacataggctagttcctagcacacctaggcgaattggccgatggagaagcatttcgtgttcctttattttctttatcccttactggtaccgcttttgcatggtacgcctccctgcctcctaattccattaatttctggaatgagttagaaagtaaatttcatgaacatttctttgtcggggaatatgaattaggactagctgacttagcttcagtccgacaaggacgcgaagaatcggttaatgattatatccggaggttctgggacactagaaaccgatgctttcggatccatgtcactgacaaagagctagcagggctagcttttaatgggttgctatcctacttaagagacaaattagatgggacccacttattttcgatagcgcagctacatcagcaggctttagcctatgaaagctgatttaatgagacgtcaaaatcggccgcccgtactatacatctaatagagcgtgatagttcagatgatgaatccgcagatgtatataccgctgagtttatttggccaacaaaggccaaatcttcggcatgttcttccttacagccggttcaaaagaatcggcaagaagagattaaatttacctttaatgttgtcaaatgcgataagatatttgacgagctacttaaaaatggcaatattaaattaactcatactatccctcctatagatgaattaaagagacgtgcttattgtaagtgacataattctttttctcatgccaccaatgactgtaatgtttttcgtcaacatgtacaatcggccataaatgagggccgattggcttttcaggagatgcaagtggacacacaaccatttcctgttaatacaatagatatcgcatgcaaaaagatcttagttcagcccaaaacgaccgataaaggcaaaagcaaagacatcatcattggcaatcctcgcatgtcaaatatattacagaaggagattgctcgaaaggcttcggacgataaggctaaaaagttcggaggcaccggggggcaggcacaattaatgagccaagcacgacagcctggcctgagcatcacggacggtctgacacatacgtgcggacggtccggtgctcagacagacggtccggctaactctgccggacagtccacctatggccaaaggcatcagcctccacacaaagctttaaaagggaaagagatgcaatggcaaagcacatatggtcggctgatcaaagctgaccctacttttgatcagttgctctccaagaatactaggaagaagactgttctacatggtcggtcaacgaagaaaccccggtcacctactaaaacgaaacgggtaaacaaaacggccctaaaggcgacacaacaagcatcgcctattcatcccatgagaccagggtactttccacccgtttactcatcgtcggtatattatcttgttcaaatatggaatggtatgatgatgaatccatggtacatgtatagtccttttgtctatccagactgggggcacctccattctattctttttgatccattgatcaaatggccatggtcgagaaagatacaatctgaaacggcctttatacattggtgctttattgaatgatctcaatattgaaaagccggtgacttacatcaggtttagttcatatgcttttggttcgtcaaccttcaccaaaaggcagggggcatatgttacggccgattgaaccccccaacaatcgatcaaatcaagtctatttctcgttttttttaccttatgcattaggagtagctctagtttagttctagtttagtatttcaatccccaaattctccgcttctcttttgctctacatcgattagaggagtctaggtcggcctaccgagcctagacaacatctaggatttctcctccccgacggggtccctctcgggagcgagatccaggcaccgccggcaacctttgtcgcccctgcgcacgcgcggaccgtccgacctttaggcgcggaccgtccgaccgtcaggcagggaacccaag

SEQ ID NO: 39542 - DNA, 2071 bp, Zea Mays
ctcccttcttctcgagctgtagtcctagtccactacaaaggtgttggagtcctggtattcttgctggtgtgcatcctctctttcagccaccaagtttgttgtctagtgcatcgcgtgtcatggtgaccacgcccactcgagctcaccctcaccatggccagcattcgtcggaggttgtctcggtcatgtggtgccagttccctactcctcgtaggttagtgaagctcacaccatttactacttgaactctaccactgtctgttgctgggaactaggtgtaaaattcgctcaaagataggttgtcaggtttctggatcccagacttagtgcagaaggctgaaactaggttttagtgtgttgagctcaactttcgagctctattgtgcccagtctatttggttttgggccaaagttctgtagcaagtttgaagaccataataagatgaacaaaattactaaagagagatgggctaggtactacacaaaattgggagtaaaacatgtccaaatcttctctgtcagacttaacgaatgctggttcagaacactaaaatggggttgcagtggttttggctctactttggtgcttcataaaaaatgttctgaatgttttcaacctaggggtgctataccaaagtagtagagctatatctaaggaataactttggtaaggtgagcttagtctgttgttgtgtaaaaattggagaaaaggttggctaaagttggactgtcaggctagacataactgaattttgttattcagttctgagaactgaattgcagcaggatgcctagtttgaaattcatttgtgactgattcatggggttttggatttccatagcaaagctggagaccatagtaaagtgagcaagttttataaagtgaggtggacttggttccacataaatttgggagtaaaagtggccaaaaggtggactgttaggtgttgggatcagacttagaataatatttaagtctgaatttgtgtgtttttattcaaatttgggtccttgtggtaattaatccaagaagaattggggtaggaatgctatagcaaagtgaaagaccatgtcaaggagagaaagtgtcatacagagaattggtttgctaatataaagaatttagagaaaaaggagttgaaaaactctctgtcagattaaacatgtgttgtttcagacttctaaaattggaatgtttcagtgtttttgctatgttttggtgcagcatagcttgtgttttgtacgattttgaccttggactgttgtagcaaactggtagtgctatggtttgggagcaggcttggccaactaagttggtgtggtgctatagaaaatgatgagtttaaggtacatgtacaggagggttcaggtggacagtaaggtgtaattagaagtacttaatgttatcctctttgtaactgcataagcataaacatccatgatcatgtcatttcatgtagaactcccagcaggaatgaagattcaagctgaagtggtgactgaagagaaatctactccggtgattgaagaggaatctagacctcttcactgcaacaaaggtgatgaggagtattctagttcctgtggctggagggcgcatccagttctggaggaggactagctaggtttatgtatgcgctttggagggttcttaccttcctgctattgtaataagttatgcactttgagtatctcaagacttgtaatatttataatttttttatgttgtaaaacttgagttttggaaatataaagtatgtttgtaaagtcttccgctctatctccaaagtgtgtgtgtatcgaagtgattactgtaatatacatgaatgtgggagatccttaggatgatgagttcaagttgatgaactcgatagccttgttaagttacacagtacacgtgcataaccatctgaggccgttaatggcaaggattggtgcatgtgggcccgataacttgggagggctatcacaatctgtgctaggatatagaagatcatcacaaagtggaagataacaaaagttgtgagccacacacctatggtgtacatgagtaacaatgaagcattgccaa

SEQ ID NO: 39543 - DNA, 825 bp, Zea Mays
ctcccttcttctcgagctgtagtcctagtccactacaaaggtgttggagtcctggtattcttgctggtgtgcatcctctctttcagccaccaagtttgttgtctagtgcatcgcgtgtcatggtgaccacgcccactcgagctcaccctcaccatggccagcattcgtcggaggttgtctcggtcatgtggtgccagttccctactcctcgtagaactcccagcaggaatgaagattcaagctgaagtggtgactgaagagaaatctactccggtgattgaagaggaatctagacctcttcactgcaacaaaggtgatgaggagtattctagttcctgtggctggagggcgcatccagttctggaggaggactagctaggtttatgtatgcgctttggagggttcttaccttcctgctattgtaataagttatgcactttgagtatctcaagacttgtaatatttataatttttttatgttgtaaaacttgagttttggaaatataaagtatgtttgtaaagtcttccgctctatctccaaagtgtgtgtgtatcgaagtgattactgtaatatacatgaatgtgggagatccttaggatgatgagttcaagttgatgaactcgatagccttgttaagttacacagtacacgtgcataaccatctgaggccgttaatggcaaggattggtgcatgtgggcccgataacttgggagggctatcacaatctgtgctaggatatagaagatcatcacaaagtggaagataacaaaagttgtgagccacacacctatggtgtacatgagtaacaatgaagcattgccaa

SEQ ID NO: 39544 - DNA, 6049 bp, Zea Mays
cccttcttctcgagctgtagtcctagtccactacaaaggtgttggagtcctggtattcttgctggtgtgcatcctctctttcagccaccaagtttgttgtctagtgcatcgcgtgtcatggtgaccacgcccactcgagctcaccctcaccatggccagcattcgtcggaggttgtctcggtcatgtggtgccagttccctactcctcgtaggttagtgaagctcacaccatttactacttgaactctaccactgtctgttgctgggaactaggtgtaaaattcgctcaaagataggttgtcaggtttctggatcccagacttagtgcagaaggctgaaactaggttttagtgtgttgagctcaactttcgagctctattgtgcccagtctatttggttttgggccaaagttctgtagcaagtttgaagaccataataagatgaacaaaattactaaagagagatgggctaggtactacacaaaattgggagtaaaacatgtccaaatcttctctgtcagacttaacgaatgctggttcagaacactaaaatggggttgcagtggttttggctctactttggtgcttcataaaaaatgttctgaatgttttcaacctaggggtgctataccaaagtagtagagctatatctaaggaataactttggtaaggtgagcttagtctgttgttgtgtaaaaattggagaaaaggttggctaaagttggactgtcaggctagacataactgaattttgttattcagttctgagaactgaattgcagcaggatgcctagtttgaaattcatttgtgactgattcatggggttttggatttccatagcaaagctggagaccatagtaaagtgagcaagttttataaagtgaggtggacttggttccacataaatttgggagtaaaagtggccaaaaggtggactgttaggtgttgggatcagacttagaataatatttaagtctgaatttgtgtgtttttattcaaatttgggtccttgtggtaattaatccaagaagaattggggtaggaatgctatagcaaagtgaaagaccatgtcaaggagagaaagtgtcatacagagaattggtttgctaatataaagaatttagagaaaaaggagttgaaaaactctctgtcagattaaacatgtgttgtttcagacttctaaaattggaatgtttcagtgtttttgctatgttttggtgcagcatagcttgtgttttgtacgattttgaccttggactgttgtagcaaactggtagtgctatggtttgggagcaggcttggccaactaagttggtgtggtgctatagaaaatgatgagtttaaggtacatgtacaggagggttcaggtggacagtaaggtgtaattagaagtacttaatgttatcctctttgtaactgcataagcataaacatccatgatcatgtcatttcatgtagaactcccagcaggaatgaagattcaagctgaagtggtgactgaagagaaatctactccggtgattgaagaggaatctagacctcttcactgcaacaaaggcaagccccggtgcatgcaacccctttcttgtatttttaaaagacttttatacactttaagtctagtgaaatgtgcattaagtttataggagttgcttggaaactatttgatacattgactaccttgatatccattcctattatagatacttctttggaagtatcaaatattgtttataaaaattgcttagccctgcctagaggtaaatcttgcagatataatttgtcctttgcattaatgcctagctcagggtttatcctgaggaaggatggctctacctacaagaatattttcatcgggatcatggggagatctaaagtaaggttccctgtgatgttttaatcatcctaagatacataaataagttcgaaggatgaaagtacttaattcgagacttgggctaggaataggtgatgttctgcccaggttgattaaggattatagggaatgtaggcttgatgatcgaggactatattaactagccacatgtcctggtatgggacagggtaagcctaatcttagcttgaccaataccagaaaggctaccacgcaatgggagtggagagatggcgagagtagcatgtacctgttgaaagctaaaaagagcctcgcggacggtccggacagtccgcggtggtggcgcggacggtccgcgtgtccgcagagtcagttagggttcctagtttctcgcgggatttgttacctaaaatcgcgggattaactcagaaaacagtttgaagcggatccatacctccccctttatatagatgaagggctacgaccgattgaaccccaacaatcgatcaaatcaagtctatttctcgttttttaccttgtgcattaggagtagctctagtttagttctagtttagtatttcaatccccaaattctccgcttctcttcggctctacgtcgattagaggagtctaggtcggcctgccgagcctagacaacatctcggatctctcctccccgacggggtccctcccgggagcgagatccaagcgccgccggcaacctttggcgcccctgcgcacgcgcggaccgttcgacctttaggcgcggaccgtccggccgtcaggcagggaacccaagcccctattccaggtggcgaactgtccagcccctggccgcggaccgtccgcgcctctgcagagggcaccgccaccggttctcgttatagtgattggcgccctaaaaggtgtcaacatacttttggcgactccgctggggacaggtgtttagatctaaaaatcaggccctcaaatgtcggttctaaagatcacatcgatatctccccggacaatatcctaaagccgcctgttgaaagtctgacgaccgatgagcaacaacaatatgaggactacatgcgtcaagcgaaggagaaattcttatcacaatacatggtggatcgccaccagaaagttatcaaacatggagagaccgacgtcgcatctcttctatcttcgcttcaagtccccaacgtaagtaaacccgacaacatccaatctattaaacagtatgtagatcatcagcaaaatcaaatgaaacaacagattggagggttagaagagtcaattagaaaattaacgcgtacgttggaaaagtctgttgctcctagttttccatcatacgaaactagtaatagggtatttatgtctgatgtatcggcaacaaatggggattcgcaaccccagcctttgtatggtatgccgatgaactcatattcagggcaaatacaaccaccgccgtccctgcttggcagatcggcacccctgaacatggtcggaccgtccgagcctctgcccggaccgtccggcccatacgcagaccgtatggcttgctctggcggacagtccagggccgccctaggaccaccgccatccctgattggcagatcggtgaccctagacgcagtcggaccatccgagcttctacccggaccgtctggcccttacgcggaccgttcaactttccctatcggacagtccagggccgcaccaggactaccatgtggtgtctcgataatggccaacgcaaccggtcagttcggatttaccaccggacaaaccggatacgcatatgcagaacctgttgttgcacaccttgcaccaaattattacacaccacagcagtagtatgtttcaccctttacatacttaaaccataacgcaccatacaatcatagactgatcaacactatcgatcggtcacggcaagaaggtcggtatgctaatgcccgaccaaatgagccccacagcccaggatccggtggtctaccatcgggtgcaatggaaaaaattagggaagagatgactgagctatttcaagataagttcgtagttagtgtagccagagtggggcaatcataccaaaagccatataatcaccgttttgacactgtcccatatccacaaggggcaaggataccagaattttctaagttttctggtgagaatggaagaaacacacacgaacacataggctagttcctagcacacctaggcgaattggccgatggagaagcatttcgtgttcctttattttctttatcccttactggtaccgcttttgcatggtacgcctccctgcctcctaattccattaatttctggaatgagttagaaagtaaatttcatgaacatttctttgtcggggaatatgaattaggactagctgacttagcttcagtccgacaaggacgcgaagaatcggttaatgattatatccggaggttctgggacactagaaaccgatgctttcggatccatgtcactgacaaagagctagcagggctagcttttaatgggttgctatcctacttaagagacaaattagatgggacccacttattttcgatagcgcagctacatcagcaggctttagcctatgaaagctgatttaatgagacgtcaaaatcggccgcccgtactatacatctaatagagcgtgatagttcagatgatgaatccgcagatgtatataccgctgagtttatttggccaacaaaggccaaatcttcggcatgttcttccttacagccggttcaaaagaatcggcaagaagagattaaatttacctttaatgttgtcaaatgcgataagatatttgacgagctacttaaaaatggcaatattaaattaactcatactatccctcctatagatgaattaaagagacgtgcttattgtaagtgacataattctttttctcatgccaccaatgactgtaatgtttttcgtcaacatgtacaatcggccataaatgagggccgattggcttttcaggagatgcaagtggacacacaaccatttcctgttaatacaatagatatcgcatgcaaaaagatcttagttcagcccaaaacgaccgataaaggcaaaagcaaagacatcatcattggcaatcctcgcatgtcaaatatattacagaaggagattgctcgaaaggcttcggacgataaggctaaaaagttcggaggcaccggggggcaggcacaattaatgagccaagcacgacagcctggcctgagcatcacggacggtctgacacatacgtgcggacggtccggtgctcagacagacggtccggctaactctgccggacagtccacctatggccaaaggcatcagcctccacacaaagctttaaaagggaaagagatgcaatggcaaagcacatatggtcggctgatcaaagctgaccctacttttgatcagttgctctccaagaatactaggaagaagactgttctacatggtcggtcaacgaagaaaccccggtcacctactaaaacgaaacgggtaaacaaaacggccctaaaggcgacacaacaagcatcgcctattcatcccatgagaccagggtactttccacccgtttactcatcgtcggtatattatcttgttcaaatatggaatggtatgatgatgaatccatggtacatgtatagtccttttgtctatccagactgggggcacctccattctattctttttgatccattgatcaaatggccatggtcgagaaagatacaatctgaaacggcctttatacattggtgctttattgaatgatctcaatattgaaaagccggtgacttacatcaggtttagttcatatgcttttggttcgtcaaccttcaccaaaaggcagggggcatatgttacggccgattgaaccccccaacaatcgatcaaatcaagtctatttctcgttttttttaccttatgcattaggagtagctctagtttagttctagtttagtatttcaatccccaaattctccgcttctcttttgctctacatcgattagaggagtctaggtcggcctaccgagcctagacaacatctaggatttctcctccccgacggggtccctctcgggagcgagatccaggcaccgccggcaacctttgtcgcccctgcgcacgcgcggaccgtccgacctttaggcgcggaccgtccgaccgtcaggcagggaacccaag

SEQ ID NO: 39545 - DNA, 1064 bp, Zea Mays
ccgacgtcggttctcgttatagtgattggcgccagaaaaggtatcaacagtaccctccgtggcaagaggctggacggtggagtaattgtgctctcgtttggtgtgaacccgatctggtcttgagatagctgggggcgggttggcatatgcaggggttaagtgctacatatgtcgtgtggttagggatcccgagctgggtaaatcgattcagatcgtcgttatatcctcagataatggagacttgatcactgccctgcaatctaagtcatggatggaatcataataagcaaaattcatgttgtattgattaatgtgatgatgaaattagactaaatgcaaacaaggtttattaatacttaatctagcattaaaatgttgaaagtaaggactcattttagtaagcttttctgcaaactattaaagttgattcttgctaaaagcctttccttgattcccaaatccagcatatccttgagagtttttttccttagtcgggtaagacttgcgaaagtacactccgtactcagggttttcgaacccatgttgttgtaggtgatgaggagtattctagttcctgtggctggagggcgcatccagttctggaggaggactagctaggtttatgtatgcgctttggagggttcttaccttcctgctattgtaataagttatgcactttgagtatctcaagacttgtaatatttataatttttttatgttgtaaaacttgagttttggaaatataaagtatgtttgtaaagtcttccgctctatctccaaagtgtgtgtgtatcgaagtgattactgtaatatacatgaatgtgggagatccttaggatgatgagttcaagttgatgaactcgatagccttgttaagttacacagtacacgtgcataaccatctgaggccgttaatggcaaggattggtgcatgtgggcccgataacttgggagggctatcacaatctgtgctaggatatagaagatcatcacaaagtggaagataacaaaagttgtgagccacacacctatggtgtacatgagtaacaatgaagcattgccaa

SEQ ID NO: 39546 - DNA, 227 bp, Zea Mays
caccacaacaaaatcattcacaaaaactacacatgttattatgttttgcacatatttgcaaatactttacaaaatcattcacaaaagtactaacgcttcaagtgattcgcaaaagccttcacaaaagcactccaacttcttgtatcctcttgttttaaggcacaagcttgtaggggttgtgatgtcgccacttacttgatgctaacaagacatttccttcaccaaag

SEQ ID NO: 39547 - DNA, 255 bp, Zea Mays
ccagaggaaggaggcgcgcgcggctaggttagggttaggcggcggctgcttgttgggccttgggccgttagttgggttaggttttagttttttctttttctttttttcttctatttcctttttctaaattcgaaatatatttttaaataaccctaaaattcataatgatgaaaccaaaattatttataaataaaatagttatttttggactagtacttattatattatttatttggatttttacttaacaagaaa

SEQ ID NO: 39548 - DNA, 2231 bp, Zea Mays
gagtcgtctagtgtcaggtgatctgaatctcattccggtggcttctgccaagtgctgaggatcggcatccggttcggttcgtcgtcctcgtccccactccccacctgcgcagctgcgctgcgccatctcgaatcctctccttccaccatctcgaacctctccttccgtctcctccccggccgattcttccagtctccagccaccttcaactgccggccgcaagtggccccgcgtctcacccctaaccccagtgaagaatctaggcgtcgtctatccagccccgtcatcatcaccatggaggaggtactccgctccatcctctcttgcttctcctcccgctcccgctcccgcacccgcactcaatccgtaagttttgctcaatcgattcgaatcgtctgccatgctttccggattgtgtaaggatttccctgtttggttacatcctgccaccgataagcactaacccgaccttggtgacggtatttctatttcgggaagatgcctgtgtagatgtattcggcgttcgctgccattcccaacctctgccaaccggaaccaacttggacaaaattgtctgcctctgcatatctattacaacttgttcgacatactagattacactccacatatttacgagtctgatatgcatgatgttcagatttcggttcacttgtcaaccatagagtctatcttgttcgccccatttcttgtgttgagaatgcacaagagggccaatttgatttcgttcctcctgctactactactgatgcagcatgggctgtggtccagcggggccagcgacaagaacaagtccatggttgagcagctgcagaggtacggggtcatcaggtcgaccaaagtcgcggaggtgatggaggccatcgacagggggttgttcgtgccacctgggggctcgccataccacgatagccccatgccgattgggtacaatgccaccatatcagcaccacacatgcatgcggcttgcctggagctactggagaagaatcttcagcctggaatgcgagctctcgatgttgggtcaggcactggatacctaactgcttgctttgcactgatggttggaccagaagggcgagcagttggtgtcgaacatatcccagagttggttgctacttctactgaaaacatcaagaaaagtgcagcagccccacatctaaatgatggatccctcagtatacacgtttctggtaaatattagcttgttttgtgctaccataaaactcagccatgctggagcagcaaatttccaacaggtccgatgctgacttaggtgtgcacataacaacttagttgctgtgagctgagttatagttcagatacattttaatagcacttatcctttttcttttattgactgaataaaggaacctgattcagctaatgaggttgtccaatactgctctactagcagggttttgttatattgcttgtcataccatgtggatctcccccatttgtgaggttcttgtcctcgtatgatgaaatttgctgcagctttagagcctgtttggttcgtggctaattgtgcacactttgcttaagtttagtcgtctaaattgaagaactaaccttagacagaaaagttagacaaaatgtggcaagttaggcagcaaaccaaacatacctttagtattccttagtttggcactctggccttatgtgcattcagcattgttggttgttctatatacccttaacacttgatgcaccaagagatgtttaaaatggatgcagatggcagggaaggttggccagaactggcaccctatgaagccatccatgttggagctgcagcaccgcagatccccgaggcgctgatcgagcagctgaagcccggcggcagaatggtgatccctgtcgggacagtcttccaggagctgaaggttgtggacaagaagttggatggcactgtcagcataagagacgaaacgtctgtgcgctatgtgccgctcactagcaaggacgcccagttgcacgcaagctgagtgatctatcatgtcaaaaaaatgttatcctcacctgacaaggtgaggcattcaatcgaatcgctacccttgtaaatgtattaatcctactgtctcagtaaatgcgctggcttggaaataaagtaaatgatggaacatcatggaacgtttgtttttcttcagctgccccggtgttcttactatgcaacttgtttcttcagagcaacagctgccattcaaaat

SEQ ID NO: 39549 - DNA, 960 bp, Zea Mays
gagtcgtctagtgtcaggtgatctgaatctcattccggtggcttctgccaagtgctgaggatcggcatccggttcggttcgtcgtcctcgtccccactccccacctgcgcagctgcgctgcgccatctcgaatcctctccttccaccatctcgaacctctccttccgtctcctccccggccgattcttccagtctccagccaccttcaactgccggccgcaagtggccccgcgtctcacccctaaccccagtgaagaatctaggcgtcgtctatccagccccgtcatcatcaccatggaggaggcactggatacctaactgcttgctttgcactgatggttggaccagaagggcgagcagttggtgtcgaacatatcccagagttggttgctacttctactgaaaacatcaagaaaagtgcagcagccccacatctaaatgatggatccctcagtatacacgtttctgatgtttaaaatggatgcagatggcagggaaggttggccagaactggcaccctatgaagccatccatgttggagctgcagcaccgcagatccccgaggcgctgatcgagcagctgaagcccggcggcagaatggtgatccctgtcgggacagtcttccaggagctgaaggttgtggacaagaagttggatggcactgtcagcataagagacgaaacgtctgtgcgctatgtgccgctcactagcaaggacgcccagttgcacgcaagctgagtgatctatcatgtcaaaaaaatgttatcctcacctgacaaggtgaggcattcaatcgaatcgctacccttgtaaatgtattaatcctactgtctcagtaaatgcgctggcttggaaataaagtaaatgatggaacatcatggaacgtttgtttttcttcagctgccccggtgttcttactatgcaacttgtttcttcagagcaacagctgccattcaaaat

SEQ ID NO: 39550 - DNA, 941 bp, Zea Mays
gagtcgtctagtgtcaggtgatctgaatctcattccggtggcttctgccaagtgctgaggatcggcatccggttcggttcgtcgtcctcgtccccactccccacctgcgcagctgcgctgcgccatctcgaatcctctccttccaccatctcgaacctctccttccgtctcctccccggccgattcttccagtctccagccaccttcaactgccggccgcaagtggccccgcgtctcacccctaaccccagtgaagaatctaggcgtcgtctatccagccccgtcatcatcaccatggaggaggcactggatacctaactgcttgctttgcactgatggttggaccagaagggcgagcagttggtgtcgaacatatcccagagttggttgctacttctactgaaaacatcaagaaaagtgcagcagccccacatctaaatgatggatccctcagtatacacgtttctgatggcagggaaggttggccagaactggcaccctatgaagccatccatgttggagctgcagcaccgcagatccccgaggcgctgatcgagcagctgaagcccggcggcagaatggtgatccctgtcgggacagtcttccaggagctgaaggttgtggacaagaagttggatggcactgtcagcataagagacgaaacgtctgtgcgctatgtgccgctcactagcaaggacgcccagttgcacgcaagctgagtgatctatcatgtcaaaaaaatgttatcctcacctgacaaggtgaggcattcaatcgaatcgctacccttgtaaatgtattaatcctactgtctcagtaaatgcgctggcttggaaataaagtaaatgatggaacatcatggaacgtttgtttttcttcagctgccccggtgttcttactatgcaacttgtttcttcagagcaacagctgccattcaaaat

SEQ ID NO: 39551 - DNA, 1215 bp, Zea Mays
gagtcgtctagtgtcaggtgatctgaatctcattccggtggcttctgccaagtgctgaggatcggcatccggttcggttcgtcgtcctcgtccccactccccacctgcgcagctgcgctgcgccatctcgaatcctctccttccaccatctcgaacctctccttccgtctcctccccggccgattcttccagtctccagccaccttcaactgccggccgcaagtggccccgcgtctcacccctaaccccagtgaagaatctaggcgtcgtctatccagccccgtcatcatcaccatggaggagcatgggctgtggtccagcggggccagcgacaagaacaagtccatggttgagcagctgcagaggtacggggtcatcaggtcgaccaaagtcgcggaggtgatggaggccatcgacagggggttgttcgtgccacctgggggctcgccataccacgatagccccatgccgattgggtacaatgccaccatatcagcaccacacatgcatgcggcttgcctggagctactggagaagaatcttcagcctggaatgcgagctctcgatgttgggtcaggcactggatacctaactgcttgctttgcactgatggttggaccagaagggcgagcagttggtgtcgaacatatcccagagttggttgctacttctactgaaaacatcaagaaaagtgcagcagccccacatctaaatgatggatccctcagtatacacgtttctgatggcagggaaggttggccagaactggcaccctatgaagccatccatgttggagctgcagcaccgcagatccccgaggcgctgatcgagcagctgaagcccggcggcagaatggtgatccctgtcgggacagtcttccaggagctgaaggttgtggacaagaagttggatggcactgtcagcataagagacgaaacgtctgtgcgctatgtgccgctcactagcaaggacgcccagttgcacgcaagctgagtgatctatcatgtcaaaaaaatgttatcctcacctgacaaggtgaggcattcaatcgaatcgctacccttgtaaatgtattaatcctactgtctcagtaaatgcgctggcttggaaataaagtaaatgatggaacatcatggaacgtttgtttttcttcagctgccccggtgttcttactatgcaacttgtttcttcagagcaacagctgccattcaaaat

SEQ ID NO: 39552 - DNA, 1762 bp, Zea Mays
gagtcgtctagtgtcaggtgatctgaatctcattccggtggcttctgccaagtgctgaggatcggcatccggttcggttcgtcgtcctcgtccccactccccacctgcgcagctgcgctgcgccatctcgaatcctctccttccaccatctcgaacctctccttccgtctcctccccggccgattcttccagtctccagccaccttcaactgccggccgcaagtggccccgcgtctcacccctaaccccagtgaagaatctaggcgtcgtctatccagccccgtcatcatcaccatggaggagcatgggctgtggtccagcggggccagcgacaagaacaagtccatggttgagcagctgcagaggtacggggtcatcaggtcgaccaaagtcgcggaggtgatggaggccatcgacagggggttgttcgtgccacctgggggctcgccataccacgatagccccatgccgattgggtacaatgccaccatatcagcaccacacatgcatgcggcttgcctggagctactggagaagaatcttcagcctggaatgcgagctctcgatgttgggtcaggcactggatacctaactgcttgctttgcactgatggttggaccagaagggcgagcagttggtgtcgaacatatcccagagttggttgctacttctactgaaaacatcaagaaaagtgcagcagccccacatctaaatgatggatccctcagtatacacgtttctggtaaatattagcttgttttgtgctaccataaaactcagccatgctggagcagcaaatttccaacaggtccgatgctgacttaggtgtgcacataacaacttagttgctgtgagctgagttatagttcagatacattttaatagcacttatcctttttcttttattgactgaataaaggaacctgattcagctaatgaggttgtccaatactgctctactagcagggttttgttatattgcttgtcataccatgtggatctcccccatttgtgaggttcttgtcctcgtatgatgaaatttgctgcagctttagagcctgtttggttcgtggctaattgtgcacactttgcttaagtttagtcgtctaaattgaagaactaaccttagacagaaaagttagacaaaatgtggcaagttaggcagcaaaccaaacatacctttagtattccttagtttggcactctggccttatgtgcattcagcattgttggttgttctatatacccttaacacttgatgcaccaagagatgtttaaaatggatgcagatggcagggaaggttggccagaactggcaccctatgaagccatccatgttggagctgcagcaccgcagatccccgaggcgctgatcgagcagctgaagcccggcggcagaatggtgatccctgtcgggacagtcttccaggagctgaaggttgtggacaagaagttggatggcactgtcagcataagagacgaaacgtctgtgcgctatgtgccgctcactagcaaggacgcccagttgcacgcaagctgagtgatctatcatgtcaaaaaaatgttatcctcacctgacaaggtgaggcattcaatcgaatcgctacccttgtaaatgtattaatcctactgtctcagtaaatgcgctggcttggaaataaagtaaatgatggaacatcatggaacgtttgtttttcttcagctgccccggtgttcttactatgcaacttgtttcttcagagcaacagctgccattcaaaat

SEQ ID NO: 39553 - DNA, 3916 bp, Zea Mays
aaaatttcagaaatttcggaatttcggttccaaaattgcgaaccctgaacttaaacttttgtttgaccaaatagagagcatcatcaaggagagagaagcgagactgcgagagcgccgagaggcagaagggctggggcgcggccgcgcggggaggcgtcaagcagtttagcagccatgagcggcggcgggctggaagtgcaggttcacgtggtgggcggcgcccggagctgctttgccgcgctcccgcttcacctcatccacgacttggagcgcacctcagccaccggcgacctcccgcccgtcctcgcgctcgaacttcgcggtcccgccggcgcccgctggtccctcgcctggtccggcgccgcttcccgatccagcgccatcgaggttgcacaagagttggcagactgcatctcgctgcctgatggaactatagcacagttgagcgtagctcgttctctggccaaagctgactcgatcagtattgaaccctacagtgaggatgactgggagatactggagagccgtgctgatttggctgaagaaacaatcttgaagcaggttggcatcgtttatgagggcatgaaattcccattgtggttggatggacataatattgtgaagtttgttgtcttgtcatctttccctgagaagacagttgttcaacttgtaccaggcactgaagttgttgttgcacctaaaaaacgaaaagagaagccttctcaggatctacaaaagcaaagtgcactgaaagaacaagtcaaaataaaggcactcctgcgtgttcaagcagctgataggaagtatgcacatacattcaaatatgaaggtgtcgagataggtgtggttgtcagctatgctgtgctaattcatcctgatacagctgcaagtatttcagttggcaatctccaattagtcgctgtttcacctaaatcatcaaagaaaggactacctctaaaaggcaaagaagttggacgaaaaaaaggaatttcagtaactaaagaaaggtcccatgaagccattgtttatatcttactttcagactctgttgcaaaagggcatgttatgcttccgtactctattcgtcacttcataagtgctgatgtacattcatgggtatatattaagacatattcagccaacatcaaggaggatgaacctctagtgacaatatctcctttaaagttcaagatgcatgtgaaagatgctcatgatagcagtaaattagtcagtcaggaagtggacacttcgaggataaccagaattccttcagaaaatggtgatttcttccagaaagctcgttacagtgaaaacaaaaatattcgaggtgcagatattgagagcatttctgaatcagtgtcaaggcagaaattttttattaagcattggcttattgggcaccttaaagaaatgggcttgcatgctagccatactgagatgaattcaatagtcttgccaaccaatattttgctccatttggaagcgacagataaagaaggaaccaaaggagttgaattcttatactttctaaagcttacatctgaaaattctaatttcaacgattcacaacttaatattgagactacttggagtgttccaaccagcaatgctgatgatcttgaactgcattttgggaagttcgagcttggcgagcctgtatcttttgattccctagtggacagtggttccagtgatggtttcaagctgactcggtcttctttaggctggatggagaatgcaatgtcagatgtgacaaaaaggttatctgtgctcttatcagcaactagcctaaggttatttaacagaataaagttcccctttcctggacatgttattgtatatggacctcgaggttctggcaaaactgctttgaccagggcttctgcaaaatactttgaggaccataaagatatcttggcgcacataatatacattgattgttccaaacttgcacttggcaaggctaaggagacaaggcaagaaattgaagacagcatgtctgaagcactgcttcattcaccttcgatcatcatatttgatgatctggacagtgtagtttcagtctcctcagatcctcaagtgtctcaatcatccagttcttctgattcacttgttcaatatttggctgacattatggatgagtacaaggataagattcaaaatacatgcgggtatggacctatcgcgtttatggcttcagttcagtcacttcagagtcttcctcaagacttaacctcttctggaagatttgatttccatattgagctttctgctcttgcagtacctgagcgcaaagcactattgcaacatcaagttgaggagcatgatttattgtgttctgaggaagttctgtcagagatagcatcaaaatgtgaaggttatgatgcatatgacttggaaattttggttgatagggctgtgcacactgctgcttatcgctttcttctgccttctaatgcttgtcacaactctctgaaacgaactttgttgatggaagatttctttaaagcaatgcatggcttccttccagtcgccatgcgtgatcttaggaaatatgctcctgatgataaagatggtggttgggaggatgttggagggctagatgaagcagtaactatcattaaagagactcttgaattgccgtcaaaatacccaaatatctttaccagggcacctgtgcggttgcggtcaaacattctcctgtatggaccacctggatgtggtaaaactcacattgtgagagctgcggctgctgcttgttctttgcgattcatttcagtcaagggtccagagctattgaataagtatattggttcatctgagcaatctgttcgcgacttttttgcaaaggccgttgctgcagcaccttgcctattattctttgatgaatttgactccattgcaccccagcgaggaactcatagtgcaggagtttctgatcgtgtagttaatcagttcttgacggaactggatggtgtggaaaccttaactggagtattcgtatttgcagctacgaggtttcactggcaagtgatgccagtctcgaagatgttgcttctctgaccgaaggatttactggtgctgatctcgctgctattctaacggatgctggactagctgcaattcatgaacttttggacaaccaggagaacggtgttccagaaaccgaaccgtgcatcagcaaagaacttctcatgtccgtcactaggaaggcaagaccttccacaccagcagacgagaagatgcggtatgatagggagtttggtgaattcgtgtcatccaggaagtctatttcgacaaaggcaagagagtcaaaaggcaaaaaggttacactagcttgagcctttccttggccaatattaatgcgctgcaaaatttggacagtggcctacatgaaggctgctaacacgcggacttgtcaagtcatgcgacgtaggcttcctttcatttgaagagaaacaaaatctacaaagaaacctaaccaaggctcacttgtgttagtgtacttggatggaggaggaaggccattggagggacctgcaggtggtcaaaggtgtcatagtaggaaattttgtacggtaatcctgctgtaattaaagttataacacttgtcacaaattttgtacggtggtgaacggtaggaaatctatactacttattaagaagagaaaaccggtaatcctgctgtaatgaaagttatggtgaatgatccgcttcttaacgtgcagcggtcgtcttggatagatcagatgtgttcgcctgcttcgtggggggctctagccacgggatagatcattgtttgcaaggagagggtgttttttttttggagatgcaaagagagggtgtagatttggttctatgggcaataaaggactgtttagttcagctatagatttttagaattctgattttagct

SEQ ID NO: 39554 - DNA, 3819 bp, Zea Mays
gcatcatcaaggagagagaagcgagactgcgagagcgccgagaggcagaagggctggggcgcggccgcgcggggaggcgtcaagcagtttagcagccatgagcggcggcgggctggaagtgcaggttcacgtggtgggcggcgcccggagctgctttgccgcgctcccgcttcacctcatccacgacttggagcgcacctcagccaccggcgacctcccgcccgtcctcgcgctcgaacttcgcggtcccgccggcgcccgctggtccctcgcctggtccggcgccgcttcccgatccagcgccatcgaggttgcacaagagttggcagactgcatctcgctgcctgatggaactatagcacagttgagcgtagctcgttctctggccaaagctgactcgatcagtattgaaccctacagtgaggatgactgggagatactggagagccgtgctgatttggctgaagaaacaatcttgaagcaggttggcatcgtttatgagggcatgaaattcccattgtggttggatggacataatattgtgaagtttgttgtcttgtcatctttccctgagaagacagttgttcaacttgtaccaggcactgaagttgttgttgcacctaaaaaacgaaaagagaagccttctcaggatctacaaaagcaaagtgcactgaaagaacaagtcaaaataaaggcactcctgcgtgttcaagcagctgataggaagtatgcacatacattcaaatatgaaggtgtcgagataggtgtggttgtcagctatgctgtgctaattcatcctgatacagctgcaagtatttcagttggcaatctccaattagtcgctgtttcacctaaatcatcaaagaaaggactacctctaaaaggcaaagaagttggacgaaaaaaaggaatttcagtaactaaagaaaggtcccatgaagccattgtttatatcttactttcagactctgttgcaaaagggcatgttatgcttccgtactctattcgtcacttcataagtgctgatgtacattcatgggtatatattaagacatattcagccaacatcaaggaggatgaacctctagtgacaatatctcctttaaagttcaagatgcatgtgaaagatgctcatgatagcagtaaattagtcagtcaggaagtggacacttcgaggataaccagaattccttcagaaaatggtgatttcttccagaaagctcgttacagtgaaaacaaaaatattcgaggtgcagatattgagagcatttctgaatcagtgtcaaggcagaaattttttattaagcattggcttattgggcaccttaaagaaatgggcttgcatgctagccatactgagatgaattcaatagtcttgccaaccaatattttgctccatttggaagcgacagataaagaaggaaccaaaggagttgaattcttatactttctaaagcttacatctgaaaattctaatttcaacgattcacaacttaatattgagactacttggagtgttccaaccagcaatgctgatgatcttgaactgcattttgggaagttcgagcttggcgagcctgtatcttttgattccctagtggacagtggttccagtgatggtttcaagctgactcggtcttctttaggctggatggagaatgcaatgtcagatgtgacaaaaaggttatctgtgctcttatcagcaactagcctaaggttatttaacagaataaagttcccctttcctggacatgttattgtatatggacctcgaggttctggcaaaactgctttgaccagggcttctgcaaaatactttgaggaccataaagatatcttggcgcacataatatacattgattgttccaaacttgcacttggcaaggctaaggagacaaggcaagaaattgaagacagcatgtctgaagcactgcttcattcaccttcgatcatcatatttgatgatctggacagtgtagtttcagtctcctcagatcctcaagtgtctcaatcatccagttcttctgattcacttgttcaatatttggctgacattatggatgagtacaaggataagattcaaaatacatgcgggtatggacctatcgcgtttatggcttcagttcagtcacttcagagtcttcctcaagacttaacctcttctggaagatttgatttccatattgagctttctgctcttgcagtacctgagcgcaaagcactattgcaacatcaagttgaggagcatgatttattgtgttctgaggaagttctgtcagagatagcatcaaaatgtgaaggaaattttggttgatagggctgtgcacactgctgcttatcgctttcttctgccttctaatgcttgtcacaactctctgaaacgaactttgttgatggaagatttctttaaagcaatgcatggcttccttccagtcgccatgcgtgatcttaggaaatatgctcctgatgataaagatggtggttgggaggatgttggagggctagatgaagcagtaactatcattaaagagactcttgaattgccgtcaaaatacccaaatatctttaccagggcacctgtgcggttgcggtcaaacattctcctgtatggaccacctggatgtggtaaaactcacattgtgagagctgcggctgctgcttgttctttgcgattcatttcagtcaagggtccagagctattgaataagtatattggttcatctgagcaatctgttcgcgacttttttgcaaaggccgttgctgcagcaccttgcctattattctttgatgaatttgactccattgcaccccagcgaggaactcatagtgcaggagtttctgatcgtgtagttaatcagttcttgacggaactggatggtgtggaaaccttaactggagtattcgtatttgcagctacgaggtttcactggcaagtgatgccagtctcgaagatgttgcttctctgaccgaaggatttactggtgctgatctcgctgctattctaacggatgctggactagctgcaattcatgaacttttggacaaccaggagaacggtgttccagaaaccgaaccgtgcatcagcaaagaacttctcatgtccgtcactaggaaggcaagaccttccacaccagcagacgagaagatgcggtatgatagggagtttggtgaattcgtgtcatccaggaagtctatttcgacaaaggcaagagagtcaaaaggcaaaaaggttacactagcttgagcctttccttggccaatattaatgcgctgcaaaatttggacagtggcctacatgaaggctgctaacacgcggacttgtcaagtcatgcgacgtaggcttcctttcatttgaagagaaacaaaatctacaaagaaacctaaccaaggctcacttgtgttagtgtacttggatggaggaggaaggccattggagggacctgcaggtggtcaaaggtgtcatagtaggaaattttgtacggtaatcctgctgtaattaaagttataacacttgtcacaaattttgtacggtggtgaacggtaggaaatctatactacttattaagaagagaaaaccggtaatcctgctgtaatgaaagttatggtgaatgatccgcttcttaacgtgcagcggtcgtcttggatagatcagatgtgttcgcctgcttcgtggggggctctagccacgggatagatcattgtttgcaaggagagggtgttttttttttggagatgcaaagagagggtgtagatttggttctatgggcaataaaggactgtttagttcagctatagatttttagaattctgattttagct

SEQ ID NO: 39555 - DNA, 4884 bp, Zea Mays
agaggcagaagggctggggcgcggccgcgcggggaggcgtcaagcagtttagcagccatgagcggcggcgggctggaagtgcaggttcacgtggtgggcggcgcccggagctgctttgccgcgctcccgcttcacctcatccacgacttggagcgcacctcagccaccggcgacctcccgcccgtcctcgcgctcgaacttcgcggtcccgccggcgcccgctggtccctcgcctggtccggcgccgcttcccgatccagcgccatcgaggttgcacaagagttggcagactgcatctcgctgcctgatggaactatagcacagttgagcgtagctcgttctctggccaaagctgactcgatcagtattgaaccctacagtgaggatgactgggagatactggagagccgtgctgatttggctgaagaaacaatcttgaagcaggttggcatcgtttatgagggcatgaaattcccattgtggttggatggacataatattgtgaagtttgttgtcttgtcatctttccctgagaagacagttggtatatatatacacatatatattttggcatcattgtgctaacttatacaacttgtgttatcaccattattttatgttcttttcaatatccttttacatattataccgctcaagggtgatgtatttgttcatctttctatatgacactaagtttgcatgaattcattttgaaataggttactgacacttgttaataagtaattgtgctgtaatcatggtagaaagcaaatattgtctacttgaccaaatacagtaactcgttagcttctgagttaagcttccagaagacattcttgattcacctgtacaaatttattctgtccattttcctgtctactttggaatttggcactagatgatcatggattctacaatatcctaaaactaataacctatagcacctaacttggggatacccatctacatcataattcatgctgggtgcctaatggaattattgtctttaatgtttatattaacttctgccaaacatgttatatagcctaacatatcttactagtttgtagcagctacatttttccaaagttagatacatagatatatatttaaaaagtccaggttatttacatcttatcccttctaataaaatgtttcagaatttaatgtatgaatatcaattctgatacatttatattgtctgctgagtagtactataagtaatgtacaccttatgaaggaagctaaagaatttttttttaaaaaaaaactgtggcatcggatgagttgttccagcattctatataatagtatgtaatgttattaatcacatagtatgtaatctgttcaatattgttccttttttttaatttgttaagtttatctattgcttaggatccactgtgtttttctttctttagttcaacttgtaccaggcactgaagttgttgttgcacctaaaaaacgaaaagagaagccttctcaggatctacaaaagcaaagtgcactgaaagaacaagtcaaaataaaggcactcctgcgtgttcaagcagctgataggaagtatgcacatacattcaaatatgaaggtgtcgagataggtgtggttgtcagctatgctgtgctaattcatcctgatacagctgcaagtatttcagttggcaatctccaattagtcgctgtttcacctaaatcatcaaagaaaggactacctctaaaaggcaaagaagttggacgaaaaaaaggaatttcagtaactaaagaaaggtcccatgaagccattgtttatatcttactttcagactctgttgcaaaagggcatgttatgcttccgtactctattcgtcacttcataagtgctgatgtacattcatgggtatatattaagacatattcagccaacatcaaggaggatgaacctctagtgacaatatctcctttaaagttcaagatgcatgtgaaagatgctcatgatagcagtaaattagtcagtcaggaagtggacacttcgaggataaccagaattccttcagaaaatggtgatttcttccagaaagctcgttacagtgaaaacaaaaatattcgaggtgcagatattgagagcatttctgaatcagtgtcaaggcagaaattttttattaagcattggcttattgggcaccttaaagaaatgggcttgcatgctagccatactgagatgaattcaatagtcttgccaaccaatattttgctccatttggaagcgacagataaagaaggaaccaaaggagttgaattcttatactttctaaagcttacatctgaaaattctaatttcaacgattcacaacttaatattgagactacttggagtgttccaaccagcaatgctgatgatcttgaactgcattttgggaagttcgagcttggcgagcctgtatcttttgattccctagtggacagtggttccagtgatggtttcaagctgactcggtcttctttaggctggatggagaatgcaatgtcagatgtgacaaaaaggttatctgtgctcttatcagcaactagcctaaggttatttaacagaataaagttcccctttcctggacatgttattgtatatggacctcgaggttctggcaaaactgctttgaccagggcttctgcaaaatactttgaggaccataaagatatcttggcgcacataatatacattgattgttccaaacttgcacttggcaaggctaaggagacaaggcaagaaattgaagacagcatgtctgaagcactgcttcattcaccttcgatcatcatatttgatgatctggacagtgtagtttcagtctcctcagatcctcaagtgtctcaatcatccagttcttctgattcacttgttcaatatttggctgacattatggatgagtacaaggataagattcaaaatacatgcgggtatggacctatcgcgtttatggcttcagttcagtcacttcagagtcttcctcaagacttaacctcttctggttacttctttttttctatttttcttcaaagtgtgctggttgagtcactgacttcaagtatgctaataaaaacacgttttcaccttgcaggaagatttgatttccatattgagctttctgctcttgcagtacctgagcgcaaagcactattgcaacatcaagttgaggagcatgatttattgtgttctgaggaagttctgtcagagatagcatcaaaatgtgaaggttatgatgcatatgacttggaaattttggttgatagggctgtgcacactgctgcttatcgctttcttctgccttctaatgcttgtcacaactctctgaaacgaactttgttgatggaagatttctttaaagcaatgcatggcttccttccagtcgccatgcgtgatcttaggaaatatgctcctgatgataaagatggtggttgggaggatgttggagggctagatgaagcagtaactatcattaaagagactcttgaattgccgtcaaaatacccaaatatctttaccagggcacctgtgcggttgcggtcaaacattctcctgtatggaccacctggatgtggtaaaactcacattgtgagagctgcggctgctgcttgttctttgcgattcatttcagtcaagggtccagagctattgaataagtatattggttcatctgagcaatctgttcgcgacttttttgcaaaggccgttgctgcagcaccttgcctattattctttgatgaatttgactccattgcaccccagcgaggaactcatagtgcaggagtttctgatcgtgtagttaatcagttcttgacggaactggatggtgtggaaaccttaactggagtattcgtatttgcagctacgagcaagccacagctaatcgatgctgcgctcttgcgacctggaaggtttgatcgtctagtcttttgtgatttccctcgatgggatgaacgtttagaaattctgaaggtgcattctaggacggtttcactggcaagtgatgccagtctcgaagatgttgcttctctgaccgaaggatttactggtgctgatctcgctgctattctaacggatgctggactagctgcaattcatgaacttttggacaaccaggagaacggtgttccagaaaccgaaccgtgcatcagcaaagaacttctcatgtccgtcactaggaaggcaagaccttccacaccagcagacgagaagatgcggtatgatagggagtttggtgaattcgtgtcatccaggaagtctatttcgacaaaggcaagagagtcaaaaggcaaaaaggttacactagcttgagcctttccttggccaatattaatgcgctgcaaaatttggacagtggcctacatgaaggctgctaacacgcggacttgtcaagtcatgcgacgtaggcttcctttcatttgaagagaaacaaaatctacaaagaaacctaaccaaggctcacttgtgttagtgtacttggatggaggaggaaggccattggagggacctgcaggtggtcaaaggtgtcatagtaggaaattttgtacggtaatcctgctgtaattaaagttataacacttgtcacaaattttgtacggtggtgaacggtaggaaatctatactacttattaagaagagaaaaccggtaatcctgctgtaatgaaagttatggtgaatgatccgcttcttaacgtgcagcggtcgtcttggatagatcagatgtgttcgcctgcttcgtggggggctctagccacgggatagatcattgtttgcaaggagagggtgttttttttttggagatgcaaagagagggtgtagatttggttctatgggcaataaaggactgtttagttcagctatagatttttagaattctgattttagct

SEQ ID NO: 39556 - DNA, 4676 bp, Zea Mays
agaggcagaagggctggggcgcggccgcgcggggaggcgtcaagcagtttagcagccatgagcggcggcgggctggaagtgcaggttcacgtggtgggcggcgcccggagctgctttgccgcgctcccgcttcacctcatccacgacttggagcgcacctcagccaccggcgacctcccgcccgtcctcgcgctcgaacttcgcggtcccgccggcgcccgctggtccctcgcctggtccggcgccgcttcccgatccagcgccatcgaggttgcacaagagttggcagactgcatctcgctgcctgatggaactatagcacagttgagcgtagctcgttctctggccaaagctgactcgatcagtattgaaccctacagtgaggatgactgggagatactggagagccgtgctgatttggctgaagaaacaatcttgaagcaggttggcatcgtttatgagggcatgaaattcccattgtggttggatggacataatattgtgaagtttgttgtcttgtcatctttccctgagaagacagttggtatatatatacacatatatattttggcatcattgtgctaacttatacaacttgtgttatcaccattattttatgttcttttcaatatccttttacatattataccgctcaagggtgatgtatttgttcatctttctatatgacactaagtttgcatgaattcattttgaaataggttactgacacttgttaataagtaattgtgctgtaatcatggtagaaagcaaatattgtctacttgaccaaatacagtaactcgttagcttctgagttaagcttccagaagacattcttgattcacctgtacaaatttattctgtccattttcctgtctactttggaatttggcactagatgatcatggattctacaatatcctaaaactaataacctatagcacctaacttggggatacccatctacatcataattcatgctgggtgcctaatggaattattgtctttaatgtttatattaacttctgccaaacatgttatatagcctaacatatcttactagtttgtagcagctacatttttccaaagttagatacatagatatatatttaaaaagtccaggttatttacatcttatcccttctaataaaatgtttcagaatttaatgtatgaatatcaattctgatacatttatattgtctgctgagtagtactataagtaatgtacaccttatgaaggaagctaaagaatttttttttaaaaaaaaactgtggcatcggatgagttgttccagcattctatataatagtatgtaatgttattaatcacatagtatgtaatctgttcaatattgttccttttttttaatttgttaagtttatctattgcttaggatccactgtgtttttctttctttagttcaacttgtaccaggcactgaagttgttgttgcacctaaaaaacgaaaagagaagccttctcaggatctacaaaagcaaagtgcactgaaagaacaagtcaaaataaaggcactcctgcgtgttcaagcagctgataggaagtatgcacatacattcaaatatgaaggtgtcgagataggtgtggttgtcagctatgctgtgctaattcatcctgatacagctgcaagtatttcagttggcaatctccaattagtcgctgtttcacctaaatcatcaaagaaaggactacctctaaaaggcaaagaagttggacgaaaaaaaggaatttcagtaactaaagaaaggtcccatgaagccattgtttatatcttactttcagactctgttgcaaaagggcatgttatgcttccgtactctattcgtcacttcataagtgctgatgtacattcatgggtatatattaagacatattcagccaacatcaaggaggatgaacctctagtgacaatatctcctttaaagttcaagatgcatgtgaaagatgctcatgatagcagtaaattagtcagtcaggaagtggacacttcgaggataaccagaattccttcagaaaatggtgatttcttccagaaagctcgttacagtgaaaacaaaaatattcgaggtgcagatattgagagcatttctgaatcagtgtcaaggcagaaattttttattaagcattggcttattgggcaccttaaagaaatgggcttgcatgctagccatactgagatgaattcaatagtcttgccaaccaatattttgctccatttggaagcgacagataaagaaggaaccaaaggagttgaattcttatactttctaaagcttacatctgaaaattctaatttcaacgattcacaacttaatattgagactacttggagtgttccaaccagcaatgctgatgatcttgaactgcattttgggaagttcgagcttggcgagcctgtatcttttgattccctagtggacagtggttccagtgatggtttcaagctgactcggtcttctttaggctggatggagaatgcaatgtcagatgtgacaaaaaggttatctgtgctcttatcagcaactagcctaaggttatttaacagaataaagttcccctttcctggacatgttattgtatatggacctcgaggttctggcaaaactgctttgaccagggcttctgcaaaatactttgaggaccataaagatatcttggcgcacataatatacattgattgttccaaacttgcacttggcaaggctaaggagacaaggcaagaaattgaagacagcatgtctgaagcactgcttcattcaccttcgatcatcatatttgatgatctggacagtgtagtttcagtctcctcagatcctcaagtgtctcaatcatccagttcttctgattcacttgttcaatatttggctgacattatggatgagtacaaggataagattcaaaatacatgcgggtatggacctatcgcgtttatggcttcagttcagtcacttcagagtcttcctcaagacttaacctcttctggaagatttgatttccatattgagctttctgctcttgcagtacctgagcgcaaagcactattgcaacatcaagttgaggagcatgatttattgtgttctgaggaagttctgtcagagatagcatcaaaatgtgaaggttatgatgcatatgacttggaaattttggttgatagggctgtgcacactgctgcttatcgctttcttctgccttctaatgcttgtcacaactctctgaaacgaactttgttgatggaagatttctttaaagcaatgcatggcttccttccagtcgccatgcgtgatcttaggaaatatgctcctgatgataaagatggtggttgggaggatgttggagggctagatgaagcagtaactatcattaaagagactcttgaattgccgtcaaaatacccaaatatctttaccagggcacctgtgcggttgcggtcaaacattctcctgtatggaccacctggatgtggtaaaactcacattgtgagagctgcggctgctgcttgttctttgcgattcatttcagtcaagggtccagagctattgaataagtatattggttcatctgagcaatctgttcgcgacttttttgcaaaggccgttgctgcagcaccttgcctattattctttgatgaatttgactccattgcaccccagcgaggaactcatagtgcaggagtttctgatcgtgtagttaatcagttcttgacggaactggatggtgtggaaaccttaactggagtattcgtatttgcagctacgaggtttcactggcaagtgatgccagtctcgaagatgttgcttctctgaccgaaggatttactggtgctgatctcgctgctattctaacggatgctggactagctgcaattcatgaacttttggacaaccaggagaacggtgttccagaaaccgaaccgtgcatcagcaaagaacttctcatgtccgtcactaggaaggcaagaccttccacaccagcagacgagaagatgcggtatgatagggagtttggtgaattcgtgtcatccaggaagtctatttcgacaaaggcaagagagtcaaaaggcaaaaaggttacactagcttgagcctttccttggccaatattaatgcgctgcaaaatttggacagtggcctacatgaaggctgctaacacgcggacttgtcaagtcatgcgacgtaggcttcctttcatttgaagagaaacaaaatctacaaagaaacctaaccaaggctcacttgtgttagtgtacttggatggaggaggaaggccattggagggacctgcaggtggtcaaaggtgtcatagtaggaaattttgtacggtaatcctgctgtaattaaagttataacacttgtcacaaattttgtacggtggtgaacggtaggaaatctatactacttattaagaagagaaaaccggtaatcctgctgtaatgaaagttatggtgaatgatccgcttcttaacgtgcagcggtcgtcttggatagatcagatgtgttcgcctgcttcgtggggggctctagccacgggatagatcattgtttgcaaggagagggtgttttttttttggagatgcaaagagagggtgtagatttggttctatgggcaataaaggactgtttagttcagctatagatttttagaattctgattttagct

SEQ ID NO: 39557 - DNA, 4614 bp, Zea Mays
agaggcagaagggctggggcgcggccgcgcggggaggcgtcaagcagtttagcagccatgagcggcggcgggctggaagtgcaggttcacgtggtgggcggcgcccggagctgctttgccgcgctcccgcttcacctcatccacgacttggagcgcacctcagccaccggcgacctcccgcccgtcctcgcgctcgaacttcgcggtcccgccggcgcccgctggtccctcgcctggtccggcgccgcttcccgatccagcgccatcgaggttgcacaagagttggcagactgcatctcgctgcctgatggaactatagcacagttgagcgtagctcgttctctggccaaagctgactcgatcagtattgaaccctacagtgaggatgactgggagatactggagagccgtgctgatttggctgaagaaacaatcttgaagcaggttggcatcgtttatgagggcatgaaattcccattgtggttggatggacataatattgtgaagtttgttgtcttgtcatctttccctgagaagacagttggtatatatatacacatatatattttggcatcattgtgctaacttatacaacttgtgttatcaccattattttatgttcttttcaatatccttttacatattataccgctcaagggtgatgtatttgttcatctttctatatgacactaagtttgcatgaattcattttgaaataggttactgacacttgttaataagtaattgtgctgtaatcatggtagaaagcaaatattgtctacttgaccaaatacagtaactcgttagcttctgagttaagcttccagaagacattcttgattcacctgtacaaatttattctgtccattttcctgtctactttggaatttggcactagatgatcatggattctacaatatcctaaaactaataacctatagcacctaacttggggatacccatctacatcataattcatgctgggtgcctaatggaattattgtctttaatgtttatattaacttctgccaaacatgttatatagcctaacatatcttactagtttgtagcagctacatttttccaaagttagatacatagatatatatttaaaaagtccaggttatttacatcttatcccttctaataaaatgtttcagaatttaatgtatgaatatcaattctgatacatttatattgtctgctgagtagtactataagtaatgtacaccttatgaaggaagctaaagaatttttttttaaaaaaaaactgtggcatcggatgagttgttccagcattctatataatagtatgtaatgttattaatcacatagtatgtaatctgttcaatattgttccttttttttaatttgttaagtttatctattgcttaggatccactgtgtttttctttctttagttcaacttgtaccaggcactgaagttgttgttgcacctaaaaaacgaaaagagaagccttctcaggatctacaaaagcaaagtgcactgaaagaacaagtcaaaataaaggcactcctgcgtgttcaagcagctgataggaagtatgcacatacattcaaatatgaaggtgtcgagataggtgtggttgtcagctatgctgtgctaattcatcctgatacagctgcaagtatttcagttggcaatctccaattagtcgctgtttcacctaaatcatcaaagaaaggactacctctaaaaggcaaagaagttggacgaaaaaaaggaatttcagtaactaaagaaaggtcccatgaagccattgtttatatcttactttcagactctgttgcaaaagggcatgttatgcttccgtactctattcgtcacttcataagtgctgatgtacattcatgggtatatattaagacatattcagccaacatcaaggaggatgaacctctagtgacaatatctcctttaaagttcaagatgcatgtgaaagatgctcatgatagcagtaaattagtcagtcaggaagtggacacttcgaggataaccagaattccttcagaaaatggtgatttcttccagaaagctcgttacagtgaaaacaaaaatattcgaggtgcagatattgagagcatttctgaatcagtgtcaaggcagaaattttttattaagcattggcttattgggcaccttaaagaaatgggcttgcatgctagccatactgagatgaattcaatagtcttgccaaccaatattttgctccatttggaagcgacagataaagaaggaaccaaaggagttgaattcttatactttctaaagcttacatctgaaaattctaatttcaacgattcacaacttaatattgagactacttggagtgttccaaccagcaatgctgatgatcttgaactgcattttgggaagttcgagcttggcgagcctgtatcttttgattccctagtggacagtggttccagtgatggtttcaagctgactcggtcttctttaggctggatggagaatgcaatgtcagatgtgacaaaaaggttatctgtgctcttatcagcaactagcctaaggttatttaacagaataaagttcccctttcctggacatgttattgtatatggacctcgaggttctggcaaaactgctttgaccagggcttctgcaaaatactttgaggaccataaagatatcttggcgcacataatatacattgattgttccaaacttgcacttggcaaggctaaggagacaaggcaagaaattgaagacagcatgtctgaagcactgcttcattcaccttcgatcatcatatttgatgatctggacagtgtagtttcagtctcctcagatcctcaagtgtctcaatcatccagttcttctgattcacttgttcaatatttggctgacattatggatgagtacaaggataagattcaaaatacatgcgggtatggacctatcgcgtttatggcttcagttcagtcacttcagagtcttcctcaagacttaacctcttctggaagatttgatttccatattgagctttctgctcttgcagtacctgagcgcaaagcactattgcaacatcaagttgaggagcatgatttattgtgttctgaggaagttctgtcagagatagcatcaaaatgtgaaggttatgatgcatatgacttggaaattttggttgatagggctgtgcacactgctgcttatcgctttcttctgccttctaatgcttgtcacaactctctgaaacgaactttgttgatggaagatttctttaaagcaatgcatggcttccttccagtcgccatgcgtgatcttaggaaatatgctcctgatgataaagatggtggttgggaggatgttggagggctagatgaagcagtaactatcattaaagagactcttgaattgccgtcaaaatacccaaatatctttaccagggcacctgtgcggttgcggtcaaacattctcctgtatggaccacctggatgtggtaaaactcacattgtgagagctgcggctgctgcttgttctttgcgattcatttcagtcaagggtccagagctattgaataagtatattggttcatctgagcaatctgttcgcgacttttttgcaaaggccgttgctgcagcaccttgcctattattctttgatgaatttgactccattgcaccccagcgaggaactcatagtgcaggagtttctgatcgtgtagttaatcaggtttcactggcaagtgatgccagtctcgaagatgttgcttctctgaccgaaggatttactggtgctgatctcgctgctattctaacggatgctggactagctgcaattcatgaacttttggacaaccaggagaacggtgttccagaaaccgaaccgtgcatcagcaaagaacttctcatgtccgtcactaggaaggcaagaccttccacaccagcagacgagaagatgcggtatgatagggagtttggtgaattcgtgtcatccaggaagtctatttcgacaaaggcaagagagtcaaaaggcaaaaaggttacactagcttgagcctttccttggccaatattaatgcgctgcaaaatttggacagtggcctacatgaaggctgctaacacgcggacttgtcaagtcatgcgacgtaggcttcctttcatttgaagagaaacaaaatctacaaagaaacctaaccaaggctcacttgtgttagtgtacttggatggaggaggaaggccattggagggacctgcaggtggtcaaaggtgtcatagtaggaaattttgtacggtaatcctgctgtaattaaagttataacacttgtcacaaattttgtacggtggtgaacggtaggaaatctatactacttattaagaagagaaaaccggtaatcctgctgtaatgaaagttatggtgaatgatccgcttcttaacgtgcagcggtcgtcttggatagatcagatgtgttcgcctgcttcgtggggggctctagccacgggatagatcattgtttgcaaggagagggtgttttttttttggagatgcaaagagagggtgtagatttggttctatgggcaataaaggactgtttagttcagctatagatttttagaattctgattttagct

SEQ ID NO: 39558 - DNA, 3758 bp, Zea Mays
agaggcagaagggctggggcgcggccgcgcggggaggcgtcaagcagtttagcagccatgagcggcggcgggctggaagtgcaggttcacgtggtgggcggcgcccggagctgctttgccgcgctcccgcttcacctcatccacgacttggagcgcacctcagccaccggcgacctcccgcccgtcctcgcgctcgaacttcgcggtcccgccggcgcccgctggtccctcgcctggtccggcgccgcttcccgatccagcgccatcgaggttgcacaagagttggcagactgcatctcgctgcctgatggaactatagcacagttgagcgtagctcgttctctggccaaagctgactcgatcagtattgaaccctacagtgaggatgactgggagatactggagagccgtgctgatttggctgaagaaacaatcttgaagcaggttggcatcgtttatgagggcatgaaattcccattgtggttggatggacataatattgtgaagtttgttgtcttgtcatctttccctgagaagacagttgttcaacttgtaccaggcactgaagttgttgttgcacctaaaaaacgaaaagagaagccttctcaggatctacaaaagcaaagtgcactgaaagaacaagtcaaaataaaggcactcctgcgtgttcaagcagctgataggaagtatgcacatacattcaaatatgaaggtgtcgagataggtgtggttgtcagctatgctgtgctaattcatcctgatacagctgcaagtatttcagttggcaatctccaattagtcgctgtttcacctaaatcatcaaagaaaggactacctctaaaaggcaaagaagttggacgaaaaaaaggaatttcagtaactaaagaaaggtcccatgaagccattgtttatatcttactttcagactctgttgcaaaagggcatgttatgcttccgtactctattcgtcacttcataagtgctgatgtacattcatgggtatatattaagacatattcagccaacatcaaggaggatgaacctctagtgacaatatctcctttaaagttcaagatgcatgtgaaagatgctcatgatagcagtaaattagtcagtcaggaagtggacacttcgaggataaccagaattccttcagaaaatggtgatttcttccagaaagctcgttacagtgaaaacaaaaatattcgaggtgcagatattgagagcatttctgaatcagtgtcaaggcagaaattttttattaagcattggcttattgggcaccttaaagaaatgggcttgcatgctagccatactgagatgaattcaatagtcttgccaaccaatattttgctccatttggaagcgacagataaagaaggaaccaaaggagttgaattcttatactttctaaagcttacatctgaaaattctaatttcaacgattcacaacttaatattgagactacttggagtgttccaaccagcaatgctgatgatcttgaactgcattttgggaagttcgagcttggcgagcctgtatcttttgattccctagtggacagtggttccagtgatggtttcaagctgactcggtcttctttaggctggatggagaatgcaatgtcagatgtgacaaaaaggttatctgtgctcttatcagcaactagcctaaggttatttaacagaataaagttcccctttcctggacatgttattgtatatggacctcgaggttctggcaaaactgctttgaccagggcttctgcaaaatactttgaggaccataaagatatcttggcgcacataatatacattgattgttccaaacttgcacttggcaaggctaaggagacaaggcaagaaattgaagacagcatgtctgaagcactgcttcattcaccttcgatcatcatatttgatgatctggacagtgtagtttcagtctcctcagatcctcaagtgtctcaatcatccagttcttctgattcacttgttcaatatttggctgacattatggatgagtacaaggataagattcaaaatacatgcgggtatggacctatcgcgtttatggcttcagttcagtcacttcagagtcttcctcaagacttaacctcttctggaagatttgatttccatattgagctttctgctcttgcagtacctgagcgcaaagcactattgcaacatcaagttgaggagcatgatttattgtgttctgaggaagttctgtcagagatagcatcaaaatgtgaaggttatgatgcatatgacttggaaattttggttgatagggctgtgcacactgctgcttatcgctttcttctgccttctaatgcttgtcacaactctctgaaacgaactttgttgatggaagatttctttaaagcaatgcatggcttccttccagtcgccatgcgtgatcttaggaaatatgctcctgatgataaagatggtggttgggaggatgttggagggctagatgaagcagtaactatcattaaagagggcacctgtgcggttgcggtcaaacattctcctgtatggaccacctggatgtggtaaaactcacattgtgagagctgcggctgctgcttgttctttgcgattcatttcagtcaagggtccagagctattgaataagtatattggttcatctgagcaatctgttcgcgacttttttgcaaaggccgttgctgcagcaccttgcctattattctttgatgaatttgactccattgcaccccagcgaggaactcatagtgcaggagtttctgatcgtgtagttaatcagttcttgacggaactggatggtgtggaaaccttaactggagtattcgtatttgcagctacgaggtttcactggcaagtgatgccagtctcgaagatgttgcttctctgaccgaaggatttactggtgctgatctcgctgctattctaacggatgctggactagctgcaattcatgaacttttggacaaccaggagaacggtgttccagaaaccgaaccgtgcatcagcaaagaacttctcatgtccgtcactaggaaggcaagaccttccacaccagcagacgagaagatgcggtatgatagggagtttggtgaattcgtgtcatccaggaagtctatttcgacaaaggcaagagagtcaaaaggcaaaaaggttacactagcttgagcctttccttggccaatattaatgcgctgcaaaatttggacagtggcctacatgaaggctgctaacacgcggacttgtcaagtcatgcgacgtaggcttcctttcatttgaagagaaacaaaatctacaaagaaacctaaccaaggctcacttgtgttagtgtacttggatggaggaggaaggccattggagggacctgcaggtggtcaaaggtgtcatagtaggaaattttgtacggtaatcctgctgtaattaaagttataacacttgtcacaaattttgtacggtggtgaacggtaggaaatctatactacttattaagaagagaaaaccggtaatcctgctgtaatgaaagttatggtgaatgatccgcttcttaacgtgcagcggtcgtcttggatagatcagatgtgttcgcctgcttcgtggggggctctagccacgggatagatcattgtttgcaaggagagggtgttttttttttggagatgcaaagagagggtgtagatttggttctatgggcaataaaggactgtttagttcagctatagatttttagaattctgattttagct

SEQ ID NO: 39559 - DNA, 4330 bp, Zea Mays
agaggcagaagggctggggcgcggccgcgcggggaggcgtcaagcagtttagcagccatgagcggcggcgggctggaagtgcaggttcacgtggtgggcggcgcccggagctgctttgccgcgctcccgcttcacctcatccacgacttggagcgcacctcagccaccggcgacctcccgcccgtcctcgcgctcgaacttcgcggtcccgccggcgcccgctggtccctcgcctggtccggcgccgcttcccgatccagcgccatcgaggttgcacaagagttggcagactgcatctcgctgcctgatggaactatagcacagttgagcgtagctcgttctctggccaaagctgactcgatcagtattgaaccctacagtgaggatgactgggagatactggagagccgtgctgatttggctgaagaaacaatcttgaagcaggttggcatcgtttatgagggcatgaaattcccattgtggttggatggacataatattgtgaagtttgttgtcttgtcatctttccctgagaagacagttgttcaacttgtaccaggcactgaagttgttgttgcacctaaaaaacgaaaagagaagccttctcaggatctacaaaagcaaagtgcactgaaagaacaagtcaaaataaaggcactcctgcgtgttcaagcagctgataggaagtatgcacatacattcaaatatgaaggtgtcgagataggtgtggttgtcagctatgctgtgctaattcatcctgatacagctgcaagtatttcagttggcaatctccaattagtcgctgtttcacctaaatcatcaaagaaaggactacctctaaaaggcaaagaagttggacgaaaaaaaggaatttcagtaactaaagaaaggtcccatgaagccattgtttatatcttactttcagactctgttgcaaaagggcatgttatgcttccgtactctattcgtcacttcataagtgctgatgtacattcatgggtatatattaagacatattcagccaacatcaaggaggatgaacctctagtgacaatatctcctttaaagttcaagatgcatgtgaaagatgctcatgatagcagtaaattagtcagtcaggaagtggacacttcgaggataaccagaattccttcagaaaatggtgatttcttccagaaagctcgttacagtgaaaacaaaaatattcgaggtgcagatattgagagcatttctgaatcagtgtcaaggcagaaattttttattaagcattggcttattgggcaccttaaagaaatgggcttgcatgctagccatactgagatgaattcaatagtcttgccaaccaatattttgctccatttggaagcgacagataaagaaggaaccaaaggagttgaattcttatactttctaaagcttacatctgaaaattctaatttcaacgattcacaacttaatattgagactacttggagtgttccaaccagcaatgctgatgatcttgaactgcattttgggaagttcgagcttggcgagcctgtatcttttgattccctagtggacagtggttccagtgatggtttcaagctgactcggtcttctttaggctggatggagaatgcaatgtcagatgtgacaaaaagtaatattttttagccagatatccaaataaatcctttgctgcatctgtttgttttctggatgctacatttttattgttgactaactgactttatttttgtcgatcctttcctttctgaagggttatctgtgctcttatcagcaactagcctaaggttatttaacagaataaagttcccctttcctggacatgttattgtatatggacctcgaggttctggcaaaactgctttgaccagggcttctgcaaaatactttgaggaccataaagatatcttggcgcacataatatacattgattgttccaaacttgcacttggcaaggctaaggagacaaggcaagaaattgaagacagcatgtctgaagcactgcttcattcaccttcgatcatcatatttgatgatctggacagtgtagtttcagtctcctcagatcctcaagtgtctcaatcatccagttcttctgattcacttgttcaatatttggctgacattatggatgagtacaaggataagattcaaaatacatgcgggtatggacctatcgcgtttatggcttcagttcagtcacttcagagtcttcctcaagacttaacctcttctggaagatttgatttccatattgagctttctgctcttgcagtacctgagcgcaaagcactattgcaacatcaagttgaggagcatgatttattgtgttctgaggaagttctgtcagagatagcatcaaaatgtgaaggttatgatgcatatgacttggaaattttggttgatagggctgtgcacactgctgcttatcgctttcttctgccttctaatgcttgtcacaactctctgaaacgaactttgttgatggaagatttctttaaagcaatgcatggcttccttccagtcgccatgcgtgatcttaggaaatatgctcctgatgataaagatggtggttgggaggatgttggagggctagatgaagcagtaactatcattaaagagactcttgaattgccgtcaaaatacccaaatatctttaccagggcacctgtgcggttgcggtcaaacattctcctgtatggaccacctggatgtggtaaaactcacattgtgagagctgcggctgctgcttgttctttgcgattcatttcagtcaagggtccagagctattgaataagtatattggttcatctgagcaatctgttcgcgacttttttgcaaaggccgttgctgcagcaccttgcctattattctttgatgaatttgactccattgcaccccagcgaggaactcatagtgcaggagtttctgatcgtgtagttaatcagttcttgacggaactggatggtgtggaaaccttaactggagtattcgtatttgcagctacgagcaagccacagctaatcgatgctgcgctcttgcgacctggaaggtttgatcgtctagtcttttgtgatttccctcgatgggatgaacgtttagaaattctgaaggtgcattctaggacggtgagccttctttcatgattgagagatttcactgtcataatatctaatttcaccaacattccaggcattatgtactttctttgttatcttccaccttttgccttggccacttttcagcctctcaattgggatctcatttgtaatcttgttcaattttgtgaatgattttaagctgagaaggttaatatatttatgcatattttgaatctatatgaattcatgagactacgagagagtgttattgtcattgtcataaatgttgccaatgcttgtttctttctatttgtattcaggtttcactggcaagtgatgccagtctcgaagatgttgcttctctgaccgaaggatttactggtgctgatctcgctgctattctaacggatgctggactagctgcaattcatgaacttttggacaaccaggagaacggtgttccagaaaccgaaccgtgcatcagcaaagaacttctcatgtccgtcactaggaaggcaagaccttccacaccagcagacgagaagatgcggtatgatagggagtttggtgaattcgtgtcatccaggaagtctatttcgacaaaggcaagagagtcaaaaggcaaaaaggttacactagcttgagcctttccttggccaatattaatgcgctgcaaaatttggacagtggcctacatgaaggctgctaacacgcggacttgtcaagtcatgcgacgtaggcttcctttcatttgaagagaaacaaaatctacaaagaaacctaaccaaggctcacttgtgttagtgtacttggatggaggaggaaggccattggagggacctgcaggtggtcaaaggtgtcatagtaggaaattttgtacggtaatcctgctgtaattaaagttataacacttgtcacaaattttgtacggtggtgaacggtaggaaatctatactacttattaagaagagaaaaccggtaatcctgctgtaatgaaagttatggtgaatgatccgcttcttaacgtgcagcggtcgtcttggatagatcagatgtgttcgcctgcttcgtggggggctctagccacgggatagatcattgtttgcaaggagagggtgttttttttttggagatgcaaagagagggtgtagatttggttctatgggcaataaaggactgtttagttcagctatagatttttagaattctgattttagct

SEQ ID NO: 39560 - DNA, 3719 bp, Zea Mays
cacagttggcgtgagaaattggaattgtaaccttgcagggatcaaaaccgtgaagctgtttcatatttccttgttgcacaagagttggcagactgcatctcgctgcctgatggaactatagcacagttgagcgtagctcgttctctggccaaagctgactcgatcagtattgaaccctacagtgaggatgactgggagatactggagagccgtgctgatttggctgaagaaacaatcttgaagcaggttggcatcgtttatgagggcatgaaattcccattgtggttggatggacataatattgtgaagtttgttgtcttgtcatctttccctgagaagacagttgttcaacttgtaccaggcactgaagttgttgttgcacctaaaaaacgaaaagagaagccttctcaggatctacaaaagcaaagtgcactgaaagaacaagtcaaaataaaggcactcctgcgtgttcaagcagctgataggaagtatgcacatacattcaaatatgaaggtgtcgagataggtgtggttgtcagctatgctgtgctaattcatcctgatacagctgcaagtatttcagttggcaatctccaattagtcgctgtttcacctaaatcatcaaagaaaggactacctctaaaaggcaaagaagttggacgaaaaaaaggaatttcagtaactaaagaaaggtcccatgaagccattgtttatatcttactttcagactctgttgcaaaagggcatgttatgcttccgtactctattcgtcacttcataagtgctgatgtacattcatgggtatatattaagacatattcagccaacatcaaggaggatgaacctctagtgacaatatctcctttaaagttcaagatgcatgtgaaagatgctcatgatagcagtaaattagtcagtcaggaagtggacacttcgaggataaccagaattccttcagaaaatggtgatttcttccagaaagctcgttacagtgaaaacaaaaatattcgaggtgcagatattgagagcatttctgaatcagtgtcaaggcagaaattttttattaagcattggcttattgggcaccttaaagaaatgggcttgcatgctagccatactgagatgaattcaatagtcttgccaaccaatattttgctccatttggaagcgacagataaagaaggaaccaaaggagttgaattcttatactttctaaagcttacatctgaaaattctaatttcaacgattcacaacttaatattgagactacttggagtgttccaaccagcaatgctgatgatcttgaactgcattttgggaagttcgagcttggcgagcctgtatcttttgattccctagtggacagtggttccagtgatggtttcaagctgactcggtcttctttaggctggatggagaatgcaatgtcagatgtgacaaaaaggttatctgtgctcttatcagcaactagcctaaggttatttaacagaataaagttcccctttcctggacatgttattgtatatggacctcgaggttctggcaaaactgctttgaccagggcttctgcaaaatactttgaggaccataaagatatcttggcgcacataatatacattgattgttccaaacttgcacttggcaaggctaaggagacaaggcaagaaattgaagacagcatgtctgaagcactgcttcattcaccttcgatcatcatatttgatgatctggacagtgtagtttcagtctcctcagatcctcaagtgtctcaatcatccagttcttctgattcacttgttcaatatttggctgacattatggatgagtacaaggataagattcaaaatacatgcgggtatggacctatcgcgtttatggcttcagttcagtcacttcagagtcttcctcaagacttaacctcttctggaagatttgatttccatattgagctttctgctcttgcagtacctgagcgcaaagcactattgcaacatcaagttgaggagcatgatttattgtgttctgaggaagttctgtcagagatagcatcaaaatgtgaaggttatgatgcatatgacttggaaattttggttgatagggctgtgcacactgctgcttatcgctttcttctgccttctaatgcttgtcacaactctctgaaacgaactttgttgatggaagatttctttaaagcaatgcatggcttccttccagtcgccatgcgtgatcttaggaaatatgctcctgatgataaagatggtggttgggaggatgttggagggctagatgaagcagtaactatcattaaagagactcttgaattgccgtcaaaatacccaaatatctttaccagggcacctgtgcggttgcggtcaaacattctcctgtatggaccacctggatgtggtaaaactcacattgtgagagctgcggctgctgcttgttctttgcgattcatttcagtcaagggtccagagctattgaataagtatattggttcatctgagcaatctgttcgcgacttttttgcaaaggccgttgctgcagcaccttgcctattattctttgatgaatttgactccattgcaccccagcgaggaactcatagtgcaggagtttctgatcgtgtagttaatcagttcttgacggaactggatggtgtggaaaccttaactggagtattcgtatttgcagctacgagcaagccacagctaatcgatgctgcgctcttgcgacctggaaggtttgatcgtctagtcttttgtgatttccctcgatgggatgaacgtttagaaattctgaaggtgcattctaggacggtttcactggcaagtgatgccagtctcgaagatgttgcttctctgaccgaaggatttactggtgctgatctcgctgctattctaacggatgctggactagctgcaattcatgaacttttggacaaccaggagaacggtgttccagaaaccgaaccgtgcatcagcaaagaacttctcatgtccgtcactaggaaggcaagaccttccacaccagcagacgagaagatgcggtatgatagggagtttggtgaattcgtgtcatccaggaagtctatttcgacaaaggcaagagagtcaaaaggcaaaaaggttacactagcttgagcctttccttggccaatattaatgcgctgcaaaatttggacagtggcctacatgaaggctgctaacacgcggacttgtcaagtcatgcgacgtaggcttcctttcatttgaagagaaacaaaatctacaaagaaacctaaccaaggctcacttgtgttagtgtacttggatggaggaggaaggccattggagggacctgcaggtggtcaaaggtgtcatagtaggaaattttgtacggtaatcctgctgtaattaaagttataacacttgtcacaaattttgtacggtggtgaacggtaggaaatctatactacttattaagaagagaaaaccggtaatcctgctgtaatgaaagttatggtgaatgatccgcttcttaacgtgcagcggtcgtcttggatagatcagatgtgttcgcctgcttcgtggggggctctagccacgggatagatcattgtttgcaaggagagggtgttttttttttggagatgcaaagagagggtgtagatttggttctatgggcaataaaggactgtttagttcagctatagatttttagaattctgattttagct

SEQ ID NO: 39561 - DNA, 1676 bp, Zea Mays
gtttcaacaagaaaaaacgaggaaaaacatgtttcttaggaaattttggttgatagggctgtgcacactgctgcttatcgctttcttctgccttctaatgcttgtcacaactctctgaaacgaactttgttgatggaagatttctttaaagcaatgcatggcttccttccagtcgccatgcgtgatcttaggaaatatgctcctgatgataaagatggtggttgggaggatgttggagggctagatgaagcagtaactatcattaaagagactcttgaattgccgtcaaaatacccaaatatctttaccagggcacctgtgcggttgcggtcaaacattctcctgtatggaccacctggatgtggtaaaactcacattgtgagagctgcggctgctgcttgttctttgcgattcatttcagtcaagggtccagagctattgaataagtatattggttcatctgagcaatctgttcgcgacttttttgcaaaggccgttgctgcagcaccttgcctattattctttgatgaatttgactccattgcaccccagcgaggaactcatagtgcaggagtttctgatcgtgtagttaatcagttcttgacggaactggatggtgtggaaaccttaactggagtattcgtatttgcagctacgagcaagccacagctaatcgatgctgcgctcttgcgacctggaaggtttgatcgtctagtcttttgtgatttccctcgatgggatgaacgtttagaaattctgaaggtgcattctaggacggtttcactggcaagtgatgccagtctcgaagatgttgcttctctgaccgaaggatttactggtgctgatctcgctgctattctaacggatgctggactagctgcaattcatgaacttttggacaaccaggagaacggtgttccagaaaccgaaccgtgcatcagcaaagaacttctcatgtccgtcactaggaaggcaagaccttccacaccagcagacgagaagatgcggtatgatagggagtttggtgaattcgtgtcatccaggaagtctatttcgacaaaggcaagagagtcaaaaggcaaaaaggttacactagcttgagcctttccttggccaatattaatgcgctgcaaaatttggacagtggcctacatgaaggctgctaacacgcggacttgtcaagtcatgcgacgtaggcttcctttcatttgaagagaaacaaaatctacaaagaaacctaaccaaggctcacttgtgttagtgtacttggatggaggaggaaggccattggagggacctgcaggtggtcaaaggtgtcatagtaggaaattttgtacggtaatcctgctgtaattaaagttataacacttgtcacaaattttgtacggtggtgaacggtaggaaatctatactacttattaagaagagaaaaccggtaatcctgctgtaatgaaagttatggtgaatgatccgcttcttaacgtgcagcggtcgtcttggatagatcagatgtgttcgcctgcttcgtggggggctctagccacgggatagatcattgtttgcaaggagagggtgttttttttttggagatgcaaagagagggtgtagatttggttctatgggcaataaaggactgtttagttcagctatagatttttagaattctgattttagct

SEQ ID NO: 39562 - DNA, 242 bp, Zea Mays
tggagagattagtaggatgtatggactctttgtttcaattatgtggttgcacatatgttccaagcgctaggactgaaaggatgccacttgctattttgctgaattataacctatgcttaatctagatgattcttcattaagtgaataggtagctgacccacattcttgctgaattataacctatgcttaatcttggatccaatcaacaaacaaataagtgccacaagcaaacccaccctgag

SEQ ID NO: 39563 - DNA, 213 bp, Zea Mays
gagagattagtaggatgttgcacatatgttccaagcgctaggactgaaaggatgccacttgctattttgctgaattataacctatgcttaatctagatgattcttcattaagtgaataggtagctgacccacattcttgctgaattataacctatgcttaatcttggatccaatcaacaaacaaataagtgccacaagcaaacccaccctgag

SEQ ID NO: 39564 - DNA, 479 bp, Zea Mays
ggagaagtaccaaactgggctgaacccgcaggagaaggtgaagctagagaaggagcccatggggcagttcgtggatgacgacatcagggacctgcctagatctccatggaggagatcgacgctgccaagctcaccaaggacgacgtcgacgtccgcctcaagtggttcggcctcttccaccgctacaagcaccagtgttgttgttgctgttggtaggagcgaccccacgagcgtgacacggacaaagtagccttcggtgccagtggacttgtgcatcggcaaaatttgcagtctccataaggatgctaatgataggtcctcaacacaagccttattggtaagctgaaaaacagcttcacaccttcatttcatttcaataatcgtctgcaagactaaaccacttatcttatccttccctttctgttgtcttcgatgcaggaccatccattcttgagcgtgtatgatgacctgcatgtaga

SEQ ID NO: 39565 - DNA, 915 bp, Zea Mays
ggagaagtaccaaactgggctgaacccgcaggagaaggtgaagctagagaaggagcccatggggcagttcgtggatgacgacatcagggacctgcctagatctccatggaggagatcgacgctgccaagctcaccaaggacgacgtcgacgtccgcctcaagtggttcggcctcttccaccgctacaagcaccagtgttgttgttgctgttggtaggagcgaccccacgagcgtgacacggacaaagtagccttcggtgccaggttcgatttggtttctgctaagtttatcactcctacattttcgcaattagtttctataaattatatcactccatttcactcctatgaaattactgcgacttaatttcaatcgaggtcattcttcttgctccttcgctttgcttagcagtaaagacaataacttcatttaccttgctcaatagtttgccttttaatttgaacaaaaatctaatcacctgacattgcgtgggaggtaagctcctgtttttcacaaactttatcggtggacagttcacagtcctgacagacccattaatctgatagaacagttagcattaggtaattattttggcattggcaattttgatctactcctattttaaaacgccatcataggggtgcttgcatttcttgttcatggttttattgctcaagtaaaaatgcctgctttttatattacttattacatatgcatggaaaagcatgtagaaggtaacaccaataaagtttggatcatatgtttccatctataattgttgtcttggtattctcaatcagtggacttgtgcatcggcaaaatttgcagtctccataaggatgctaatgataggtcctcaacacaagccttattggaccatccattcttgagcgtgtatgatgacctgcatgtaga

SEQ ID NO: 39566 - DNA, 1313 bp, Zea Mays
cgcatatcttctaataaacagaaaaaggtgactcctccacctatcctctctcccccattccacattgcaacattagggttccaggcttccagcacacggcgccggttcgagctccaagatccttgtgtcgctccagtggcgttccagcacacggaccatctccggcgtccaatggcctcgaccatctcctgagccctctgacgactagaaataacgggtgtgctcgtcttcgcctcctcttcatctccagcgtctggcggcctcggccatctccggcgtctggttcgagctccaagctccttgcgtcgctctggtgccggtggatcggcgcggcgaggggatccgtccgggggtttggatcgggttcttctccatctccatcttcatttggccatgcatggaaggatttcaagtggaaactaaatataaattacgtcaagaagaacaaaactccatttgaggactatccagaactcaagaaagagtggtggccaaactttgtggagtgtgttacctctgctgagtatattgctctaggagaaaagggcaagaaaagccaaagcatgaataagttccgtcaaaaactaggtcggcaaagctatactgtacaaaagagaaaatgggcaaaggaagatgcacaagcattaactgagggtaaatctattccatttcaagacatgccagatggtcgtcataaggattgggcaagggtagatgtaaatgaaaagtcagtagctagtacctttacaccattttataatatggacatacttgcaacagcaatagggagtaatcatccagggaggacaacaggggtgagtgcttatgtgggtttagggatgggtcttgctcaaggtgatgggcactagtaagaagaaacgtaaaacaacaaaagaatatgtcaagaggattgtggatgagtatgaggtcaagtttgagaaactgacagccatgtgtcagagtatggagcgtcgattaaacaattctaagagttgctcatcatcaaaatttgttgatacaccagaccatgcaacacatcattcagttgactcattacaagtaacttcatctacttgtagcacatatttgtggtgatacaatgatgttactctggtgtctgttattattgtttccttcgatatgtagcattgttttgcatatcatttttgtcacacccggttctgggggcaaaattgaatgcatagcatatgtgggccaggatccatttcccacacatatgttgacgtcacaagtgtaatatatcaaaagacaatgcaataaaggcgtaaagagagtagagtactttattacat

SEQ ID NO: 39567 - DNA, 1758 bp, Zea Mays
cgcatatcttctaataaacagaaaaaggtgactcctccacctatcctctctcccccattccacattgcaacattagggttccaggcttccagcacacggcgccggttcgagctccaagatccttgtgtcgctccagtggcgttccagcacacggaccatctccggcgtccaatggcctcgaccatctcctgagccctctgacgactagaaataacgggtgtgctcgtcttcgcctcctcttcatctccagcgtctggcggcctcggccatctccggcgtctggttcgagctccaagctccttgcgtcgctctggtgccggtggatcggcgcggcgaggggatccgtccgggggtttggatcgggttcttctccatctccatcttcatttggaacaaatgagttctgagtcatcttctgatacatctaggtcatcaacttcaaaaacctctaggtccataagtagctcatcttccactagcttgcattcagaggacattgtggaaaaaggttcttgtacttctgccaggcatagaacgaaacaaagtcacgccaaatgcaagaagctagaaaaaggaggtccccatcgtcttacatttgataaaaatgggattgcccagtcaccggtaaaacatgtcaatgaattctcaagctatgaattctcaagctattgtggttatatagcatgcatgcatgttgatattaggataaaggattggcgaaaagtgcctaaagtggtaaaatcaaacctatgggaggatgtgtcaaagaaatttttcatgccaagggatgaaacccataccctcaatgtgaagaaggtcgctttgaaatctatgagccatgcatggaaggatttcaagtggaaactaaatataaattacgtcaagaagaacaaaactccatttgaggactatccagaactcaagaaagagtggtggccaaactttgtggagtgtgttacctctgctgagtatattgctctaggagaaaagggcaagaaaagccaaagcatgaataagttccgtcaaaaactaggtcggcaaagctatactgtacaaaagagaaaatgggcaaaggaagatgcacaagcattaactgagggtaaatctattccatttcaagacatgccagatggtcgtcataaggattgggcaagggtagatgtaaatgaaaagtcagtagctagtacctttacaccattttataatatggacatacttgcaacagcaatagggagtaatcatccagggaggacaacaggggtgagtgcttatgtgggtttagggatgggtcttgctcaaggtgatgggcactagtaagaagaaacgtaaaacaacaaaagaatatgtcaagaggattgtggatgagtatgaggtcaagtttgagaaactgacagccatgtgtcagagtatggagcgtcgattaaacaattctaagagttgctcatcatcaaaatttgttgatacaccagaccatgcaacacatcattcagttgactcattacaagtaacttcatctacttgtagcacatatttgtggtgatacaatgatgttactctggtgtctgttattattgtttccttcgatatgtagcattgttttgcatatcatttttgtcacacccggttctgggggcaaaattgaatgcatagcatatgtgggccaggatccatttcccacacatatgttgacgtcacaagtgtaatatatcaaaagacaatgcaataaaggcgtaaagagagtagagtactttattacat

SEQ ID NO: 39568 - DNA, 1324 bp, Zea Mays
ctcccccattccacattgcaacattagggttccaggcttccagcacacggcgccggttcgagctccaagatccttgtgtcgctccagtggcgttccagcacacggaccatctccggcgtccaatggcctcgaccatctcctgagccctctgacgactagaaataacgggtgtgctcgtcttcgcctcctcttcatctccagcgtctggcggcctcggccatctccggcgtctggttcgagctccaagctccttgcgtcgctctggtgccggtggatcggcgcggcgaggggatccgtccgggggtttggatcgggttcttctccatctccatcttcatttggccatgcatggaaggatttcaagtggaaactaaatataaattacgtcaagaagaacaaaactccatttgaggactatccagaactcaagaaagagtggtggccaaactttgtggagtgtgttacctctgctgagtatattgctctaggagaaaagggcaagaaaagccaaagcatgaataagttccgtcaaaaactaggtcggcaaagctatactgtacaaaagagaaaatgggcaaaggaagatgcacaagcattaactgagggtaaatctattccatttcaagacatgccagatggtcgtcataaggattgggcaagggtgaggaatccttctggtgacgtgaacataacagagtcgcatccaatcataaagaaaattgtagatgtaaatgaaaagtcagtagctagtacctttacaccattttataatatggacatacttgcaacagcaatagggagtaatcatccagggaggacaacaggggtgagtgcttatgtgggtttagggatgggtcttgctcaaggtgatgggcactagtaagaagaaacgtaaaacaacaaaagaatatgtcaagaggattgtggatgagtatgaggtcaagtttgagaaactgacagccatgtgtcagagtatggagcgtcgattaaacaattctaagagttgctcatcatcaaaatttgttgatacaccagaccatgcaacacatcattcagttgactcattacaagtaacttcatctacttgtagcacatatttgtggtgatacaatgatgttactctggtgtctgttattattgtttccttcgatatgtagcattgttttgcatatcatttttgtcacacccggttctgggggcaaaattgaatgcatagcatatgtgggccaggatccatttcccacacatatgttgacgtcacaagtgtaatatatcaaaagacaatgcaataaaggcgtaaagagagtagagtactttattacat

SEQ ID NO: 39569 - DNA, 1422 bp, Zea Mays
atgagttctgagtcatcttctgatacatctaggtcatcaacttcaaaaacctctaggtccataagtagctcatcttccactagcttgcattcagaggacattgtggaaaaaggttcttgtacttctgccaggcatagaacgaaacaaagtcacgccaaatgcaagaagctagaaaaaggaggtccccatcgtcttacatttgataaaaatgggattgcccagtcaccggtaaaacatgtcaatgaattctcaagctatgaattctcaagctattgtggttatatagcatgcatgcatgttgatattaggataaaggattggcgaaaagtgcctaaagtggtaaaatcaaacctatgggaggatgtgtcaaagaaatttttcatgccaagggatgaaacccataccctcaatgtgaagaaggtcgctttgaaatctatgagccatgcatggaaggatttcaagtggaaactaaatataaattacgtcaagaagaacaaaactccatttgaggactatccagaactcaagaaagagtggtggccaaactttgtggagtgtgttacctctgctgagtatattgctctaggagaaaagggcaagaaaagccaaagcatgaataagttccgtcaaaaactaggtcggcaaagctatactgtacaaaagagaaaatgggcaaaggaagatgcacaagcattaactgagggtaaatctattccatttcaagacatgccagatggtcgtcataaggattgggcaagggtgaggaatccttctggtgacgtgaacataacagagtcgcatccaatcataaagaaaattgtagatgtaaatgaaaagtcagtagctagtacctttacaccattttataatatggacatacttgcaacagcaatagggagtaatcatccagggaggacaacaggggtgagtgcttatgtgggtttagggatgggtcttgctcaaggtgatgggcactagtaagaagaaacgtaaaacaacaaaagaatatgtcaagaggattgtggatgagtatgaggtcaagtttgagaaactgacagccatgtgtcagagtatggagcgtcgattaaacaattctaagagttgctcatcatcaaaatttgttgatacaccagaccatgcaacacatcattcagttgactcattacaagtaacttcatctacttgtagcacatatttgtggtgatacaatgatgttactctggtgtctgttattattgtttccttcgatatgtagcattgttttgcatatcatttttgtcacacccggttctgggggcaaaattgaatgcatagcatatgtgggccaggatccatttcccacacatatgttgacgtcacaagtgtaatatatcaaaagacaatgcaataaaggcgtaaagagagtagagtactttattacat

SEQ ID NO: 39570 - DNA, 4041 bp, Zea Mays
aaacaaaatagttggccaggtacgggcccaactgcatccggccccggtggcccagcagcctgagccagcgcgcctgtgcatcttcttccagcgtgccgtcgcctgcatcaagcgcggcgcacgcccactcgtcctctcggctctcgtccagacgcccagtcgccctagccataggcccctagccctagcacagcagcacaacagcgccgccccccgcccccggtggcccggccccccgcccgttcacccgcgcaaccgcgccgcgcgacccgcgtccggcggccgcccatcgccagtgccgtgacacgtcactccgacgccgtcgccaccaaatctcctggcaacgcctcacgtcttctagttctaattccagcctcactgctgccatcacctccgcctgctgtgtgtcttccacctcgcgctgccaaagccgacaaaccctagcccaactctccctaccctcgcccatcccactcctttcgtccgattcgtggaggcgacggaggggctaaggcatgacgaccgatgggcagctcagggagtgggtctccgacaagctcatgagcctcttgggctactccaagagcgtcgtcgttcagtacgtcatcaggcttgcgaaggagtgctcttcacccggtgacctcgtgggcaagcttgttgagtttgggttcagctcgtctgcggagacccgcaccttcgcgtcggatgtctacgccaaggttccccgcagggccagcggcatcagtgaagtagtggcaacagattctggaaggaatgtccgtcgacgaacagaagaggaggatgaagaaggtggcatcggcagttctgatgaagagaaagaaatgattagagatcagcaggaaaaggctcagctagaaagaaacatgagagaaagagatgcagctaacacaaggaagttgatggagcgacaattatctaaggaagaacaagaggaacttactaggaaatctcaagcaatggacaacaatgacacatctgatctgagaaaattctcaaggcaagcgtacctgcaaaagcgacgagacaaaaaaattgaggaaattcgtgatgaaattctggaccaccagtacatttttcaggatctgaaactaacagaggcagaagaaaaggagttgagatacaagatgaagatatatgatcttgtcaaggaacatgttgagactcctgatgatgttggtgcgtacaaaatgcctgaagcttatgacatgggcgaaaatgtcaatcaagagaagagattcgctgtggccatgcaacggtacaaagatcctaaggccaatgataaaatgaacccttttgctgaacaggaagcatgggaagaacaccaaataggaaaatcgaaactgcaatttggatccaaagataagaagccgtcttcagatgagtatcagtatgtatttgaagatacgattgattttgttaaatcatcagtcatagaaggaacccagcctgaagatgattcagataaagaagacgttgaagcaaaagatattttgaaaagggagctccaggatgagcgaaagacacttccaattttcaaatttagggatgaactgcttaaggctgtagaagagtatcaggttatcgtcatagtgggtgagactgggtccggtaaaacaacacaaatacctcagttccttcatgagtctggttatactgcaaaaggaaaggttgcatgtactcaacctcgtcgagtagctgccatgagtgttgcagcaagagtatctcaagaaatgggtgttaaacttgggcatgaggttggttactctataagatttgaggattgcacttcagataaaacaattattaagtacatgactgatggaatgcttctaagggagttccttggtgaaccagatttggctagctatagtgttgtcatggttgacgaggctcatgagcgtaccctctccactgatatcttatttggtctagtgaaggatatttctcgttttcgaccagatctgaagttgctcatttctagtgccacccttgatgcagaaaaatttagtgactactttgattcagctcctattttcaagatacctgggaggcgatacccggttgaaattcattatacaaaagctccagaggctgattacatagatgcagcaattgtcactgttttacagatacatgttacccaatcccctggcgatatcctggtgtttctcacaggtcaggaggaaattgaaacagttgatgaaatccttaaacacagaacaaggggcttaggcaccaaaatctcagaattaattatatgtcctatttatgcaaatctgcctaccgagcttcaagctaagatatttgagccaacccctgagggtgcccgtaaggtggttctggccactaatatagcagagacttcattaaccattgatggtataaaatatgttattgatcctggcttttgtaagatcaaatcatacaatccccgcacaggaatggaatctctacttattaatcccatctcaaaagcttcggcaaaccagagggctggaagatctggacgcactggacccggaaaatgcttccgtctatacacgagttacaactacatgcacgacctagaagataatactgttccagagatccaacgaaccaatcttgcgaatgttgtgcttacactcaagagtcttggtattcatgacttggttaactttgacttcatggatccacccccatcagaagccctattaagggctctggaacaactttttgctctcagtgcactcaacagtcgtggggagttgaccaagactggaagaagaatggcagaatttccactggatcctatgttgtcgaagatgatagttgcttcagagaaatataagtgttctgatgagatcatctccattgcctccatgttgtcaattggcaattctatattttatcgtccgaaggacaaacaagttcatgcagataatgcaaggttgaatttccacactggcaatgttggggaccatatagcactactaaatgtgtataattcttggaaagaaacagactattcaactcaatggtgttatgaaaactatatacaggtgcgcagcatgaagagggcaagagatattcgggatcaactagatgggcttatggaaagagttgagattgagatttgctcaaacaccagtgatttagatgctattaaaaaagctataacatcaggtttcttccatcactctgcacggttgcagagggatggtacatataagactgtcaagaaccctcagaccgtgcatatccatcctagttcaggattagcggaggtacgtccgcggtgggtagtgtaccacgaattagttctcacgacgaaagagtttatgcgccaggtgacggaactgaagcctgaatggctggtagagatagcaccacattattaccaactaaaggatgtggaagactccggaacaaagaagttaccgaagggccaaggacgagctgcattgtagctatgatacatgaagtttcgatggatgtattgtgttggactcatcgtaggagcatcataggatgtatataactccttatatcacgaacaggatacaagatgtcacttttcattgccctgcttaggtttcagagtaagctgattgtgaatgtaaattgtgacacgaagacatgcatgtgaaccgctataattgtcacactggagggagcgccggcatgcaactttcgtgtcttccagccgctacgcttgacgatcgttcgcatcctgccgccgtcgcgactattatccaagaaaatgcatatgtgcctttcctcgccggcctcttggatatggatgtatgttgaacaaacgcctatcaagggaaggataaatgagggatgagtatgggattttgaaaaaaagaaatcctgaatctttctgtaaattgggtaagcaaattgagaaaaatggatgggttgggacggaatcgtgagtcttgaatctgaacaactcagggtctttggttgggaccggattatgggccacttgatccgaccaactcgtaaaaaaagtcaggcttgattgtccaaaaa

SEQ ID NO: 39571 - DNA, 848 bp, Zea Mays
  misc_feature (847)..(848): n is a, c, g, or t
gcctgagccagcgcgcctgtgcatcttcttccagcgtgccgtcgcctgcatcaagcgcggcgcacgcccactcgtcctctcggctctcgtccagacgcccagtcgccctagccataggcccctagccctagcacagcagcacaacagcgccgccccccgcccccggtggcccggccccccgcccgttcacccgcgcaaccgcgccgcgcgacccgcgtccggcggccgcccatcgccagtgccgtgacacgtcactccgacgccgtcgccaccaaatctcctggcaacgcctcacgtcttctagttctaattccagcctcactgctgccatcacctccgcctgctgtgtgtcttccacctcgcgctgccaaagccgacaaaccctagcccaactctccctaccctcgcccatcccactcctttcgtccgattcgtggaggcgacggaggggctaaggcatgacgaccgatgggcagctcagggagtgggtctccgacaagctcatgagcctcttgggctactccaagagcgtcgtcgttcagtacgtcatcaggcttgcgaaggagtgctcttcacccggtgacctcgtgggcaagcttgttgagtttgggttcagctcgtctgcggagacccgcaccttcgcgtcggatgtctacgccaaggttccccgcagggccagcggcatcagtaattaccagaaacaggagagggaggcggcaaagcttgtccagaaacagagtacttacaagctgttggtcaacgaggatgacaatactgacaaccagacactggcaagtcaaaagacctcaacaaatccatcatctaagagtcggaagcatttcaggann

SEQ ID NO: 39572 - DNA, 3972 bp, Zea Mays
cgcgcctgtgcatcttcttccagcgtgccgtcgcctgcatcaagcgcggcgcacgcccactcgtcctctcggctctcgtccagacgcccagtcgccctagccataggcccctagccctagcacagcagcacaacagcgccgccccccgcccccggtggcccggccccccgcccgttcacccgcgcaaccgcgccgcgcgacccgcgtccggcggccgcccatcgccagtgccgtgacacgtcactccgacgccgtcgccaccaaatctcctggcaacgcctcacgtcttctagttctaattccagcctcactgctgccatcacctccgcctgctgtgtgtcttccacctcgcgctgccaaagccgacaaaccctagcccaactctccctaccctcgcccatcccactcctttcgtccgattcgtggaggcgacggaggggctaaggcatgacgaccgatgggcagctcagggagtgggtctccgacaagctcatgagcctcttgggctactccaagagcgtcgtcgttcagtacgtcatcaggcttgcgaaggagtgctcttcacccggtgacctcgtgggcaagcttgttgagtttgggttcagctcgtctgcggagacccgcaccttcgcgtcggatgtctacgccaaggttccccgcagggccagcggcatcagtaagtagtggcaacagattctggaaggaatgtccgtcgacgaacagaagaggaggatgaagaaggtggcatcggcagttctgatgaagagaaagaaatgattagagatcagcaggaaaaggctcagctagaaagaaacatgagagaaagagatgcagctaacacaaggaagttgatggagcgacaattatctaaggaagaacaagaggaacttactaggaaatctcaagcaatggacaacaatgacacatctgatctgagaaaattctcaaggcaagcgtacctgcaaaagcgacgagacaaaaaaattgaggaaattcgtgatgaaattctggaccaccagtacatttttcaggatctgaaactaacagaggcagaagaaaaggagttgagatacaagatgaagatatatgatcttgtcaaggaacatgttgagactcctgatgatgttggtgcgtacaaaatgcctgaagcttatgacatgggcgaaaatgtcaatcaagagaagagattcgctgtggccatgcaacggtacaaagatcctaaggccaatgataaaatgaacccttttgctgaacaggaagcatgggaagaacaccaaataggaaaatcgaaactgcaatttggatccaaagataagaagccgtcttcagatgagtatcagtatgtatttgaagatacgattgattttgttaaatcatcagtcatagaaggaacccagcctgaagatgattcagataaagaagacgttgaagcaaaagatattttgaaaagggagctccaggatgagcgaaagacacttccaattttcaaatttagggatgaactgcttaaggctgtagaagagtatcaggttatcgtcatagtgggtgagactgggtccggtaaaacaacacaaatacctcagttccttcatgagtctggttatactgcaaaaggaaaggttgcatgtactcaacctcgtcgagtagctgccatgagtgttgcagcaagagtatctcaagaaatgggtgttaaacttgggcatgaggttggttactctataagatttgaggattgcacttcagataaaacaattattaagtacatgactgatggaatgcttctaagggagttccttggtgaaccagatttggctagctatagtgttgtcatggttgacgaggctcatgagcgtaccctctccactgatatcttatttggtctagtgaaggatatttctcgttttcgaccagatctgaagttgctcatttctagtgccacccttgatgcagaaaaatttagtgactactttgattcagctcctattttcaagatacctgggaggcgatacccggttgaaattcattatacaaaagctccagaggctgattacatagatgcagcaattgtcactgttttacagatacatgttacccaatcccctggcgatatcctggtgtttctcacaggtcaggaggaaattgaaacagttgatgaaatccttaaacacagaacaaggggcttaggcaccaaaatctcagaattaattatatgtcctatttatgcaaatctgcctaccgagcttcaagctaagatatttgagccaacccctgagggtgcccgtaaggtggttctggccactaatatagcagagacttcattaaccattgatggtataaaatatgttattgatcctggcttttgtaagatcaaatcatacaatccccgcacaggaatggaatctctacttattaatcccatctcaaaagcttcggcaaaccagagggctggaagatctggacgcactggacccggaaaatgcttccgtctatacacgagttacaactacatgcacgacctagaagataatactgttccagagatccaacgaaccaatcttgcgaatgttgtgcttacactcaagagtcttggtattcatgacttggttaactttgacttcatggatccacccccatcagaagccctattaagggctctggaacaactttttgctctcagtgcactcaacagtcgtggggagttgaccaagactggaagaagaatggcagaatttccactggatcctatgttgtcgaagatgatagttgcttcagagaaatataagtgttctgatgagatcatctccattgcctccatgttgtcaattggcaattctatattttatcgtccgaaggacaaacaagttcatgcagataatgcaaggttgaatttccacactggcaatgttggggaccatatagcactactaaatgtgtataattcttggaaagaaacagactattcaactcaatggtgttatgaaaactatatacaggtgcgcagcatgaagagggcaagagatattcgggatcaactagatgggcttatggaaagagttgagattgagatttgctcaaacaccagtgatttagatgctattaaaaaagctataacatcaggtttcttccatcactctgcacggttgcagagggatggtacatataagactgtcaagaaccctcagaccgtgcatatccatcctagttcaggattagcggaggtacgtccgcggtgggtagtgtaccacgaattagttctcacgacgaaagagtttatgcgccaggtgacggaactgaagcctgaatggctggtagagatagcaccacattattaccaactaaaggatgtggaagactccggaacaaagaagttaccgaagggccaaggacgagctgcattgtagctatgatacatgaagtttcgatggatgtattgtgttggactcatcgtaggagcatcataggatgtatataactccttatatcacgaacaggatacaagatgtcacttttcattgccctgcttaggtttcagagtaagctgattgtgaatgtaaattgtgacacgaagacatgcatgtgaaccgctataattgtcacactggagggagcgccggcatgcaactttcgtgtcttccagccgctacgcttgacgatcgttcgcatcctgccgccgtcgcgactattatccaagaaaatgcatatgtgcctttcctcgccggcctcttggatatggatgtatgttgaacaaacgcctatcaagggaaggataaatgagggatgagtatgggattttgaaaaaaagaaatcctgaatctttctgtaaattgggtaagcaaattgagaaaaatggatgggttgggacggaatcgtgagtcttgaatctgaacaactcagggtctttggttgggaccggattatgggccacttgatccgaccaactcgtaaaaaaagtcaggcttgattgtccaaaaa

SEQ ID NO: 39573 - DNA, 3909 bp, Zea Mays
cacgcccactcgtcctctcggctctcgtccagacgcccagtcgccctagccataggcccctagccctagcacagcagcacaacagcgccgccccccgcccccggtggcccggccccccgcccgttcacccgcgcaaccgcgccgcgcgacccgcgtccggcggccgcccatcgccagtgccgtgacacgtcactccgacgccgtcgccaccaaatctcctggcaacgcctcacgtcttctagttctaattccagcctcactgctgccatcacctccgcctgctgtgtgtcttccacctcgcgctgccaaagccgacaaaccctagcccaactctccctaccctcgcccatcccactcctttcgtccgattcgtggaggcgacggaggggctaaggcatgacgaccgatgggcagctcagggagtgggtctccgacaagctcatgagcctcttgggctactccaagagcgtcgtcgttcagtacgtcatcaggcttgcgaaggagtgctcttcacccggtgacctcgtgggcaagcttgttgagtttgggttcagctcgtctgcggagacccgcaccttcgcgtcggatgtctacgccaaggttccccgcagggccagcggcatcagtgaagtagtggcaacagattctggaaggaatgtccgtcgacgaacagaagaggaggatgaagaaggtggcatcggcagttctgatgaagagaaagaaatgattagagatcagcaggaaaaggctcagctagaaagaaacatgagagaaagagatgcagctaacacaaggaagttgatggagcgacaattatctaaggaagaacaaggaaatctcaagcaatggacaacaatgacacatctgatctgagaaaattctcaaggcaagcgtacctgcaaaagcgacgagacaaaaaaattgaggaaattcgtgatgaaattctggaccaccagtacatttttcaggatctgaaactaacagaggcagaagaaaaggagttgagatacaagatgaagatatatgatcttgtcaaggaacatgttgagactcctgatgatgttggtgcgtacaaaatgcctgaagcttatgacatgggcgaaaatgtcaatcaagagaagagattcgctgtggccatgcaacggtacaaagatcctaaggccaatgataaaatgaacccttttgctgaacaggaagcatgggaagaacaccaaataggaaaatcgaaactgcaatttggatccaaagataagaagccgtcttcagatgagtatcagtatgtatttgaagatacgattgattttgttaaatcatcagtcatagaaggaacccagcctgaagatgattcagataaagaagacgttgaagcaaaagatattttgaaaagggagctccaggatgagcgaaagacacttccaattttcaaatttagggatgaactgcttaaggctgtagaagagtatcaggttatcgtcatagtgggtgagactgggtccggtaaaacaacacaaatacctcagttccttcatgagtctggttatactgcaaaaggaaaggttgcatgtactcaacctcgtcgagtagctgccatgagtgttgcagcaagagtatctcaagaaatgggtgttaaacttgggcatgaggttggttactctataagatttgaggattgcacttcagataaaacaattattaagtacatgactgatggaatgcttctaagggagttccttggtgaaccagatttggctagctatagtgttgtcatggttgacgaggctcatgagcgtaccctctccactgatatcttatttggtctagtgaaggatatttctcgttttcgaccagatctgaagttgctcatttctagtgccacccttgatgcagaaaaatttagtgactactttgattcagctcctattttcaagatacctgggaggcgatacccggttgaaattcattatacaaaagctccagaggctgattacatagatgcagcaattgtcactgttttacagatacatgttacccaatcccctggcgatatcctggtgtttctcacaggtcaggaggaaattgaaacagttgatgaaatccttaaacacagaacaaggggcttaggcaccaaaatctcagaattaattatatgtcctatttatgcaaatctgcctaccgagcttcaagctaagatatttgagccaacccctgagggtgcccgtaaggtggttctggccactaatatagcagagacttcattaaccattgatggtataaaatatgttattgatcctggcttttgtaagatcaaatcatacaatccccgcacaggaatggaatctctacttattaatcccatctcaaaagcttcggcaaaccagagggctggaagatctggacgcactggacccggaaaatgcttccgtctatacacgagttacaactacatgcacgacctagaagataatactgttccagagatccaacgaaccaatcttgcgaatgttgtgcttacactcaagagtcttggtattcatgacttggttaactttgacttcatggatccacccccatcagaagccctattaagggctctggaacaactttttgctctcagtgcactcaacagtcgtggggagttgaccaagactggaagaagaatggcagaatttccactggatcctatgttgtcgaagatgatagttgcttcagagaaatataagtgttctgatgagatcatctccattgcctccatgttgtcaattggcaattctatattttatcgtccgaaggacaaacaagttcatgcagataatgcaaggttgaatttccacactggcaatgttggggaccatatagcactactaaatgtgtataattcttggaaagaaacagactattcaactcaatggtgttatgaaaactatatacaggtgcgcagcatgaagagggcaagagatattcgggatcaactagatgggcttatggaaagagttgagattgagatttgctcaaacaccagtgatttagatgctattaaaaaagctataacatcaggtttcttccatcactctgcacggttgcagagggatggtacatataagactgtcaagaaccctcagaccgtgcatatccatcctagttcaggattagcggaggtacgtccgcggtgggtagtgtaccacgaattagttctcacgacgaaagagtttatgcgccaggtgacggaactgaagcctgaatggctggtagagatagcaccacattattaccaactaaaggatgtggaagactccggaacaaagaagttaccgaagggccaaggacgagctgcattgtagctatgatacatgaagtttcgatggatgtattgtgttggactcatcgtaggagcatcataggatgtatataactccttatatcacgaacaggatacaagatgtcacttttcattgccctgcttaggtttcagagtaagctgattgtgaatgtaaattgtgacacgaagacatgcatgtgaaccgctataattgtcacactggagggagcgccggcatgcaactttcgtgtcttccagccgctacgcttgacgatcgttcgcatcctgccgccgtcgcgactattatccaagaaaatgcatatgtgcctttcctcgccggcctcttggatatggatgtatgttgaacaaacgcctatcaagggaaggataaatgagggatgagtatgggattttgaaaaaaagaaatcctgaatctttctgtaaattgggtaagcaaattgagaaaaatggatgggttgggacggaatcgtgagtcttgaatctgaacaactcagggtctttggttgggaccggattatgggccacttgatccgaccaactcgtaaaaaaagtcaggcttgattgtccaaaaa

SEQ ID NO: 39574 - DNA, 3262 bp, Zea Mays
tccactgagccgtcctgggttcgacgcaccctctctacaaaatacaggggggaagagaaagaaatgattagagatcagcaggaaaaggctcagctagaaagaaacatgagagaaagagatgcagctaacacaaggaagttgatggagcgacaattatctaaggaagaacaagaggaacttactaggaaatctcaagcaatggacaacaatgacacatctgatctgagaaaattctcaaggcaagcgtacctgcaaaagcgacgagacaaaaaaattgaggaaattcgtgatgaaattctggaccaccagtacatttttcaggatctgaaactaacagaggcagaagaaaaggagttgagatacaagatgaagatatatgatcttgtcaaggaacatgttgagactcctgatgatgttggtgcgtacaaaatgcctgaagcttatgacatgggcgaaaatgtcaatcaagagaagagattcgctgtggccatgcaacggtacaaagatcctaaggccaatgataaaatgaacccttttgctgaacaggaagcatgggaagaacaccaaataggaaaatcgaaactgcaatttggatccaaagataagaagccgtcttcagatgagtatcagtatgtatttgaagatacgattgattttgttaaatcatcagtcatagaaggaacccagcctgaagatgattcagataaagaagacgttgaagcaaaagatattttgaaaagggagctccaggatgagcgaaagacacttccaattttcaaatttagggatgaactgcttaaggctgtagaagagtatcaggttatcgtcatagtgggtgagactgggtccggtaaaacaacacaaatacctcagttccttcatgagtctggttatactgcaaaaggaaaggttgcatgtactcaacctcgtcgagtagctgccatgagtgttgcagcaagagtatctcaagaaatgggtgttaaacttgggcatgaggttggttactctataagatttgaggattgcacttcagataaaacaattattaagtacatgactgatggaatgcttctaagggagttccttggtgaaccagatttggctagctatagtgttgtcatggttgacgaggctcatgagcgtaccctctccactgatatcttatttggtctagtgaaggatatttctcgttttcgaccagatctgaagttgctcatttctagtgccacccttgatgcagaaaaatttagtgactactttgattcagctcctattttcaagatacctgggaggcgatacccggttgaaattcattatacaaaagctccagaggctgattacatagatgcagcaattgtcactgttttacagatacatgttacccaatcccctggcgatatcctggtgtttctcacaggtcaggaggaaattgaaacagttgatgaaatccttaaacacagaacaaggggcttaggcaccaaaatctcagaattaattatatgtcctatttatgcaaatctgcctaccgagcttcaagctaagatatttgagccaacccctgagggtgcccgtaaggtggttctggccactaatatagcagagacttcattaaccattgatggtataaaatatgttattgatcctggcttttgtaagatcaaatcatacaatccccgcacaggaatggaatctctacttattaatcccatctcaaaagcttcggcaaaccagagggctggaagatctggacgcactggacccggaaaatgcttccgtctatacacgagttacaactacatgcacgacctagaagataatactgttccagagatccaacgaaccaatcttgcgaatgttgtgcttacactcaagagtcttggtattcatgacttggttaactttgacttcatggatccacccccatcagaagccctattaagggctctggaacaactttttgctctcagtgcactcaacagtcgtggggagttgaccaagactggaagaagaatggcagaatttccactggatcctatgttgtcgaagatgatagttgcttcagagaaatataagtgttctgatgagatcatctccattgcctccatgttgtcaattggcaattctatattttatcgtccgaaggacaaacaagttcatgcagataatgcaaggttgaatttccacactggcaatgttggggaccatatagcactactaaatgtgtataattcttggaaagaaacagactattcaactcaatggtgttatgaaaactatatacaggtgcgcagcatgaagagggcaagagatattcgggatcaactagatgggcttatggaaagagttgagattgagatttgctcaaacaccagtgatttagatgctattaaaaaagctataacatcaggtttcttccatcactctgcacggttgcagagggatggtacatataagactgtcaagaaccctcagaccgtgcatatccatcctagttcaggattagcggaggtacgtccgcggtgggtagtgtaccacgaattagttctcacgacgaaagagtttatgcgccaggtgacggaactgaagcctgaatggctggtagagatagcaccacattattaccaactaaaggatgtggaagactccggaacaaagaagttaccgaagggccaaggacgagctgcattgtagctatgatacatgaagtttcgatggatgtattgtgttggactcatcgtaggagcatcataggatgtatataactccttatatcacgaacaggatacaagatgtcacttttcattgccctgcttaggtttcagagtaagctgattgtgaatgtaaattgtgacacgaagacatgcatgtgaaccgctataattgtcacactggagggagcgccggcatgcaactttcgtgtcttccagccgctacgcttgacgatcgttcgcatcctgccgccgtcgcgactattatccaagaaaatgcatatgtgcctttcctcgccggcctcttggatatggatgtatgttgaacaaacgcctatcaagggaaggataaatgagggatgagtatgggattttgaaaaaaagaaatcctgaatctttctgtaaattgggtaagcaaattgagaaaaatggatgggttgggacggaatcgtgagtcttgaatctgaacaactcagggtctttggttgggaccggattatgggccacttgatccgaccaactcgtaaaaaaagtcaggcttgattgtccaaaaa

SEQ ID NO: 39575 - DNA, 3207 bp, Zea Mays
tcttgctgccgactgagtatgtggagaggcgcaggaaggagatgggcaagatatgtttaggccaagagatgtttaggctgcagttgatggagcgacaattatctaaggaagaacaagaggaacttactaggaaatctcaagcaatggacaacaatgacacatctgatctgagaaaattctcaaggcaagcgtacctgcaaaagcgacgagacaaaaaaattgaggaaattcgtgatgaaattctggaccaccagtacatttttcaggatctgaaactaacagaggcagaagaaaaggagttgagatacaagatgaagatatatgatcttgtcaaggaacatgttgagactcctgatgatgttggtgcgtacaaaatgcctgaagcttatgacatgggcgaaaatgtcaatcaagagaagagattcgctgtggccatgcaacggtacaaagatcctaaggccaatgataaaatgaacccttttgctgaacaggaagcatgggaagaacaccaaataggaaaatcgaaactgcaatttggatccaaagataagaagccgtcttcagatgagtatcagtatgtatttgaagatacgattgattttgttaaatcatcagtcatagaaggaacccagcctgaagatgattcagataaagaagacgttgaagcaaaagatattttgaaaagggagctccaggatgagcgaaagacacttccaattttcaaatttagggatgaactgcttaaggctgtagaagagtatcaggttatcgtcatagtgggtgagactgggtccggtaaaacaacacaaatacctcagttccttcatgagtctggttatactgcaaaaggaaaggttgcatgtactcaacctcgtcgagtagctgccatgagtgttgcagcaagagtatctcaagaaatgggtgttaaacttgggcatgaggttggttactctataagatttgaggattgcacttcagataaaacaattattaagtacatgactgatggaatgcttctaagggagttccttggtgaaccagatttggctagctatagtgttgtcatggttgacgaggctcatgagcgtaccctctccactgatatcttatttggtctagtgaaggatatttctcgttttcgaccagatctgaagttgctcatttctagtgccacccttgatgcagaaaaatttagtgactactttgattcagctcctattttcaagatacctgggaggcgatacccggttgaaattcattatacaaaagctccagaggctgattacatagatgcagcaattgtcactgttttacagatacatgttacccaatcccctggcgatatcctggtgtttctcacaggtcaggaggaaattgaaacagttgatgaaatccttaaacacagaacaaggggcttaggcaccaaaatctcagaattaattatatgtcctatttatgcaaatctgcctaccgagcttcaagctaagatatttgagccaacccctgagggtgcccgtaaggtggttctggccactaatatagcagagacttcattaaccattgatggtataaaatatgttattgatcctggcttttgtaagatcaaatcatacaatccccgcacaggaatggaatctctacttattaatcccatctcaaaagcttcggcaaaccagagggctggaagatctggacgcactggacccggaaaatgcttccgtctatacacgagttacaactacatgcacgacctagaagataatactgttccagagatccaacgaaccaatcttgcgaatgttgtgcttacactcaagagtcttggtattcatgacttggttaactttgacttcatggatccacccccatcagaagccctattaagggctctggaacaactttttgctctcagtgcactcaacagtcgtggggagttgaccaagactggaagaagaatggcagaatttccactggatcctatgttgtcgaagatgatagttgcttcagagaaatataagtgttctgatgagatcatctccattgcctccatgttgtcaattggcaattctatattttatcgtccgaaggacaaacaagttcatgcagataatgcaaggttgaatttccacactggcaatgttggggaccatatagcactactaaatgtgtataattcttggaaagaaacagactattcaactcaatggtgttatgaaaactatatacaggtgcgcagcatgaagagggcaagagatattcgggatcaactagatgggcttatggaaagagttgagattgagatttgctcaaacaccagtgatttagatgctattaaaaaagctataacatcaggtttcttccatcactctgcacggttgcagagggatggtacatataagactgtcaagaaccctcagaccgtgcatatccatcctagttcaggattagcggaggtacgtccgcggtgggtagtgtaccacgaattagttctcacgacgaaagagtttatgcgccaggtgacggaactgaagcctgaatggctggtagagatagcaccacattattaccaactaaaggatgtggaagactccggaacaaagaagttaccgaagggccaaggacgagctgcattgtagctatgatacatgaagtttcgatggatgtattgtgttggactcatcgtaggagcatcataggatgtatataactccttatatcacgaacaggatacaagatgtcacttttcattgccctgcttaggtttcagagtaagctgattgtgaatgtaaattgtgacacgaagacatgcatgtgaaccgctataattgtcacactggagggagcgccggcatgcaactttcgtgtcttccagccgctacgcttgacgatcgttcgcatcctgccgccgtcgcgactattatccaagaaaatgcatatgtgcctttcctcgccggcctcttggatatggatgtatgttgaacaaacgcctatcaagggaaggataaatgagggatgagtatgggattttgaaaaaaagaaatcctgaatctttctgtaaattgggtaagcaaattgagaaaaatggatgggttgggacggaatcgtgagtcttgaatctgaacaactcagggtctttggttgggaccggattatgggccacttgatccgaccaactcgtaaaaaaagtcaggcttgattgtccaaaaa

SEQ ID NO: 39576 - DNA, 3063 bp, Zea Mays
aagcaatggacaacaatgacacatctgatctgagaaaattctcaaggcaagcgtacctgcaaaagcgacgagacaaaaaaattgaggaaattcgtgatgaaattctggaccaccagtacatttttcaggatctgaaactaacagaggcagaagaaaaggagttgagatacaagatgaagatatatgatcttgtcaaggaacatgttgagactcctgatgatgttggtgcgtacaaaatgcctgaagcttatgacatgggcgaaaatgtcaatcaagagaagagattcgctgtggccatgcaacgagatcctaaggccaatgataaaatgaacccttttgctgaacaggaagcatgggaagaacaccaaataggaaaatcgaaactgcaatttggatccaaagataagaagccgtcttcagatgagtatcagtatgtatttgaagatacgattgattttgttaaatcatcagtcatagaaggaacccagcctgaagatgattcagataaagaagacgttgaagcaaaagatattttgaaaagggagctccaggatgagcgaaagacacttccaattttcaaatttagggatgaactgcttaaggctgtagaagagtatcaggttatcgtcatagtgggtgagactgggtccggtaaaacaacacaaatacctcagttccttcatgagtctggttatactgcaaaaggaaaggttgcatgtactcaacctcgtcgagtagctgccatgagtgttgcagcaagagtatctcaagaaatgggtgttaaacttgggcatgaggttggttactctataagatttgaggattgcacttcagataaaacaattattaagtacatgactgatggaatgcttctaagggagttccttggtgaaccagatttggctagctatagtgttgtcatggttgacgaggctcatgagcgtaccctctccactgatatcttatttggtctagtgaaggatatttctcgttttcgaccagatctgaagttgctcatttctagtgccacccttgatgcagaaaaatttagtgactactttgattcagctcctattttcaagatacctgggaggcgatacccggttgaaattcattatacaaaagctccagaggctgattacatagatgcagcaattgtcactgttttacagatacatgttacccaatcccctggcgatatcctggtgtttctcacaggtcaggaggaaattgaaacagttgatgaaatccttaaacacagaacaaggggcttaggcaccaaaatctcagaattaattatatgtcctatttatgcaaatctgcctaccgagcttcaagctaagatatttgagccaacccctgagggtgcccgtaaggtggttctggccactaatatagcagagacttcattaaccattgatggtataaaatatgttattgatcctggcttttgtaagatcaaatcatacaatccccgcacaggaatggaatctctacttattaatcccatctcaaaagcttcggcaaaccagagggctggaagatctggacgcactggacccggaaaatgcttccgtctatacacgagttacaactacatgcacgacctagaagataatactgttccagagatccaacgaaccaatcttgcgaatgttgtgcttacactcaagagtcttggtattcatgacttggttaactttgacttcatggatccacccccatcagaagccctattaagggctctggaacaactttttgctctcagtgcactcaacagtcgtggggagttgaccaagactggaagaagaatggcagaatttccactggatcctatgttgtcgaagatgatagttgcttcagagaaatataagtgttctgatgagatcatctccattgcctccatgttgtcaattggcaattctatattttatcgtccgaaggacaaacaagttcatgcagataatgcaaggttgaatttccacactggcaatgttggggaccatatagcactactaaatgtgtataattcttggaaagaaacagactattcaactcaatggtgttatgaaaactatatacaggtgcgcagcatgaagagggcaagagatattcgggatcaactagatgggcttatggaaagagttgagattgagatttgctcaaacaccagtgatttagatgctattaaaaaagctataacatcaggtttcttccatcactctgcacggttgcagagggatggtacatataagactgtcaagaaccctcagaccgtgcatatccatcctagttcaggattagcggaggtacgtccgcggtgggtagtgtaccacgaattagttctcacgacgaaagagtttatgcgccaggtgacggaactgaagcctgaatggctggtagagatagcaccacattattaccaactaaaggatgtggaagactccggaacaaagaagttaccgaagggccaaggacgagctgcattgtagctatgatacatgaagtttcgatggatgtattgtgttggactcatcgtaggagcatcataggatgtatataactccttatatcacgaacaggatacaagatgtcacttttcattgccctgcttaggtttcagagtaagctgattgtgaatgtaaattgtgacacgaagacatgcatgtgaaccgctataattgtcacactggagggagcgccggcatgcaactttcgtgtcttccagccgctacgcttgacgatcgttcgcatcctgccgccgtcgcgactattatccaagaaaatgcatatgtgcctttcctcgccggcctcttggatatggatgtatgttgaacaaacgcctatcaagggaaggataaatgagggatgagtatgggattttgaaaaaaagaaatcctgaatctttctgtaaattgggtaagcaaattgagaaaaatggatgggttgggacggaatcgtgagtcttgaatctgaacaactcagggtctttggttgggaccggattatgggccacttgatccgaccaactcgtaaaaaaagtcaggcttgattgtccaaaaa

SEQ ID NO: 39577 - DNA, 2427 bp, Zea Mays
atgatcgagatgcttttgccctgcaaccagttatcggaccagaagagggttatcgtcatagtgggtgagactgggtccggtaaaacaacacaaatacctcagttccttcatgagtctggttatactgcaaaaggaaaggttgcatgtactcaacctcgtcgagtagctgccatgagtgttgcagcaagagtatctcaagaaatgggtgttaaacttgggcatgaggttggttactctataagatttgaggattgcacttcagataaaacaattattaagtacatgactgatggaatgcttctaagggagttccttggtgaaccagatttggctagctatagtgttgtcatggttgacgaggctcatgagcgtaccctctccactgatatcttatttggtctagtgaaggatatttctcgttttcgaccagatctgaagttgctcatttctagtgccacccttgatgcagaaaaatttagtgactactttgattcagctcctattttcaagatacctgggaggcgatacccggttgaaattcattatacaaaagctccagaggctgattacatagatgcagcaattgtcactgttttacagatacatgttacccaatcccctggcgatatcctggtgtttctcacaggtcaggaggaaattgaaacagttgatgaaatccttaaacacagaacaaggggcttaggcaccaaaatctcagaattaattatatgtcctatttatgcaaatctgcctaccgagcttcaagctaagatatttgagccaacccctgagggtgcccgtaaggtggttctggccactaatatagcagagacttcattaaccattgatggtataaaatatgttattgatcctggcttttgtaagatcaaatcatacaatccccgcacaggaatggaatctctacttattaatcccatctcaaaagcttcggcaaaccagagggctggaagatctggacgcactggacccggaaaatgcttccgtctatacacgagttacaactacatgcacgacctagaagataatactgttccagagatccaacgaaccaatcttgcgaatgttgtgcttacactcaagagtcttggtattcatgacttggttaactttgacttcatggatccacccccatcagaagccctattaagggctctggaacaactttttgctctcagtgcactcaacagtcgtggggagttgaccaagactggaagaagaatggcagaatttccactggatcctatgttgtcgaagatgatagttgcttcagagaaatataagtgttctgatgagatcatctccattgcctccatgttgtcaattggcaattctatattttatcgtccgaaggacaaacaagttcatgcagataatgcaaggttgaatttccacactggcaatgttggggaccatatagcactactaaatgtgtataattcttggaaagaaacagactattcaactcaatggtgttatgaaaactatatacaggtgcgcagcatgaagagggcaagagatattcgggatcaactagatgggcttatggaaagagtttcttccatcactctgcacggttgcagagggatggtacatataagactgtcaagaaccctcagaccgtgcatatccatcctagttcaggattagcggaggtacgtccgcggtgggtagtgtaccacgaattagttctcacgacgaaagagtttatgcgccaggtgacggaactgaagcctgaatggctggtagagatagcaccacattattaccaactaaaggatgtggaagactccggaacaaagaagttaccgaagggccaaggacgagctgcattgtagctatgatacatgaagtttcgatggatgtattgtgttggactcatcgtaggagcatcataggatgtatataactccttatatcacgaacaggatacaagatgtcacttttcattgccctgcttaggtttcagagtaagctgattgtgaatgtaaattgtgacacgaagacatgcatgtgaaccgctataattgtcacactggagggagcgccggcatgcaactttcgtgtcttccagccgctacgcttgacgatcgttcgcatcctgccgccgtcgcgactattatccaagaaaatgcatatgtgcctttcctcgccggcctcttggatatggatgtatgttgaacaaacgcctatcaagggaaggataaatgagggatgagtatgggattttgaaaaaaagaaatcctgaatctttctgtaaattgggtaagcaaattgagaaaaatggatgggttgggacggaatcgtgagtcttgaatctgaacaactcagggtctttggttgggaccggattatgggccacttgatccgaccaactcgtaaaaaaagtcaggcttgattgtccaaaaa

SEQ ID NO: 39578 - DNA, 477 bp, Zea Mays
acaatgtgtgtggttaaacggataagaagagatatttataatcatcgactttcattcattaaattacagtaggttacaatgttaccttcagtacgctttcaagacgtccgaaggtaaatacacaatcagcttcaaaggctgagcacttccaatgtgaagggaaaatgtgaacggactccatgcatgagtatttggggcaccgtatagcttcacatgaaattaaactattgcccccaatccctatgtacatggtctacaaaatttatagaggtcacctcgtccttcctcatgagacatgtcgtatacatttctcttgagctcttttgttttttcagcatcaatacatattggaagctacgttcagaattgggcttcggctgtgtgtcgacaccatgattaattcctgatgacgaagatgtccctttctccctttggcttatagaagcttccgactgaaggttgtcttgttgtccctca

SEQ ID NO: 39579 - DNA, 2356 bp, Zea Mays
ccaccgaacatttgcctcaggtccctgggaaacctgctgatctccgccgcctatggctgctgcctccatggacgtggaagccggacaggggagaaacgataagaagcgaatttacaaagatctactccttgcctacaagactctgggcgtcgtattcggtggtcttgtcacctcccctctctacgtctacccttccatgaacctgacaaacccgaccgaagaggactatctgggaatctacagcatcatgttctggaccctgacactgatcggcgtcgtcaagtacatctgcatcgccctcaacgccgacgaccacggcgaaggtggcacatttgccatgtactccctgttgtgccagcacgccaacatcggcatcctcccgtccaagaagatatacaccgaggaggagcagggcctggtcccggctcggcccgtcgcggcccggaggcccagcaaggtgaggaggttcatcgagcggagcattacggcgagaaggttgctgcagctcacggcgatcctgggcatgtgcatgctcattggagacggcatcctcacgccggccatctcaatcctgtcagctgttgatggactaagagggcctttcccgtcggtcagcaaaccgactgttgaggctctgtccgcagggattctgatcggtctgttcctgctgcaaaagtacggcacgtccaaggtgagcttcatgttctcgccgatcatggcggcgtggacgttcaccaccccgatcatcggcatctacagcatctggcgctactaccctggcatcttcaagagcgtgtcgccgtactacgtggtacacttcttcgtgaccaaccggaagaggggctggcagctgctcggcggcaccgtcctgtgcatcacgggcgccgaggccatgttcgccgacctcgggcacttcaacaagcggtccatccagatcgcgttcctctctagcatctacccgtcgctggtgctcacgtacgccggccagacggcctacctgatcaaccacgtgggcgacttcggcgacgggttctacaagttcgtgccgcgccccgtgtactggccaatgttcgtcatcgcgacgctggcggcgatcgtggcgagccagtcgctcatctccgccaccttctccgtggtcaagcagtcggtggcgctggactacttcccgcgcgtccgggtggtgcacacctccaaggacaaggagggggaggtgtactccccggagaccaactacctgctgatgctgctgtgcgtgggcgccatcatcggcttcggcgacggaaaggacatcggcaacgcgttcggcgtggtggtcatcctcgtcatgctcatcactaccatcctgctctccctggtgatgctcatcgtctggggcacgcacgtggtgctggtggcgctctacctcgtgcccttcctcatcctggagggcacttacgtgagcgcggtgtgcaccaagatcatgaagggcggctggttgcccttcgccatctcgctcgttctggcgctcgtcatgttcagctggtactacggccggcagcgcaaggcagagtacgagatggccaacaaggtgaccctggagcggctgagcgagctgctggccgcgcccgacgtgcgccgcgccccggggctctgcctcttctacagcaacatgcaggagtggcggtggctcaccccggtgctggcgcactacatcaagaacatgcggtcgctgcacggggttaccatcttcgtcactctccggtaccaactggtggccaaggtggacgccgagagccgcatggcggtccggcgattcggtccccgcggggtgtacggctgcacgatccagtacgggtacgctggcccactgtacgaggaggaggaggaggacctcgccgggcaggtggtgcgggcggtgcgccagcatatcgagcgggaggcggcggcgtcctccacggcggaggtcgaggaggaggcggcggagctggaggaggcgcgcgcggccggggtggtgcacgtcatgggcaagacgaggttccacgtgggcaggaacacgggcctcttcgaccgcgtgctgctcggcttctatgagttcctgcataccacctgccgctccgcgctgccggcgcttgggatcccgctgcagcagcgcgtcgagatcggcatgctctacaaggcctgacgccagacatgcacctgcggctgttgctggtgcaggcttgcaggtgccggtggcttaagactgaggttgcttgatctagttgtaagtgaatctctgtgggaaggatggaataaggtgtctggtgtggaagatgaacttctgatttgtatcaccatatcgtcctgctgtgatatacaaattaatactagttccttt

SEQ ID NO: 39580 - DNA, 1080 bp, Zea Mays
gtacctcactggtgtgctcgagtgggataaaggagaagtgagtaactgaagtctggagtccccgttttctgcagaaatatcaaggtttgatatttggcttgtgaccctgatcaagttcagtgttttatatgtgtctttgaacctgggaggagtgcatgagagccacgtacttgaacctaggttgtgctggcacactaggagttcttccccactaagttgtgtacaagtacagagagcaccttagggatggttccaataaaattatcctccaacaatcctcaagctccaaccagggtacagcgtgtgtgagtggtagaacttctgtccacaccggtgttcacctgtccccagtccccaaacttggtctgtccagaagctgagcgcgccaacacctggtctagtgaccacactcgccagttcttcacctcgccgtggccaggtagttccggtgtttggaacagagctgtgccgccgcagactggcgccgaggacagccccaccgtcgacccgtctaattgcgtcgtccccggatgaattcttgcgagcacggacgccttgagctcccaatagaaagatgaaggttcaagatgaagtggttgctgaagaggagtctactctagtgtctactgatcaagtggaggaaccatctaactgggtattttataggaggatttagcacatcttctcttcaacaaagacaagacccgatgtatttgccccttccttgtattgttaaaagacttttatacactttaagtctagtgaaatatgcattaagtttataggggttgcttggaaactatttgatgcatttactaccttgatatccattccttttatagatacttatttggaagtatcaaatattgtttacaaaattgcttagccctgcctagagataaatattgtagatagagtttgtcctttgcaataatgccttgctcatggtttatcctgaggaaggatgactctacctacatgaatattttcatcaggatcatggagagatctaatgcaaggttccctgttgttggtccttgttcttaaatgccatgcatcaagaacaaagcaacacaattg

SEQ ID NO: 39581 - DNA, 2023 bp, Zea Mays
tataattgtgcaattttttttctctctccagtgaacacttccgcaaccgaacatgccaccgcccaggggatccacccgcccagctctcccacaggccacagccatcgcaacagagcaacatgccaacagccatattggcgaggcggagcaatcccgtagtgggattgaaatccaaaaccctaaactaactccaatccacacttgccggcatggccctcaagcgctcggccgccgccgccagcctggggtcggcgtccgacgcctccgacggcgaagcgggcgcggcccgcaacagccaccgccgccgagtctccccgtcccgctcccgatccgagtcccctcggcccaacctcggccctagcgccgccgcttccgacaccaaccgtgagcgttccccccgcgaccacctcgactccgatgcggactccgacgccgacgccggcgccggcgccggccgcggcgcccgttcctcgaggcttctcggcgaacgttccccgagcttccactccaactcggacgctgacgtcgccgggcgctctccgtcgccgaggcgcaaccgcgagcgcacccttcacctccactctgactccgactccgacaactccaccacggccgcggccgccgcctccgatgacgccggcgacgcctcgcctttggctattgcgcaccgtgcctcgcacatcgggacctccaacgtcaaacccgtcagcacgcgcccgatggatgtgccctcgcgcgccgccgcgggatcttcccaacgtcgttccaagcgccgccccagcccccactccccggagcaccagaagcggccgccccgggtttggagtcctgaagacgaggtgaccatactgagtgctctcattgagttccgtgccaaaaaagcttagtgataaggtcaggcgcctcaagcacaagtacaagttgctgctcactcgttcaaagaatggacgggatcctgatttgccaaccaaacatgatcgcgatgtctatcaacttagcaagaaagtttggggattgaaaagtctactactagtacgaggatctcgtgtgtcacacgaggacactgaagatgcagaagagagcaatgaagagcaggagatagaggagagtgatgaggatatagaaaatggatggggactccgtggtcgcacaggcaagaaaccaagggcattgacatttgaaaatggcaatggtaatgcaattgtcactgcaggtagggcttgccatggtgatggcagtgggagagatgatgctgagaagggaaaacaaatgtacccatacctgtgggaggctgttgaggagctttcgaaggagcatccgagtggacctatattcaggaaggcatttggtgtacttgaaaaatcaaaggcaggagcggtggaggagaagctcaggaagttcagaatgttagagatcaggcagcagctgcgtcggatggacctgatgaaggagacagtggggttggtgcttgatgctctggagggtgcatattgatgtgctggtggttttggattgtgtccggtattggtaaggtgttgctcaaaaagggcgacctaagtcttccagttgcctggaattgcagtgttatggacatatggttgggtgtgtctaattttgttgtgaaggatatgatatgtctttgaccccaactagacctagatcaaggagttatgacggctgcttgttgtcgttcctgaaatatttatgctctatgtgcttaggtgctaacttatgtctatttgtcatgccatccctatgtttctgcttaatgttagttacttcattggcttaattatctgtttctattttccatttactgcatctgtaaatatgaacatcgccatttcatcagggtttaatccagcttgatatttgttacctctcaactggatgaactggatgcaagcttggtgcttgttaggttcttctaacaagactcgcgactgggaaatgtaatatgatgtgttcatagttatttgcgcttgatgatctgtatatcacggtgctgtctttgtatgccgtg

SEQ ID NO: 39582 - DNA, 742 bp, Zea Mays
agtgaaggattcacctggccttcggattctagccctagaccagtgtaaaagtgtggaagtccttgtgctccagttgatgccagtctcttcccagccactaggtttgctctgcacaagtgttggcacaccatcggtctgccagtagtgaccacgccggtcagtttggccatgtcgccgtggccaagacaactcagcaagagctccgagcagaaggagtgtaaattcaagacgaagtggttgtggaagaggagtttgctccagtgcctattcagcaagtggatggagctatctaactggttattgggtagaaaggtcttaagcctcttcactgcaataaaggatggcggtgccgaagattgatagtccgaagcacgttccgaaggctgttgaagcttctcttaggcctgcctgtgtagagcttagtaacatttgtattaactttgtagaaaaaactgtaatcaaggattgaacaatgttatgtataactgtccataccttgtaatatatttttaccttttcatccatgtacaagttgctttgctgtggacgaaacttgtattttttgagccgaaggcgaaaaacacattcccttctttttgtacacaacaaagcatcctgttgcgtcacatgtatacgtttgaaacgaagcttctttgtgttcatcgaagcactgtcgtcgaagatggagtatctctgttcgtgcttcatgttatgatgatgatgatcctacaaatgtctaaat

SEQ ID NO: 39583 - DNA, 4922 bp, Zea Mays
attaattttatctatcttagatctatctaagcccttgaataagcatgaatagtctatgtcatcatcatcactagactcattatcactagaagaagcataagtggagtctcgagtactcaccttcttctcccttgccataaggcatgtgtgacgctcgttggggaagagggatgacttgttgaaagcggtggcggcgagtccttcattgtcggagtcggaagaggagcagtccgagtcccactccttgcctagatgcgcctcgccctttgccttcttatagttcttcttcttctccctcttgttcccttgatcctgatcactatcattgtcgggacagttagcaataaaatgaccaagcttaccacatttgaagcatgagcgtttcccctttgtcttggtcttgcttggttgccccttgcggccttttagtgccgtcttgaatctcttgatgatgagagccatctcttcatcattaagtccggccgcctcaatttgtgccaccttgctaggtagcgtttccttgcttcttgttgccttgagagcaagaggttgaggctcattgattggaccgtttagagcgtcgtcgacgtatctcgcctccttgatcatcatccgcccgcttacgaattttccgagtacctcctcgggcgtcatcatcgtgtacctgggattctcacgaatattgtttacgagatgaggatcaagaacggtaaaggaccttagcattaggcaaacaacatcgtggtccgtccatcgcgtgcttccgtagctccttattttgttgataagggtctttagccggttgtaagtttgggttggctcctctccccttatcattgcgaatcgtccaagctcgccctccaccaactccattttagtgagcatggtgatgtcgttcccctcgtgagagatcttgagggtgtcccatatctgcttggcgttgtccaagccgctcaccttattgtactcttccttgcacaaagatgctaatagaacagtagtagcttgtgcatttctatggatttgttcatttataagcatagggctatccgagctatcaaatttcattccattctctacaatctcccatatgcttggatggagagagaataagtgactacgcattttgtgactccaaaatccgtagtcttccccatcgaagtgtggaggtttgccaagaggaatggaaagcaaatgcgaattcgaactatgtggaatacgagaataatcaaatgaaaagttcgaattgaccgtcttcctgtagtcgttgtcgtcgtccttttgggaagaagtagactcatcgctatcatcgtagtagacaatctccttgacgcaccttgtcttcttcttcttcccatcttttcgtttgtggcccgagcccgagtcggtatgcttgtcatcttttggctcgttgacgaaggactccttctccttgtcgttgatcacgattcccttccccttaggatccatctcttcgggcgattagtcccttcttgaagagaacggctccgataccaattgagagcacctagagggggggggtgaataggtgatcctgtgaaacttaaaaacttaagccacaaaaacttggttaatcgttagcacaatagttgccaagtggctagagatgagtccaaacacgaataaccgcaagaaatcaagcacagagatgacacagtgtttatcccgtggttcggccaagtacaaaacttgcctactccacgttgtggcgtccaacggacgagagttgcactcaactcctctcaaagtgatccaatgatcaacttgaaataccacggtgttcttctttactttgatcttttcccgtttgcgaggaatctccacaacttggagtctctcgcccttacaattgaatttcacaaagaagtacggagtaagggagggaagcaacacacacaaatccacagcaaaatgcgcacacacacggccaagaaacgagctcaaaagactatctcaaagttctcactagaacggagctcgaatcactgagaatgacgaatgaatgcgcaaagactgagtgtggatgatcaagaatgctctaaggttgcttggtgttatcctccatgcgcctaggggtcccttttatagccccaaggaagctaggagccgttgagagcaaatctggaaggccatccttgccttctgtcgtcgggcgcaccggcagtccggtgcacaccggacactgtccggtgcccgatttctttccttaaacggcgcagccgatcgttgcagatctgggagccgttggcgcaccggacatgtccggtgcacaccggacagtccggtgcccccttccgaccgttggctcagccacgtgtcccgcgcagatcgcccggccgaccattggcccggccgaccgttggctcatcggacagtccggtgcacaccggacagtccggtgaattatagccgtacaccgtcggcgaattcccgagagcggccacttcacgccgagtcagcctggcgcaccggacactgtccggtgcaccaccggacagtccggtgtgccagaccgagctgagtcttggctgtacacagccacgcctttttcacctcttttcttctcttcttctttctgtttctaacacttagacaagtatattagtacacaaaaccaatgtactaaggcttagaaacatacctttactcttgatttgcattttgttcatccatgagcataaattcacatttaagcacttgtgttggcactcaatcaccaaaatacttagaaatggcccaagggcacatttccctttcagtagtgtgtaccctcctggctagaggctggacggaggagtactgtgctcccgggtagcgcggaccggttcacgttgtggaggatctgtgggaacggttgacatatgcaagggttaagtgctacatatgtcgtgtggttagagatcctcagctgagtaaatcgattcggatcatcgttatatccccggagagtggagacttgatcgctgccctgcaacctaagtcaggatgtaaacattatgaataaaaaagatgttgtattgatgagatggtgaaattagactagatgcaaccagagtctattaatatttaatctggcgttaaaatattgaaagtaaggactcactttagtaagctatttctgcaaaaagtatctaagttgattcttgctaaaaccttttccttgattcctatttaaccagcatatccttgagagtcatttttccttagtcgggtaagacttgcgaaagtacactccatactcagggttttcgaacctatgttgttgtaggtgatgaggagtactctatgtgttcgtgaggctggagggcgctttcagttctagaggaggattagttaggcttgtgtataagctttggaggggtcctaccttcctgctaatgtagtaagttatgcactttgagtatatcaggacttgtaataaatgtaactcttcctatgtaataaacttcagttttagaaatgaaaagaatgttttgtaaagtcttccgctcttatctccgaagtgtgtgtatcgaatgtgattactgtagtatgcatgtatggtgggagatccttgggatgatgagttcaaattgttgaactcgtgatagccttattaagttacctggtacacgtgcatagccatctgaggccatcaagggaaggattggtgcatgtgggcccgataacttgggagggcttccacaccctttgcttttcccgagggcgacgagttcgccgcgaacgactcaccggactgtccggtgcaccaccggacggtccggtgatttttagccgtacgccgccgttgagtcccgagagcgacgacttcacgcggaccagcctagcgcaccggacactgtccagtgcaccaccggacagtccggtgtgccagaccgagctgaggattggctacatagagccaagcttttcccttttcctttcttcttctttagtcactgtttctagcacttggataaccatgttagtacacaaaacaattcaccaagtctagaaacatacctttttccttgatttgcacttctcactttattttgcacattagaactcaattaaatgtgttgggcacttaatcaccaaaacattatagaaattgcccaagggcacatttccctttcatgaagacatacctagcaccttcgaacatactgaaaatgaagttgaggcgcttgatgaagtaatagccgggcacggtgacctctgtgccttgctagcttctcgcggcacagctgcagcatttatgaaggctggttgcacgcacgcaaaaatagtaaatagaccaaccttcagtctgtctccaacgtacttggttgatatccccagtgaagcccggagcatcgggaacaggtttataactcagatttgggctaagggtgggcgagagttgcctggtgacgaagcccgaaacttgcttaagccggtatagaacttatacctgttgcttgctttatgtcttgtaatttttcttttttaccttacaccgtttgtttatctgcaggatggcggtgccgaagattgatagtccgaagcacgttccgaaggctgttgaagcttctcttaggcctgcctgtgtagagcttagtaacatttgtattaactttgtagaaaaaactgtaatcaaggattgaacaatgttatgtataactgtccataccttgtaatatatttttaccttttcatccatgtacaagttgctttgctgtggacgaaacttgtattttttgagccgaaggcgaaaaacacattcccttctttttgtacacaacaaagcatcctgttgcgtcacatgtatacgtttgaaacgaagcttctttgtgttcatcgaagcactgtcgtcgaagatggagtatctctgttcgtgcttcatgttatgatgatgatgatcctacaaatgtctaaat

SEQ ID NO: 39584 - DNA, 2270 bp, Zea Mays
cccccttcctctcttccttctcttgcactacccaaccactccctccgcgtcgatcgatccgtaccgcctgggaggcagctcgacgttcaacgaaagagagtgagagcacggttcgtcgcgggggaagcagagcaggagaggagctgacgcggcggcgggggcgagagtcggcggggaggcatggacgggcacggcggcggagccggtaagctgacgaggacgccgtcgtcgctactccggtcgcctaccatgcgcgcgggtcccggcaccgcatcgttccacgcgctcgacgacccggaacccgacgacaagaaggcgcaggcgccactgggcaagcctcgggcgctgctccgccgggcccaccaccggttccgccccggcccggcccagtccgcgctcctcctcctcctcccggtcctcgcgctcgccgcgctgctcatgcgcgggggcgacggcggccaccacctcgccctcctggcggccgcggcggggttcgccctcgccgccgcggccgccgtcgcgcggctccgcggcgctcgcccgcgctccccggcgctcgaggcctccgtgcggtggttcatcggcgaagatgacgacgaggagcagcgggactggaagcggagggcggggctcgggctggggctgggactggggcgccgcgcggaggtgcgggagggcgtcgagttctacagcaacggggaccgctacgagggggagttccacgggggccgctgcagcggcagcggcgtgtacagcttcttcgggaagggcaagtacgagggcgactgggtggacggcaagtacgacggccacggcgtcgagagctgggcgcgcggcagccggtaccgcggccagtaccggcagggccttcgccacggccacggcgtctaccgattctacagcggcgacgactacgccggcgagtgggccggcggccagagtcacggtatcggcgcccagacctgctccgacggcagcacgtacgccggcgagttcaagtgcggcgtcaagcacggcctcggctgctaccatttcaggtgaacaccgtaacatcggttgcagaacaaaatcctctgcaggaacggcgatctgtacgcgggggagtacttcgcagacaagatccagggtttcggtgcgtacagattcgccaatggacacagctacgagggatcttggcacgaaggaaagaaacaggggttcgggatgtacgtatttgggagtggggatgaacgagccggggagtgggattctggaattctgaagagctccttgcctctgtcagacccagctgttcagcgtgccctgcaggctgctcgaagggctgcagacagcgcctttcacctcccaagagtacaagagcaggtgaacaaggccgtcatggctgcaaacagagcggctacagctgcccgtgtcgctgcgatcaaggcagtgcagaacaggatagatggcaagctctgtttcatcgatgtgtgaattgggttcaagaattgtgcccttcacctgttaacaggatagactagccaagagcggcagtgactagctgctgagtttcgcgaccggagcagcacaaccgcatgctccgtgttggttggagagaccagtacggttggcggcagccaccaatgggctgaactgctgctgttttcttgaagtggttcacctcgtgctggatcgctgagagcaagttcaccctattcctcttcctccttgtgcagactgctccatagtccatgtctccactccatccatgtgtatcaatggtggtcggtggagatgatctgtcagtgcttttctgttttctgcatcgccctgtactgtatgtgcattgtacatgcactgtgttatcttgctcggatcagatgttccgacggcaaatcttgccggtttgaacttgtggcgccacgtgcagggattctccattcgtaatcgtacttgagcgtgcacatgggtgtttaccagccaataatccctcgctgccatatcatgcagcctcttatctgctgttccatccactgcacctgggctacctacctctctacctgcaccttctcggacatttccattctctccgcagattatggcgtctttcggtccacttgctgctccatgttctcgcctcgcattagaggcatgaagaaatgaaacatgcaagtgttgaggtaatgacaaatgcgttgcaatacactgggtccagtcacagcctttcaatttcatcgagtcgggaaagtgcaggagtgaaaatttgtgtggcgtcagtaaattcaaagcca

SEQ ID NO: 39585 - DNA, 569 bp, Zea Mays
cggaaaaggtcttccctccgtagtcggccgcggtcatcgcaggctccttggggcgtatggattcaaccaccaccgcgaattcctcgacgtttgacttggggatccccgccttcgtgattaaaagcccgggcgcgccgtgctcttctctctgttcgcgaccacctccaagctttgacagtagacattgccgccgagaagttgaggattagagaggagagagaacaagcgtcgcgaccacaacattcactacacccgcgctcggttcgtgtggccgctaaggaatccggagcggcggaactttctggtgcggcggcggatcttctcggtgctcccatcacgtggcgagccctccagtcgtgcgcgccggcctcgtcctcgactctgcagtggagaagaacatgtgatagaagaggggccgcctaacactgaggcattcgacttgatctaggtggcgtctcccagtcagctttctggcactagggaataatatttagtttgcttcattttatcatttatttttgtaagacttccgctatgtaataagtacatttatgatatttatgacattt

SEQ ID NO: 39586 - DNA, 132 bp, Zea Mays
cgcaatgggaggttgtgtgggaaaggtacgtcgtgatgacgaagaaaaacttgattttaaaggtgcaaatgttcatataataacaagcaaagagggctggaccagaagattgcaggagcaaacagagatgag

SEQ ID NO: 39587 - DNA, 2966 bp, Zea Mays
ccagcactaggctggctgatgagcgcctcagagagtcagcggacagcggtgcgcgggtagccaccttctgtctggcactccggccgtcctccggctccgtgcactctgtagtcatagggagcaagagcaaggttaggcgctcggattagctgccagcctgcccgctacctctgacttgaagcaactcaatgccgtacagtactgtagaacgcaccagagctccagaatgaatgtacaatgtaggcttttcactgacgcacgcaccatataggccgccggcggtgaaaaagtacggcgggccgggcacaatcactgcggtaggctggcaggacaggcaagcgcggcgtgaattccagcgtgacgcagttattactagacccccacaccacacccccacgtttgcatccacctcgagatgcccgtacctactgcgactttgctactgctggtgtctgtctactctactgtacagtctgtactctcctggggaagggaggcgtggccaccgcgggccgggggatggaccggaccgtggatggattcatttccctcccacttcgcctctgctattaaaccgccacctccctcacccgccatttttaataccgcgcgcgtctctcgctgcgccgtgccgtgccatgctgtctccgctgtccgctctcagtagtgctgcggctgccgctcacgcagtcgtcgccggggacggagagatgcgggttgctgatggcggcggcggtggcggtgctggtgagactggggcggggctccgcggcggcgtcggcggcggggccgtggtggaggacgggcacggggaggcaagcggcgggtgctcggcgagtcgcgggagcagcgcgcgcggatcgtctggcggcgactcgcctttaaccaggttcgtgcgccggggtggtcgactggggacgatggatccggagcgggacgagatgctgacttcctcgtcctcctacggtgagcacgacgtggccaacagcgcatcgcttttacagcattaaagttgatggacttttgcgcctcctgaagcttctgcaggttccacggagccacaagaggaggaggaggagggcgccggggcattagaagcggccaaggacaacaagcgggtacatggtgcacgaccccaggggcagaccaagaatgcagccccctgtttcactcgagaacgccaggaccagcggcatcatcggttgggagctgttcttttccaaggcaggaagggcagggcgcagcggccggcctcgcttgatttcggctgccctggtgttgccagatcctcgacgcattctccggggttcccggccgccggtgtcgcggtggtgaacaaggggatgggcgtatcgtatccgtcacacagtaggccggacgtgctgtctagtccggggacgccgagctgcaatcggcgtgggatggcaggcgttggctaccagcagggtcctcgttcagaaagagtgatcccgccttggaccggccatacaagccattctgggagcggcatggtgttaccttacagcactgggactgggaggacgctgccatcgaaatgggaggatgcagagaggtggatcttcagccccaaccccaaccccaacaatgcactcgggaggtcggtcccgcaactctggcggccaaaatccaaaagtgggcctcttggacctcccggtagattttgtggggcgtactcttgtgtttcgtcgtcggctcagtttcttgacaacggtagagttggaaatctcactgtgaatgcacattacatggctgggatgttgctacctgagcatatttgcgggggtgttatggactgggaaagggatgcaagtggagcatcgggtgaggatagtagcaatggccagggaggctgcaggcctggtcaaatgaatgttcggcatcctgctatgcagcccaccagggtttctcagcaacatggtagtgcaatggagtcatatcagtcattgcatgcttctcttcaatctatacaagatggtggaattgaaagcataaaagactctgccactagcagtgcccccattattctgaggaaggatgtggcaacacaaacaagccctgctattagcaggtcatcctctcccagcacgaggacttcgttctcccgttcactatcgtcacaacaagtcaaagagctggagagttgtttctctaagctcgaggtcagggatgtgcaggtggatgatcgggtgactctgactaggtggtccaagaaacatgtcacccgaggctctgaaaagaatgctacaaatattattgagtgcaagaaaaaaaccgtggattctaaatcttctgcctgggaagtaacacaaactgcaaagtgtatttcaatgattgagggagaggaagcaaaaatgactgcatgggagaatatgcagaaagctgaagcagaagcagccatacaaaagcttgtgataaaacttgaaaagaaaaggccatactcgctggagaggattttcaacaccctcaggtctggctctcggaagacacaggtggtacgcagtacatcaaccgcaaatcaggatcagcatatttccagaactatcaaaacggcgccaaacctcagcaagaacggtcaaatgagttcattgagtggatgctttacatgtcatgctttctagagatgtagctccatggaaaacacaggtggtccatgcacacttaacagtagtttccttgttttcaggcactattgttagtttaaagtgtagaggaaaaaaatagatccttgtcagtaaccaactagggactgaatcccccctcccccttttccaatggtcaatctatagcatcgatcataatctggattgtccttaagtttttattgtgctaggggaacataagaaagtatgtagagcaaaatgagaggagctgttgttaccctcaattctttgtgattattggtattccaccatataataataaaagaggttcctcttctactagta

SEQ ID NO: 39588 - DNA, 2885 bp, Zea Mays
ccagcactaggctggctgatgagcgcctcagagagtcagcggacagcggtgcgcgggtagccaccttctgtctggcactccggccgtcctccggctccgtgcactctgtagtcatagggagcaagagcaaggttaggcgctcggattagctgccagcctgcccgctacctctgacttgaagcaactcaatgccgtacagtactgtagaacgcaccagagctccagaatgaatgtacaatgtaggcttttcactgacgcacgcaccatataggccgccggcggtgaaaaagtacggcgggccgggcacaatcactgcggtaggctggcaggacaggcaagcgcggcgtgaattccagcgtgacgcagttattactagacccccacaccacacccccacgtttgcatccacctcgagatgcccgtacctactgcgactttgctactgctggtgtctgtctactctactgtacagtctgtactctcctggggaagggaggcgtggccaccgcgggccgggggatggaccggaccgtggatggattcatttccctcccacttcgcctctgctattaaaccgccacctccctcacccgccatttttaataccgcgcgcgtctctcgctgcgccgtgccgtgccatgctgtctccgctgtccgctctcagtagtgctgcggctgccgctcacgcagtcgtcgccggggacggagagatgcgggttgctgatggcggcggcggtggcggtgctggtgagactggggcggggctccgcggcggcgtcggcggcggggccgtggtggaggacgggcacggggaggcaagcggcgggtgctcggcgagtcgcgggagcagcgcgcgcggatcgtctggcggcgactcgcctttaaccaggttcgtgcgccggggtggtcgactggggacgatggatccggagcgggacgagatgctgacttcctcgtcctcctacggttccacggagccacaagaggaggaggaggagggcgccggggcattagaagcggccaaggacaacaagcgggtacatggtgcacgaccccaggggcagaccaagaatgcagccccctgtttcactcgagaacgccaggaccagcggcatcatcggttgggagctgttcttttccaaggcaggaagggcagggcgcagcggccggcctcgcttgatttcggctgccctggtgttgccagatcctcgacgcattctccggggttcccggccgccggtgtcgcggtggtgaacaaggggatgggcgtatcgtatccgtcacacagtaggccggacgtgctgtctagtccggggacgccgagctgcaatcggcgtgggatggcaggcgttggctaccagcagggtcctcgttcagaaagagtgatcccgccttggaccggccatacaagccattctgggagcggcatggtgttaccttacagcactgggactgggaggacgctgccatcgaaatgggaggatgcagagaggtggatcttcagccccaaccccaaccccaacaatgcactcgggaggtcggtcccgcaactctggcggccaaaatccaaaagtgggcctcttggacctcccggtagattttgtggggcgtactcttgtgtttcgtcgtcggctcagtttcttgacaacggtagagttggaaatctcactgtgaatgcacattacatggctgggatgttgctacctgagcatatttgcgggggtgttatggactgggaaagggatgcaagtggagcatcgggtgaggatagtagcaatggccagggaggctgcaggcctggtcaaatgaatgttcggcatcctgctatgcagcccaccagggtttctcagcaacatggtagtgcaatggagtcatatcagtcattgcatgcttctcttcaatctatacaagatggtggaattgaaagcataaaagactctgccactagcagtgcccccattattctgaggaaggatgtggcaacacaaacaagccctgctattagcaggtcatcctctcccagcacgaggacttcgttctcccgttcactatcgtcacaacaagtcaaagagctggagagttgtttctctaagctcgaggtcagggatgtgcaggtggatgatcgggtgactctgactaggtggtccaagaaacatgtcacccgaggctctgaaaagaatgctacaaatattattgagtgcaagaaaaaaaccgtggattctaaatcttctgcctgggaagtaacacaaactgcaaagtgtatttcaatgattgagggagaggaagcaaaaatgactgcatgggagaatatgcagaaagctgaagcagaagcagccatacaaaagcttgtgataaaacttgaaaagaaaaggccatactcgctggagaggattttcaacaccctcaggtctggctctcggaagacacaggtggtacgcagtacatcaaccgcaaatcaggatcagcatatttccagaactatcaaaacggcgccaaacctcagcaagaacggtcaaatgagttcattgagtggatgctttacatgtcatgctttctagagatgtagctccatggaaaacacaggtggtccatgcacacttaacagtagtttccttgttttcaggcactattgttagtttaaagtgtagaggaaaaaaatagatccttgtcagtaaccaactagggactgaatcccccctcccccttttccaatggtcaatctatagcatcgatcataatctggattgtccttaagtttttattgtgctaggggaacataagaaagtatgtagagcaaaatgagaggagctgttgttaccctcaattctttgtgattattggtattccaccatataataataaaagaggttcctcttctactagta

SEQ ID NO: 39589 - DNA, 2886 bp, Zea Mays
ccagcactaggctggctgatgagcgcctcagagagtcagcggacagcggtgcgcgggtagccaccttctgtctggcactccggccgtcctccggctccgtgcactctgtagtcatagggagcaagagcaaggttaggcgctcggattagctgccagcctgcccgctacctctgacttgaagcaactcaatgccgtacagtactgtagaacgcaccagagctccagaatgaatgtacaatgtaggcttttcactgacgcacgcaccatataggccgccggcggtgaaaaagtacggcgggccgggcacaatcactgcggtaggctggcaggacaggcaagcgcggcgtgaattccagcgtgacgcagttattactagacccccacaccacacccccacgtttgcatccacctcgagatgcccgtacctactgcgactttgctactgctggtgtctgtctactctactgtacagtctgtactctcctggggaagggaggcgtggccaccgcgggccgggggatggaccggaccgtggatggattcatttccctcccacttcgcctctgctattaaaccgccacctccctcacccgccatttttaataccgcgcgcgtctctcgctgcgccgtgccgtgccatgctgtctccgctgtccgctctcagtagtgctgcggctgccgctcacgcagtcgtcgccggggacggagagatgcgggttgctgatggcggcggcggtggcggtgctggtgagactggggcggggctccgcggcggcgtcggcggcggggccgtggtggaggacgggcacggggaggcaagcggcgggtgctcggcgagtcgcgggagcagcgcgcgcggatcgtctggcggcgactcgcctttaaccaggttcgtgcgccggggtggtcgactggggacgatggatccggagcgggacgagatgctgacttcctcgtcctcctacgcttctgcaggttccacggagccacaagaggaggaggaggagggcgccggggcattagaagcggccaaggacaacaagcgggtacatggtgcacgaccccaggggcagaccaagaatgcagccccctgtttcactcgaggaccagcggcatcatcggttgggagctgttcttttccaaggcaggaagggcagggcgcagcggccggcctcgcttgatttcggctgccctggtgttgccagatcctcgacgcattctccggggttcccggccgccggtgtcgcggtggtgaacaaggggatgggcgtatcgtatccgtcacacagtaggccggacgtgctgtctagtccggggacgccgagctgcaatcggcgtgggatggcaggcgttggctaccagcagggtcctcgttcagaaagagtgatcccgccttggaccggccatacaagccattctgggagcggcatggtgttaccttacagcactgggactgggaggacgctgccatcgaaatgggaggatgcagagaggtggatcttcagccccaaccccaaccccaacaatgcactcgggaggtcggtcccgcaactctggcggccaaaatccaaaagtgggcctcttggacctcccggtagattttgtggggcgtactcttgtgtttcgtcgtcggctcagtttcttgacaacggtagagttggaaatctcactgtgaatgcacattacatggctgggatgttgctacctgagcatatttgcgggggtgttatggactgggaaagggatgcaagtggagcatcgggtgaggatagtagcaatggccagggaggctgcaggcctggtcaaatgaatgttcggcatcctgctatgcagcccaccagggtttctcagcaacatggtagtgcaatggagtcatatcagtcattgcatgcttctcttcaatctatacaagatggtggaattgaaagcataaaagactctgccactagcagtgcccccattattctgaggaaggatgtggcaacacaaacaagccctgctattagcaggtcatcctctcccagcacgaggacttcgttctcccgttcactatcgtcacaacaagtcaaagagctggagagttgtttctctaagctcgaggtcagggatgtgcaggtggatgatcgggtgactctgactaggtggtccaagaaacatgtcacccgaggctctgaaaagaatgctacaaatattattgagtgcaagaaaaaaaccgtggattctaaatcttctgcctgggaagtaacacaaactgcaaagtgtatttcaatgattgagggagaggaagcaaaaatgactgcatgggagaatatgcagaaagctgaagcagaagcagccatacaaaagcttgtgataaaacttgaaaagaaaaggccatactcgctggagaggattttcaacaccctcaggtctggctctcggaagacacaggtggtacgcagtacatcaaccgcaaatcaggatcagcatatttccagaactatcaaaacggcgccaaacctcagcaagaacggtcaaatgagttcattgagtggatgctttacatgtcatgctttctagagatgtagctccatggaaaacacaggtggtccatgcacacttaacagtagtttccttgttttcaggcactattgttagtttaaagtgtagaggaaaaaaatagatccttgtcagtaaccaactagggactgaatcccccctcccccttttccaatggtcaatctatagcatcgatcataatctggattgtccttaagtttttattgtgctaggggaacataagaaagtatgtagagcaaaatgagaggagctgttgttaccctcaattctttgtgattattggtattccaccatataataataaaagaggttcctcttctactagta

SEQ ID NO: 39590 - DNA, 1314 bp, Zea Mays
tccttgcaccagcggaggtccagcccgagcgcgtccgatacgtcctccgagctccatccggcccgccggagcgagtcggagcactggtcggccttgagcaggagcgcatcgagcactgcgtctgagtccaccacggggaccgccgcctcctcaccgtcgaacaccccggaggccgccacctcgaccatctccgtcacctccgtgtccctccacccgccctgcctcagcacgtggcccagccggtcaaggtagctgtcgacccagtgcgggttcctgggccacctagcaggcggtggcgatgcgcaccctgaggacagcgacgacgctgtggatgcatccgagaacgacgagttgcggcggcgatggtcggacgccgcgtcgctccagaattctatccagcgcggcgccttaccgcggcaggccgcgtcgaggctgcggcgcgtgcacggcgtggcgacggcctccccggcgtactgctgctgctgcgccaccggaggcggcggcgcccgcagatccggcggctggaagcaggagtcgcgggtgacgaagtggaggatgtcgaggccgcagcagaggacgcggtcgtcggtgacgaagaacaccgggttgccggcgaggcaggggcggcagggcaggaagcagcggtcgaagagcggcacgagcagcggcgcgcggcggatggcggagcgcgcgagccgcagcgcgcggtcggggtcggcggggcgtggcccccagcagcgcggccacagcgcgccccgtgcgatctgcagcgacgccgccacgatgggcatgtcgaacgcggagcggagccccgcgcacgagcgccagtcagcgaacccgggccccgacgggaggcccgcggcgaggacggcgcggaggtcgggcgggaacgcgaaccccatctcggcctcggcgtgcgccagctcgagctccgtgaggcccgggagcaccgccaccccggaggcccggaggtggcccagcaccgcagccgcgagcggggcgaaggagtgcagcccctgccgcggggaggccgacgccgaggacgggctcgccgcggcgcgcgtggaaaggcggcgcagccccgccgcgtgcgccgccggcgtgaggctggccatccggcggtcgacgtccaccattgcagccgcccaacgccgccgccaagcctcctgccttggacagaggagacgctgagctgtagctaaaggtcggttgggaaacggggaggcgggactgtatagtgggcctgtttctgatcagcttttcctagaatctggctttgggagaatctaagtatcattacgattacgtgtggag

SEQ ID NO: 39591 - DNA, 2408 bp, Zea Mays
ggggtcgttgtctcgttccaaactagcctgaccaggtcgtccaacgactccgctcacccttcgcggtcgcccgcgcgatctctccaccacttccccgccggcgcctgctaggcgtccgcgaggagggccagcgatgaagggctcctcccactcgcaggcgggggcgcaggcggtacggaggcggcgctgggggtgtcttctgccgctcctcgttggcgccgccttcctcgccgagatcgcgttcctcggccgcctcgacatggcgaagaacgccgaggcggtcgagagctggaccacctccttttaccgccgctccgccgatttgggcgatgccgttggcgggggcgcagcctcgagggcaggcggcgacagcgaggacgaagagatccggctgtgcgagcagcggctcgagagggaggatgccgtgccctacgaccgcgactttgacagtgatcccgtgcttgtcggtggcgctgccaaggattggaataaatgctacgtaggatgtgaatttggtttttctgcgagtaagacacctgatgctacatttggaattgcaccagatccttctgtagatggtatcctcagatcaatggaatcatctcaatattattcagagaataatattgatgtggctcgagggtgggtaagaaccaagttattctgatcagtgatttcctacaatttctttccccatttgaattgacattcagaatttggtacacataccttaaactgcactcttcatttaatactgatggaccataaaattatctatttgtgtatattggtcatttatacactggaactagtttttcttctgatatctgtgctaagaagtgaaatgctaatggaccaatgccaatgcagtttgcagtttcttcttattgtttatttatgggattttatgaattatgaagtattattcaattgccaaacctatttcttgctgatgtttaaccattatgttatttcaattaaagatgaaaaacgggtgttcgtcaaagtaagcatccatgacaagcccctctgcttggaatacttttggtcttgaattaagtaacgtcattaattgctatcctcatactagaccatgtttttatcattcatgccttggtattcaactttggacttttgttgtaaaaaatatgatttatttgagaaccaatgttctattggtctggcaatttcattgctttctataacaggagagggtacaagattgtgatgacaaccagcctttcttcagacgtaccagttggctacttttcatgggctgaatatgatatcatggcacctgtgcctccaaagactgaagaagctcttgctgcagcctttatttctaactgtggtgcacgaaactttcgtttgcaagcccttgagatgcttgaaaacttggatgtcaaaatagattcatatggtagttgtcatcgtaaccgtgacggcaaagtggacaaagtggacactttgaagcgctacagattcagcttggcatttgagaattctaatgaggaggattatgtaactgaaaagttttttcagtcactagtagcaggttctattccggttgttgttggtgctccaaatattcaagagttttctccgggagaaggcgcaatattacatattaaggagcttgatgatgttgcttcagttgctaagacaatgaaaaatattgcttcaaaccctgatgccttcaatcaatctttgaggtggaagtatgatggtccatccgattctttcaaagctcttattgacatggcagcggttcattcatcttgtcgtctttgtatacatattgctaccaagatccatttaaaggaggaaaggactccaaaatttacaaatcgtccttgtagctgttccaccaaaaagggaacaatttaccacttatttatccgagagagagggcggtttaagtcagagagcatttacatgaggccagttaactctgggagccttggaatccgcagtgctcggtaaatttaggtccctcaaccacgttcctgtatggaaggatgaaaggccaccgagcattagaggtggggatgacctgaaattatacagaatttacccagtcggtctaacgcaacgtcaggctttgtacggttttagatttagggatgattctgaactcgagcaatatatcaaagaccatccctgtgcaaagcttgaagtaatttttgtgtaactactatgccctaggcttaacgttttccccccgattcttactgaactctgtgtgcgagtttcagttgtactgtaatgtagagtgttatgtgtagcaaagaaactcatgccagtacggatcatgtgtcggttgtaaattttccatgacagtaaacatcattccttcttttcagtaacaaccgcaaacaaattaacacgtttcttcaagaattcatgcc

SEQ ID NO: 39592 - DNA, 1732 bp, Zea Mays
ggggtcgttgtctcgttccaaactagcctgaccaggtcgtccaacgactccgctcacccttcgcggtcgcccgcgcgatctctccaccacttccccgccggcgcctgctaggcgtccgcgaggagggccagcgatgaagggctcctcccactcgcaggcgggggcgcaggcggtacggaggcggcgctgggggtgtcttctgccgctcctcgttggcgccgccttcctcgccgagatcgcgttcctcggccgcctcgacatggcgaagaacgccgaggcggtcgagagctggaccacctccttttaccgccgctccgccgatttgggcgatgccgttggcgggggcgcagcctcgagggcaggcggcgacagcgaggacgaagagatccggctgtgcgagcagcggctcgagagggaggatgccgtgccctacgaccgcgactttgacagtgatcccgtgcttgtcggtggcgctgccaaggattggaataaatgctacgtaggatgtgaatttggtttttctgcgagagagggtacaagattgtgatgacaaccagcctttcttcagacgtaccagttggctacttttcatgggctgaatatgatatcatggcacctgtgcctccaaagactgaagaagctcttgctgcagcctttatttctaactgtggtgcacgaaactttcgtttgcaagcccttgagatgcttgaaaacttggatgtcaaaatagattcatatggtagttgtcatcgtaaccgtgacggcaaagtggacaaagtggacactttgaagcgctacagattcagcttggcatttgagaattctaatgaggaggattatgtaactgaaaagttttttcagtcactagtagcaggttctattccggttgttgttggtgctccaaatattcaagagttttctccgggagaaggcgcaatattacatattaaggagcttgatgatgttgcttcagttgctaagacaatgaaaaatattgcttcaaaccctgatgccttcaatcaatctttgaggtggaagtatgatggtccatccgattctttcaaagctcttattgacatggcagcggttcattcatcttgtcgtctttgtatacatattgctaccaagatccatttaaaggaggaaaggactccaaaatttacaaatcgtccttgtagctgttccaccaaaaagggaacaatttaccacttatttatccgagagagagggcggtttaagtcagagagcatttacatgagatcaggccagttaactctgggagccttggaatccgcagtgctcggtaaatttaggtccctcaaccacgttcctgtatggaaggatgaaaggccaccgagcattagaggtggggatgacctgaaattatacagaatttacccagtcggtctaacgcaacgtcaggctttgtacggttttagatttagggatgattctgaactcgagcaatatatcaaagaccatccctgtgcaaagcttgaagtaatttttgtgtaactactatgccctaggcttaacgttttccccccgattcttactgaactctgtgtgcgagtttcagttgtactgtaatgtagagtgttatgtgtagcaaagaaactcatgccagtacggatcatgtgtcggttgtaaattttccatgacagtaaacatcattccttcttttcagtaacaaccgcaaacaaattaacacgtttcttcaagaattcatgcc

SEQ ID NO: 39593 - DNA, 1608 bp, Zea Mays
acagtcaaaagctccccattcctcttccccttctcacccggcactcgaactctgcgggccagtttgcaatgactcatcaagcagctttggcaagtgttacagcacaggcacaaatgcacttgcagtcaccaactccatctgcatgttcggaagtgccatcaagtccattttatatgacaccaagatctctagtgccattgcagcattcaccatcagtaactgaaggaaatatttgtacaccaattgctgacaagtcattttcatctgattcaaaatcacaccatgttgtaaatatggtagctgatggcttcaactggaggaaatatggtcagaagcaggtgaagagtagtgataattccaggagctactatagatgcacaaactctggttgtctcgctaaaaagaaggttgagcatttccctgatggccgcgttgtggaaatcatttacagaggagcccataatcatgaaccaccacagaagaccagatttgcaaaggaaagagtgactcctattagtgttccctctggaggcgaaaccttgaggcttgtgaacacagaaattgtagaatctagcacgcctacctgtgaattggaacggagtgccatctcagaaacttctgagcagcatctcttttgctcaagtgactgcgaaggggatgctggtaacaaatctgaagatgaacatcctagcgcggaagccctgccaaagcgaagaacacttgaggctacagcaccaaatttaacgccggttcgcagaactgttagagagcaaaagattattgtgcaggctggaaagatgagtgatggatacagatggcgtaagtatggacagaaaattgtgaagggaaatccaaaccccaggagttattaccgctgcacgcacggtggatgccctgtccgtaagcatgtggagaaggcgccagatgatgttaacaatattgttgtaacgtatgaaggcaaacacaaccacgacgaacctttcagaagcagcagcataccagtttctgtaatcagtccatcagcgacagccactgagcaacccaacacatcaagtacgtcagatgagagacctccaaccattacccagaaggacgccaacagtgagtctgataaggagacaaccttgaaatttggaggcgagaaggcactcgaatctgcgcaaacgctgctcagcatcaaaactaactccgatgacatgaagaactctgtcctgaaggaaacttctgctgcagttccagtccaaaacaattgagcatgctgagatagggtgattctattgacatctcttaggctgtcatatttattggttgagtgatatgctattatgttaacttgtatgacgtgaggcttggtgttcggtattccgtgtggagcatttgaggaagcattaggtttcaggaagccacgactggttgtttctgcctgtatagattcccattccctagtgtgtacaggtactgtattttatctgaggccagataacatgtgtggggtggttcttgagaacctgtgtgtgctgtattgttctagctcgatctattgcaatagctgatacgagattgtcatttatttatcggtataacacatcgtgcgtgccgtttgcagtt

SEQ ID NO: 39594 - DNA, 2092 bp, Zea Mays
acagtcaaaagctccccattcctcttccccttctcacccggcactcgaactctgcggccctgcaaaccctagctttcgctccatggccgacggcgatccggagccggcgccagcgccggcaccggcactggctaacgagaagctccatgtccgggcggcggcctacgtggatgagacgcgcccgccgccaccgctggagccctccgggggtccggacgaggagaagcgcccgcccgaagaggtagaagcggaggtggagatgcacccgccgcgggaaccaaccggggagccgcccgttgatcgcccgggggtggaggtggtggcggacatgaaggcgaacgaagtggagaaggaaaggggggatcgggcaaaggagaagcgggagaaggataaagggaaggggaaggaggagaaagagaaggtggacgaagaggcgaaggggaaagtgactgcggtgatgaaggtggatgggacggagaaggaggtcaagccgacccggcggccagctggggccagcgcggagacgcccatcctagcggtgccggtggtggccgtgccttgcttcatcgcgcctccagggtttgcgcacaggcacaaatgcacttgcagtcaccaactccatctgcatgttcggaagtgccatcaagtccattttatatgacaccaagatctctagtgccattgcagcattcaccatcagtaactgaaggaaatatttgtacaccaattgctgacaagtcattttcatctgattcaaaatcacaccatgttgtaaatatggtagctgatggcttcaactggaggaaatatggtcagaagcaggtgaagagtagtgataattccaggagctactatagatgcacaaactctggttgtctcgctaaaaagaaggttgagcatttccctgatggccgcgttgtggaaatcatttacagaggagcccataatcatgaaccaccacagaagaccagatttgcaaaggaaagagtgactcctattagtgttccctctggaggcgaaaccttgaggcttgtgaacacagaaattgtagaatctagcacgcctacctgtgaattggaacggagtgccatctcagaaacttctgagcagcatctcttttgctcaagtgactgcgaaggggatgctggtaacaaatctgaagatgaacatcctagcgcggaagccctgccaaagcgaagaacacttgaggctacagcaccaaatttaacgccggttcgcagaactgttagagagcaaaagattattgtgcaggctggaaagatgagtgatggatacagatggcgtaagtatggacagaaaattgtgaagggaaatccaaaccccaggagttattaccgctgcacgcacggtggatgccctgtccgtaagcatgtggagaaggcgccagatgatgttaacaatattgttgtaacgtatgaaggcaaacacaaccacgacgaacctttcagaagcagcagcataccagtttctgtaatcagtccatcagcgacagccactgagcaacccaacacatcaagtacgtcagatgagagacctccaaccattacccagaaggacgccaacagtgagtctgataaggagacaaccttgaaatttggaggcgagaaggcactcgaatctgcgcaaacgctgctcagcatcaaaactaactccgatgacatgaagaactctgtcctgaaggaaacttctgctgcagttccagtccaaaacaattgagcatgctgagatagggtgattctattgacatctcttaggctgtcatatttattggttgagtgatatgctattatgttaacttgtatgacgtgaggcttggtgttcggtattccgtgtggagcatttgaggaagcattaggtttcaggaagccacgactggttgtttctgcctgtatagattcccattccctagtgtgtacaggtactgtattttatctgaggccagataacatgtgtggggtggttcttgagaacctgtgtgtgctgtattgttctagctcgatctattgcaatagctgatacgagattgtcatttatttatcggtataacacatcgtgcgtgccgtttgcagtt

SEQ ID NO: 39595 - DNA, 2595 bp, Zea Mays
agagagccgaagagagggaatgaatgagcttgacctaagtttaatgagccagcggggctgatttgggatggctgggctgttttttcttttctttatcattttttcttctttattaatatttttgtcctaagcattttctcaaatatcaatatttaagctatttttaaatatatttaaggcgtcacctcgccttacgctttaccgcttaaaaggtaaaaacgaggtcataattgatgaatctcaagagggaaaacttgaattattaaccttgactatcccattatcataagataacgagtcgtcataattgaacatcgccttcctgataacatccagcgtgacatgagagaacaaagattccatctccacaatccacaccctccccatggtctgcttccttgtccaatttctcgtacagctgtgtgaagcttttccaaagagaccaatcatagtcacatactgcagagcaaacaaacttgaggttagtaaacaaagaaaccaatacagtagaccacagtaagtagacatgttggaccttctgatacaatgcaggaacaatagtacgcctccaaactcagcagagatcaaacctgtccccatcacaaactccaatacctctgcaagaatccctgcatcaaccacaacggccaaacgacatgttcacttcagttcaaatggaaatcagctgtgtcgccgtagcaacgatggctgtatgcagaccagacttcatcctgtcttatgcttacctaccgaccgtgtgatgctgcatggggctcctaccggctgatggcgtcgcgccgtcgctgacattgtcgaggagattgctgccaatgacatcactatgaatggctgccctctacacgagtgtggtgcaccccccagccatgcccacatttgcttgttgacagatgaaacaatgcccaggagggagccgaaggtgcaggggccagatgccgggacttcgtcgaggccaggtagtatggggtgtcgacaagacggatggatttgaggccaggtgtggcggtgggtggcagccaggcaagggccagtttgcaatgactcatcaagcagctttggcaagtgttacagcacaggcacaaatgcacttgcagtcaccaactccatctgcatgttcggaagtgccatcaagtccattttatatgacaccaagatctctagtgccattgcagcattcaccatcagtaactgaaggaaatatttgtacaccaattgctgacaagtcattttcatctgattcaaaatcacaccatgttgtaaatatggtagctgatggcttcaactggaggaaatatggtcagaagcaggtgaagagtagtgataattccaggagctactatagatgcacaaactctggttgtctcgctaaaaagaaggttgagcatttccctgatggccgcgttgtggaaatcatttacagaggagcccataatcatgaaccaccacagaagaccagatttgcaaaggaaagagtgactcctattagtgttccctctggaggcgaaaccttgaggcttgtgaacacagaaattgtagaatctagcacgcctacctgtgaattggaacggagtgccatctcagaaacttctgagcagcatctcttttgctcaagtgactgcgaaggggatgctggtaacaaatctgaagatgaacatcctagcgcggaagccctgccaaagcgaagaacacttgaggctacagcaccaaatttaacgccggttcgcagaactgttagagagcaaaagattattgtgcaggctggaaagatgagtgatggatacagatggcgtaagtatggacagaaaattgtgaagggaaatccaaaccccaggagttattaccgctgcacgcacggtggatgccctgtccgtaagcatgtggagaaggcgccagatgatgttaacaatattgttgtaacgtatgaaggcaaacacaaccacgacgaacctttcagaagcagcagcataccagtttctgtaatcagtccatcagcgacagccactgagcaacccaacacatcaagtacgtcagatgagagacctccaaccattacccagaaggacgccaacagtgagtctgataaggagacaaccttgaaatttggaggcgagaaggcactcgaatctgcgcaaacgctgctcagcatcaaaactaactccgatgacatgaagaactctgtcctgaaggaaacttctgctgcagttccagtccaaaacaattgagcatgctgagatagggtgattctattgacatctcttaggctgtcatatttattggttgagtgatatgctattatgttaacttgtatgacgtgaggcttggtgttcggtattccgtgtggagcatttgaggaagcattaggtttcaggaagccacgactggttgtttctgcctgtatagattcccattccctagtgtgtacaggtactgtattttatctgaggccagataacatgtgtggggtggttcttgagaacctgtgtgtgctgtattgttctagctcgatctattgcaatagctgatacgagattgtcatttatttatcggtataacacatcgtgcgtgccgtttgcagtt

SEQ ID NO: 39596 - DNA, 889 bp, Zea Mays
ctgtgtaataaaattaataaatagaaaagatggttatgccgcatgagtgatgatgttaatatacaagtgaattgtctacctctctccattagcttaattttttgggttgaactggttggtacatacaacttaatatggcatcaaagttaaaggtctcgaattcaaatcctgattagtgtagttaaataaaaataattgttgctcgcttctgttccacgtctgaggcctgagagagcctcaacatgagggcgagtgttagaatacaactgaaaaggaaaaggaaaaatctggtgaccttgctgaaagacggtgataatattattactagccatgctgccaaagcggatttagtggatcagttttattccaaccttattggtcagtcggtctccagggagaataccattgatttagctgctctcggcctcccagctcataacctctccatcttggacgcccctttcactgagcaggaggttctagcaactgtcttgaacctacctgctgacaaggcccctggcccagatggttttactgggaggttttataaggtttgttggaacatcatcaaagtggacgtactcaatgcagtttcagcaatttggtgtaggaacttcaataacttggataaagttaattctgcatatattactatgatcccaaagtttgatggggctgatcaggtgaaggatttcagaccgattagtcttgtgcacagctttgcaaaattggtaaccaagatcctggccaataggcttgctggtcatctgaatgagcttgtctccccaaatcagagtgccttcatcaaaggcagatttatacaggacaattttatgttagtgcagcaaacttcaagatttttacatcagcaaaataaggcatgtcttct

SEQ ID NO: 39597 - DNA, 2171 bp, Zea Mays
cgccattccgcgcgagatcagtagggtgcgcgtgctggtgctggctacggccatggcgacgcccaccagcaccgtcacccgcggcggcaacaggcattggcattgtacccaagtgcttccactgctgttgctagtaccactatgcttcgcgcttctggttgagagcggcggcatccccacgacgctggacgggccgtttccgccggccacgcgcgcgttcgaccgcgcgctgcggcagggcagcaacgacgtcccgctcacggatccgcgccttgcgccccgcgtgcagcccccggcgcccgagcagatcgcgctcgccgcctccgccgacgccgactcgctctgggtctcttgggtcacgggccgcgcgcgcgtgggctcctccaacctcgcgccgctcgaccccgccgccgccggcagcgaagtctggtacggcgagcgcagcgccgccgacgccgcatcctatccgcacgtggtcacggggtccgccgaggtgtacagccagctgtacccgtacccgggcctgctcaactacacctctggcgccatccatcacgtccgtctccgcggcctgcgccctgccacgcgctactactaccgctgcggcgacagcagcctccccggcggcctcagcgacgagcactccttcaccaccctgcccgccaccggcgccggatgctacccgcgccgcgtcgctgtggtaggtgaccttggcctcacggggaactccaccgccaccgtcgaccacctcgcccgcaacgacccatccctggtcctcatggttggggacatgacctacgcgaaccagtacctcaccaccggcggcaagggagtcccctgcttctcctgctccttccccaaagctccgattcgggagtcctaccagccaagatgggatggatggggaagattcatggagccgattacatcgaagattccgctgatggtgatagaggggaaccatgagattgaaccgcagggtcacggtggagaggtgaccttcgcgtcttacttggcacggttcgctgttccatccaaggagtctggatccaacaccaaattctactactccttcaacgccggtggcatccattttatcatgctcggtgcctacatcgactacaaccgcacaggagttcagtactcgtggttggaaaaggatttgcagagggttgatcgacgagccaccccttgggtcgtggctgcttggcacccaccttggtataacagctattcctcgcactaccaagaattcgagtgcatgaggcaagaaatggaagaacttttatatgaatatcaggtacatgcatacgaaaggatggaccgagtatttaactacacattggacccctgtggcccgatttacatcggcattggagacggcgggaacattgaaaaaattgacatggatcatgctgatgaccctggaaagtgtccctcaccaagtgataaccaccctgaatttggtgggctctgccatctgaacttcacttctggccctgccaagggcaaattctgctgggaccgacagccagaatggagtgcatacagagagagcagttttggtcatgggattctagaggtcctgaattcaacatatgccttatggacatggcaccgtaaccaggacgcatatgcagagaacagtgtgggagaccagatctacattgtacgacagcctgacaagtgccttctgcagccagctagtgcgtcgtctctcaattgatagccccattggaggatgcccttctctagtgagtagtaacagctccggtgggtccattacaaatggccagctctcctacaaaatgtttgtaattatgtgtgtagctttaatgtgaaagagttaggtggtctgagcagtactcatctcctttttaatataatactttagggttgttttactctcggcgggtcgaaatttttttgtgtagctttaatctgcacagttgaaggaacatttcataccaccattacttttcttgattttataattgtagagcggcagaatgcaagatgcaccttactgaatattatactgcaaggtttgttgagtctttttttgtgtttattatcgatttattgtaaggaggcaacaatctttgttttattgttgtataaagaaatgtgaaacaatagcatttggtacataattgagttcctgcttgttc

SEQ ID NO: 39598 - DNA, 2073 bp, Zea Mays
cgccattccgcgcgagatcagtagggtgcgcgtgctggtgctggctacggccatggcgacgcccaccagcaccgtcacccgcggcggcaacaggcattggcattgtacccaagtgcttccactgctgttgctagtaccactatgcttcgcgcttctggttgagagcggcggcatccccacgacgctggacgggccgtttccgccggccacgcgcgcgttcgaccgcgcgctgcggcagggcagcaacgacgtcccgctcacggatccgcgccttgcgccccgcgtgcagcccccggcgcccgagcagatcgcgctcgccgcctccgccgacgccgactcgctctgggtctcttgggtcacgggccgcgcgcgcgtgggctcctccaacctcgcgccgctcgaccccgccgccgccggcagcgaagtctggtacggcgagcgcagcgccgccgacgccgcatcctatccgcacgtggtcacggggtccgccgaggtgtacagccagctgtacccgtacccgggcctgctcaactacacctctggcgccatccatcacgtccgtctccgcggcctgcgccctgccacgcgctactactaccgctgcggcgacagcagcctccccggcggcctcagcgacgagcactccttcaccaccctgcccgccaccggcgccggatgctacccgcgccgcgtcgctgtggtaggtgaccttggcctcacggggaactccaccgccaccgtcgaccacctcgcccgcaacgacccatccctggtcctcatggttggggacatgacctacgcgaaccagtacctcaccaccggcggcaagggagtcccctgcttctcctgctccttccccaaagctccgattcgggagtcctaccagccaagatgggatggatggggaagattcatggagccgattacatcgaagattccgctgatggtgatagaggggaaccatgagattgaaccgcagggtcacggtggagaggtgaccttcgcgtcttacttggcacggttcgctgttccatccaaggagtctggatccaacaccaaattctactactccttcaacgccggtggcatccattttatcatgctcggtgcctacatcgactacaaccgcacaggagttcagtactcgtggttggaaaaggatttgcagagggttgatcgacgagccaccccttgggtcgtggctgcttggcacccaccttggtacatgcatacgaaaggatggaccgagtatttaactacacattggacccctgtggcccgatttacatcggcattggagacggcgggaacattgaaaaaattgacatggatcatgctgatgaccctggaaagtgtccctcaccaagtgataaccaccctgaatttggtgggctctgccatctgaacttcacttctggccctgccaagggcaaattctgctgggaccgacagccagaatggagtgcatacagagagagcagttttggtcatgggattctagaggtcctgaattcaacatatgccttatggacatggcaccgtaaccaggacgcatatgcagagaacagtgtgggagaccagatctacattgtacgacagcctgacaagtgccttctgcagccagctaatagccccattggaggatgcccttctctagtgagtagtaacagctccggtgggtccattacaaatggccagctctcctacaaaatgtttgtaattatgtgtgtagctttaatgtgaaagagttaggtggtctgagcagtactcatctcctttttaatataatactttagggttgttttactctcggcgggtcgaaatttttttgtgtagctttaatctgcacagttgaaggaacatttcataccaccattacttttcttgattttataattgtagagcggcagaatgcaagatgcaccttactgaatattatactgcaaggtttgttgagtctttttttgtgtttattatcgatttattgtaaggaggcaacaatctttgttttattgttgtataaagaaatgtgaaacaatagcatttggtacataattgagttcctgcttgttc

SEQ ID NO: 39599 - DNA, 2591 bp, Zea Mays
cgccattccgcgcgagatcagtagggtgcgcgtgctggtgctggctacggccatggcgacgcccaccagcaccgtcacccgcggcggcaacaggcattggcattgtacccaagtgcttccactgctgttgctagtaccactatgcttcgcgcttctggttgagagcggcggcatccccacgacgctggacgggccgtttccgccggccacgcgcgcgttcgaccgcgcgctgcggcagggcagcaacgacgtcccgctcacggatccgcgccttgcgccccgcgtgcagcccccggcgcccgagcagatcgcgctcgccgcctccgccgacgccgactcgctctgggtctcttgggtcacgggccgcgcgcgcgtgggctcctccaacctcgcgccgctcgaccccgccgccgccggcagcgaagtctggtacggcgagcgcagcgccgccgacgccgcatcctatccgcacgtggtcacggggtccgccgaggtgtacagccagctgtacccgtacccgggcctgctcaactacacctctggcgccatccatcacgtccgtctccgcggcctgcgccctgccacgcgctactactaccgctgcggcgacagcagcctccccggcggcctcagcgacgagcactccttcaccaccctgcccgccaccggcgccggatgctacccgcgccgcgtcgctgtggtaggtgaccttggcctcacggggaactccaccgccaccgtcgaccacctcgcccgcaacgacccatccctggtcctcatggttggggacatgacctacgcgaaccagtacctcaccaccggcggcaagggagtcccctgcttctcctgctccttccccaaagctccgattcgggagtcctaccagccaagatgggatggatggggaagattcatggagccgattacatcgaagattccgctgatggtgatagaggggaaccatgagattgaaccgcagggtcacggtggagaggtgaccttcgcgtcttacttggcacggttcgctgttccatccaaggagtctggatccaacaccaaattctactactccttcaacgccggtggcatccattttatcatgctcggtgcctacatcgactacaaccgcacaggagttcagtactcgtggttggaaaaggatttgcagagggttgatcgacgagccaccccttgggtcgtggctgcttggcacccaccttggtataacagctattcctcgcactaccaagaattcgagtgcatgaggcaagaaatggaagaacttttatatgaatatcaggttgacattgttttctcaggacatgtaagctcacacatccggtgaaggcttgattcgaatttcatttcaccgcttcagaatcaaggcctgctgcagtttacttaaaatttagcattttatcattcatgtagcattaactgggctccaatagaatatgcattgtggcaaatttactaactaccgcaatgtgtacatagcgagaagctctggtccatgacactagtattataattaatttgaatattatttcctataaacattgtcattgtcttgaatttggtaactgatatttgtggttcgatattcggatactaaaggtacatgcatacgaaaggatggaccgagtatttaactacacattggacccctgtggcccgatttacatcggcattggagacggcgggaacattgaaaaaattgacatggatcatgctgatgaccctggaaagtgtccctcaccaagtgataaccaccctgaatttggtgggctctgccatctgaacttcacttctggccctgccaagggcaaattctgctgggaccgacagccagaatggagtgcatacagagagagcagttttggtcatgggattctagaggtcctgaattcaacatatgccttatggacatggcaccgtaaccaggacgcatatgcagagaacagtgtgggagaccagatctacattgtacgacagcctgacaagtgccttctgcagccagctagtgcgtcgtctctcaattggtgatttgatttgatgacaaaatttctgctattatgtattaattaatatatattcatatccattagattctaagttgttcactatcttggttatttgttttagatagccccattggaggatgcccttctctagtgagtagtaacagctccggtgggtccattacaaatggccagctctcctacaaaatgtttgtaattatgtgtgtagctttaatgtgaaagagttaggtggtctgagcagtactcatctcctttttaatataatactttagggttgttttactctcggcgggtcgaaatttttttgtgtagctttaatctgcacagttgaaggaacatttcataccaccattacttttcttgattttataattgtagagcggcagaatgcaagatgcaccttactgaatattatactgcaaggtttgttgagtctttttttgtgtttattatcgatttattgtaaggaggcaacaatctttgttttattgttgtataaagaaatgtgaaacaatagcatttggtacataattgagttcctgcttgttc

SEQ ID NO: 39600 - DNA, 2176 bp, Zea Mays
cgccattccgcgcgagatcagtagggtgcgcgtgctggtgctggctacggccatggcgacgcccaccagcaccgtcacccgcggcggcaacaggcattggcattgtacccaagtgcttccactgctgttgctagtaccactatgcttcgcgcttctggttgagagcggcggcatccccacgacgctggacgggccgtttccgccggccacgcgcgcgttcgaccgcgcgctgcggcagggcagcaacgacgtcccgctcacggatccgcgccttgcgccccgcgtgcagcccccggcgcccgagcagatcgcgctcgccgcctccgccgacgccgactcgctctgggtctcttgggtcacgggccgcgcgcgcgtgggctcctccaacctcgcgccgctcgaccccgccgccgccggcagcgaagtctggtacggcgagcgcagcgccgccgacgccgcatcctatccgcacgtggtcacggggtccgccgaggtgtacagccagctgtacccgtacccgggcctgctcaactacacctctggcgccatccatcacgtccgtctccgcggcctgcgccctgccacgcgctactactaccgctgcggcgacagcagcctccccggcggcctcagcgacgagcactccttcaccaccctgcccgccaccggcgccggatgctacccgcgccgcgtcgctgtggtaggtgaccttggcctcacggggaactccaccgccaccgtcgaccacctcgcccgcaacgacccatccctggtcctcatggttggggacatgacctacgcgaaccagtacctcaccaccggcggcaagggagtcccctgcttctcctgctccttccccaaagctccgattcgggagtcctaccagccaagatgggatggatggggaagattcatggagccgattacatcgaagattccgctgatggtgatagaggggaaccatgagattgaaccgcagggtcacggtggagaggtgaccttcgcgtcttacttggcacggttcgctgttccatccaaggagtctggatccaacaccaaattctactactccttcaacgccggtggcatccattttatcatgctcggtgcctacatcgactacaaccgcacaggagttcagtactcgtggttggaaaaggatttgcagagggttgatcgacgagccaccccttgggtcgtggctgcttggcacccaccttggtataacagctattcctcgcactaccaagaattcgagtgcatgaggcaagaaatggaagaacttttatatgaatatcaggttgacattgttttctcaggacatgtacatgcatacgaaaggatggaccgagtatttaactacacattggacccctgtggcccgatttacatcggcattggagacggcgggaacattgaaaaaattgacatggatcatgctgatgaccctggaaagtgtccctcaccaagtgataaccaccctgaatttggtgggctctgccatctgaacttcacttctggccctgccaagggcaaattctgctgggaccgacagccagaatggagtgcatacagagagagcagttttggtcatgggattctagaggtcctgaattcaacatatgccttatggacatggcaccgtaaccaggacgcatatgcagagaacagtgtgggagaccagatctacattgtacgacagcctgacaagtgccttctgcagccagctaatagccccattggaggatgcccttctctagtgagtagtaacagctccggtgggtccattacaaatggccagctctcctacaaaatgtttgtaattatgtgtgtagctttaatgtgaaagagttaggtggtctgagcagtactcatctcctttttaatataatactttagggttgttttactctcggcgggtcgaaatttttttgtgtagctttaatctgcacagttgaaggaacatttcataccaccattacttttcttgattttataattgtagagcggcagaatgcaagatgcaccttactgaatattatactgcaaggtttgttgagtctttttttgtgtttattatcgatttattgtaaggaggcaacaatctttgttttattgttgtataaagaaatgtgaaacaatagcatttggtacataattgagttcctgcttgttc

SEQ ID NO: 39601 - DNA, 1288 bp, Zea Mays
catctcctgaatcaactccagattaattcatggagccgattacatcgaagattccgctgatggtgatagaggggaaccatgagattgaaccgcagggtcacggtggagaggtgaccttcgcgtcttacttggcacggttcgctgttccatccaaggagtctggatccaacaccaaattctactactccttcaacgccggtggcatccattttatcatgctcggtgcctacatcgactacaaccgcacaggagttcagtactcgtggttggaaaaggatttgcagagggttgatcgacgagccaccccttgggtcgtggctgcttggcacccaccttggtataacagctattcctcgcactaccaagaattcgagtgcatgaggcaagaaatggaagaacttttatatgaatatcaggttgacattgttttctcaggacatgtacatgcatacgaaaggatggaccgagtatttaactacacattggacccctgtggcccgatttacatcggcattggagacggcgggaacattgaaaaaattgacatggatcatgctgatgaccctggaaagtgtccctcaccaagtgataaccaccctgaatttggtgggctctgccatctgaacttcacttctggccctgccaagggcaaattctgctgggaccgacagccagaatggagtgcatacagagagagcagttttggtcatgggattctagaggtcctgaattcaacatatgccttatggacatggcaccgtaaccaggacgcatatgcagagaacagtgtgggagaccagatctacattgtacgacagcctgacaagtgccttctgcagccagctaccccattggaggatgcccttctctagtgagtagtaacagctccggtgggtccattacaaatggccagctctcctacaaaatgtttgtaattatgtgtgtagctttaatgtgaaagagttaggtggtctgagcagtactcatctcctttttaatataatactttagggttgttttactctcggcgggtcgaaatttttttgtgtagctttaatctgcacagttgaaggaacatttcataccaccattacttttcttgattttataattgtagagcggcagaatgcaagatgcaccttactgaatattatactgcaaggtttgttgagtctttttttgtgtttattatcgatttattgtaaggaggcaacaatctttgttttattgttgtataaagaaatgtgaaacaatagcatttggtacataattgagttcctgcttgttc

SEQ ID NO: 39602 - DNA, 276 bp, Zea Mays
gagagatgatgatcgagccagtaatgtggtgccaaccacgagatgcagtcggtggacgacctgaagaccgatggacataaccaggggatgctcgccaagcgagtacctcccccagcaaacactatctaagtgttaaattaaagtcaagccccagtttattgcataacctgttatttatgctattttactacacttattgattgtaggatttaatgtgcacttaagtgtaggagttgtttgaaaccctagttgcatgatctcaggaatcctattgag

SEQ ID NO: 39603 - DNA, 940 bp, Zea Mays
caaaaactccaatggttcaatttcttatgtcacgtccagattgggaattccatcacgcctcgtcctctccgtcccgaccagaatcatcgcttcttcctgctccggcgatatccgccgccgcctgcggtccggccgagatggggagcacttcctctatgctcacccaatacgatatcgaggaggtccaggaccattgtaaccacgcatgagatcgtatcgctgtaccaccgcttctgccagctcgaccgtaacggtggtggcttcgtctccgctgacgagttcatgtcggtccctgagttcgccgtaaatcccctctcccagaggctcctgaggatgctggatgggctcaacttcaaggagtttgtagcatttttgtcagcttttagcccccgcacaagcctgcagcaaaagattgaatttattttcagggtttatgatactgactgcaacgggaaggttgcttttgatgacatcttgagcatcttgcgagatctgacaggttcatttatgacagagcaacagagacagaaagtcttgattcatgtgttagaagaagctggatacacaaaagattcacattttacactcccagactttatgaagattattggcaattctgagctcaagatggaggttgaagttcctattgactaaaaacctaacaagcatcatctagttgcttcaggcctgtatcttcatttgtgttaaattaagtagatggtatatttatatccttgcaactcaaatcatgatcagagatgtaattaaggaaacatatgtacctgctatttggaggtttagttggctcgcacttatacacaacgcttgttatacgccgtgatatcttccagataaccttacggatgtaaggttcactacaaatgtgtcaaaaaaaattaaatgatcaaggcattactgaatttagagttgttaatactag

SEQ ID NO: 39604 - DNA, 1005 bp, Zea Mays
gtcacgtccagattgggaattccatcacgcctcgtcctctccgtcccgaccagaatcatcgcttcttcctgctccggcgatatccgccgccgcctgcggtccggccgagatggggagcacttcctctatgctcacccaatacgatatcgaggaggtccaggaccattgtaaccacgcatgtcagtcgctaactctgacacctaattcgctcccctgatctggtctagtctgatctaatctggtgcttcgccgtcgcggctatcggcgctagtctcgcagcaggagatcgtatcgctgtaccaccgcttctgccagctcgaccgtaacggtggtggcttcgtctccgctgacgagttcatgtcggtccctgagttcgccgtaaatcccctctcccagaggctcctgaggatgctggatgggctcaacttcaaggagtttgtagcatttttgtcagcttttagcccccgcacaagcctgcagcaaaagattgaatggtttatgatactgactgcaacgggaaggttgcttttgatgacatcttgagcatcttgcgagatctgacaggttcatttatgacagagcaacagagacagaaagtcttgattcatgtgttagaagaagctggatacacaaaagattcacattttacactcccagactttatgaagattattggcaattctgagctcaagatggaggttgaagttcctattgactaaaaacctaacaagcatcatctagttgcttcaggcctgtatcttcatttgtgttaaattaagtagatggtatatttatatccttgcaactcaaatcatgatcagagatgtaattaaggaaacatatgtacctgctatttggaggtttagttggctcgcacttatacacaacgcttgttatacgccgtgatatcttccagataaccttacggatgtaaggttcactacaaatgtgtcaaaaaaaattaaatgatcaaggcattactgaatttagagttgttaatactag

SEQ ID NO: 39605 - DNA, 925 bp, Zea Mays
cacgtccagattgggaattccatcacgcctcgtcctctccgtcccgaccagaatcatcgcttcttcctgctccggcgatatccgccgccgcctgcggtccggccgagatggggagcacttcctctatgctcacccaatacgatatcgaggaggtccaggaccattgtaaccacgcattctcgcagcaggagatcgtatcgctgtaccaccgcttctgccagctcgaccgtaacggtggtggcttcgtctccgctgacgagttcatgtcggtccctgagttcgccgtaaatcccctctcccagaggctcctgaggatgctggatgggctcaacttcaaggagtttgtagcatttttgtcagcttttagcccccgcacaagcctgcagcaaaagattgaatgtagttattttcagggtttatgatactgactgcaacgggaaggttgcttttgatgacatcttgagcatcttgcgagatctgacaggttcatttatgacagagcaacagagacagaaagtcttgattcatgtgttagaagaagctggatacacaaaagattcacattttacactcccagactttatgaagattattggcaattctgagctcaagatggaggttgaagttcctattgactaaaaacctaacaagcatcatctagttgcttcaggcctgtatcttcatttgtgttaaattaagtagatggtatatttatatccttgcaactcaaatcatgatcagagatgtaattaaggaaacatatgtacctgctatttggaggtttagttggctcgcacttatacacaacgcttgttatacgccgtgatatcttccagataaccttacggatgtaaggttcactacaaatgtgtcaaaaaaaattaaatgatcaaggcattactgaatttagagttgttaatactag

SEQ ID NO: 39606 - DNA, 4067 bp, Zea Mays
caaacctccccgtcgcggcgccctccccgccttcccattcccggccccgcccgcccacatctagtctcccacctcgccctcgcggcgccggtgtagcagccatgctagtctccgtcgccgccgacgactccggctggcaggagtccccgtcgcaggccgtcctcttcgccgacgagatcgctgccgtccgcgctgtcctgggcgggaccctctccgaggccagcatcattgccgcgctctcccagtgcggtggcaacgctgagcgcgccatcaacgcgatcctcgacgacgccgaggtcgtttccgcccccaagcgggccaaggtcgagctcgacgtcggtggtgttccggtgcaggtgccggtagctgtcaaggtgaaggccgaatccatcgacgtcggggccgtggcgccggcagctgtcaaggtgaaggccgagcccattgacggcgatgtcgtggggagccaacaatccgatggctcctccgcgaaggccaccgccaagatgaagagcgagccggccgaatggtccgccaagacacccgaccgattcgtccccgacgcgcgcagtgtaggtgcgcctgtggcggtggcgagcgccggcgccggcataagcatcgtcccgcggcagaataagaggccgaggcaggaggtggggaccatcgaactcactaccacgcacccggtgccgtacctcaactcgcggcccatccgggcgctgccacccatgccacccatgggcggggacggggaggtgtacgacccgaagcctatccagatggtgccgcccctggaaatccagatgcacgatccgaggaccaccctacctgcgccgtcacccatcgacatcgagatgtaccaacaaccgccgcggccgccgcccgtggacgtcgagatgtgcgagcagaggtcgcggccccggccccggcccctcagggcggttgtgcctgcctcggtgacggacatgaggatggtggtggcgccaccggacggcgagtttggcgacttccctgtggagcgcgactggatgctcgtcggcaagtcctatgtgcccgggctgtccaccaaccgtgggaggaggaggttggacgctggggagattgtccatttcgccttcccttcgtacgagaagatctatggcgggttaaagatgactgccaagaaggcggcggctctggcacagattgttcgcttttccaccaaacgagccggagagattgggaagctgtccccagagtggacgcaatgccttgtcccgcttgtcaactcgtccaaggtgaagattcaggggaagctcgtgttcccaacaatggagctgaggctgatgcaggagatattgctctatgttagcttctacatccacaaatctgtgctagccgaaatggacaactcaccctgtgacatgctcgatcatgcaaatgttgatttcactcccagtcctctccataaattgcttagtttgctcaacctaaagccatccaacaaggatgctttctcccttgacgatctcaccactagaaagctgaagcaaattctaaggggtaacaataataatggtgatgattctactccggtgcttggccatacatttctcgagcaaggcgctgatgagcaggcgatttcagaggctgccttgaacaaacttgttggcactgctgaaacatttgacttagaggaagcagagcctcccactacccttgtctctgttctaaagccataccagaaacaagctctcttctggatgtctaaattggagaagggaattgatgctaatgaagagacaaaaactcttaatccgtgttggagtgcctacaatattgcagacaggagagctcctccagtctatgttaatctttttactggtcaagcaacaacacaatttccaagtatgactgagactgtaagaggaggggggggagttctctaactgtataaaaggagacacaaggtatctaggagatcgtgcgaccagaggatacacctcaacatcctctgtgagaggaggtacccttgttgtttgccctatgtcattattgggccaatggaaggatgagttggaggcacattcggcacaaggagctctttctgtgtttgtgcattatgctggtgataaaactagtagcctcatgctgatggctcaacatgatgtcgttttaacaacctatggtgtcctctcagctgcatgcaaaacggaatgcaacagcatttttcacaggatggattggtataggattgtgcttgatgaagctcacacaatcaaatctcctaaaactaaaagtgcccaagcagcttatagattaaagtcggaatgcagatggtgccttacaggcacaccattgcaaaataatttggaggacctctacagtcttctctgcttcctacatgttgaaccatggtgcaatgcaaaatggtggcagaggcttattcagaaaccttatgagaatggtgatgatagagggttgaaacttgttagagctattcttaggccactaatgctaaggaggaccaaggaaacaaaagacaagattggcaatcccatactggttctacctccagctcgtattgaagttgtagagtgcgaacaatctgaacatgaacgtgatttctatgaagcacttttcaggagatcaaaggttcagtttgacaaatttgtagcacaaggcagtgttctgaacaattacgctaatattctcgagttacttctccggctaaggcagtgctgcgatcacccttttctggttatcagccgagctgaccctaaaaagtatgctgacctcaaccagcttgcacagcaattccttgaaggggtgcagcagagttcgtctggaagacagaacgtagtgccttcactggcttatgtagaaggggtcgtcgaggaaattcgccagggtgctacgatggagtgccctatctgtctcgagtcagcttcggacgatccagtgctcacgccttgcgcacaccggatgtgtggcgaatgccttgtttctagctggaggactccagacggagggccatgcccactctgtagacgtcacatcagcaagtctgacctgatcatactgcctgctcagagtcgtttccaggtggatgccaagaacaactggaaggactcgtgcaaagtgaaaacgctcgtaacgatgctggagagccttcagaggaagcaggagaagagcatcgtgttcagccagtttacttccttcttcgatcttctggagatccgcttcacccagaagggtatcaagttcttgaggtttgatggcaagctgagccagaagcacaaagagaaagttctgaaggagttcagtgagagccaggacaagctggtgctaatgatgtcgctcaaggctggaggtgtagggctaaatctaactgctgcctccaacgtttttatgatggatccgtggtggaatccggctgtggaagagcaggctatcatgagaattcaccgcattgggcagaaaagagaggtccgagtcaaacgcttcatcgtcaagggtactgtcgaggagcggatgcagcaggtccagatgcgcaagcagaggatggtttctggggcgctcaccgacgaggagattcgtggcgctcgcattgagcatctcaagatgttgtttaaataaatgatcattgccgatgtgtatagctgacgctacgccgttgatactttggtagtgtcaagtaggttgtcgagggcatgtttggtaggagtaagatctgggtttagaccattgtagatggggatggccggatgggagtgggtggaaccttgcccttccgatatgacggtcttcctttctaacgtgaatcagactggcatagagaatgggcattttggaaaacatgactacgataaatcacttttctcttgagtcttggattgcaggtgttaatctgtcatgttgttcttgttttactccctaccctttctgtatgctgtgccttttgttctctccttcagacttcccaggaatactgattctagtatgtccactaaggtatcttttgatcttgaaacatcatccttcgtggctgttgatggcatataatagaaaagcttttgggccacttccat

SEQ ID NO: 39607 - DNA, 4128 bp, Zea Mays
caaacctccccgtcgcggcgccctccccgccttcccattcccggccccgcccgcccacatctagtctcccacctcgccctcgcggcgccggtgtagcagccatgctagtctccgtcgccgccgacgactccggctggcaggagtccccgtcgcaggccgtcctcttcgccgacgagatcgctgccgtccgcgctgtcctgggcgggaccctctccgaggccagcatcattgccgcgctctcccagtgcggtggcaacgctgagcgcgccatcaacgcgatcctcgacgacgccgaggtcgtttccgcccccaagcgggccaaggtcgagctcgacgtcggtggtgttccggtgcaggtgccggtagctgtcaaggtgaaggccgaatccatcgacgtcggggccgtggcgccggcagctgtcaaggtgaaggccgagcccattgacggcgatgtcgtggggagccaacaatccgatggctcctccgcgaaggccaccgccaagatgaagagcgagccggccgaatggtccgccaagacacccgaccgattcgtccccgacgcgcgcagtgtaggtgcgcctgtggcggtggcgagcgccggcgccggcataagcatcgtcccgcggcagaataagaggccgaggcaggaggtggggaccatcgaactcactaccacgcacccggtgccgtacctcaactcgcggcccatccgggcgctgccacccatgccacccatgggcggggacggggaggtgtacgacccgaagcctatccagatggtgccgcccctggaaatccagatgcacgatccgaggaccaccctacctgcgccgtcacccatcgacatcgagatgtaccaacaaccgccgcggccgccgcccgtggacgtcgagatgtgcgagcagaggtcgcggccccggccccggcccctcagggcggttgtgcctgcctcggtgacggacatgaggatggtggtggcgccaccggacggcgagtttggcgacttccctgtggagcgcgactggatgctcgtcggcaagtcctatgtgcccgggctgtccaccaaccgtgggaggaggaggttggacgctggggagattgtccatttcgccttcccttcgtacgagaagatctatggcgggttaaagatgactgccaagaaggcggcggctctggcacagattgttcgcttttccaccaaacgagccggagagattgggaagctgtccccagagtggacgcaatgccttgtcccgcttgtcaactcgtccaaggtgaagattcaggggaagctcgtgttcccaacaatggagctgaggctgatgcaggagatattgctctatgttagcttctacatccacaaatctgtgctagccgaaatggacaactcaccctgtgacatgctcgatcatgcaaatgttgatttcactcccagtcctctccataaattgcttagtttgctcaacctaaagccatccaacaaggatgctttctcccttgacgatctcaccactagaaagctgaagcaaattctaaggggtaacaataataatggtgatgattctactccggtgcttggccatacatttctcgagcaaggcgctgatgagcaggcgatttcagaggctgccttgaacaaacttgttggcactgctgaaacatttgacttagagagcctcccactacccttgtctctgttctaaagccataccagaaacaagctctcttctggatgtctaaattggagaagggaattgatgctaatgaagagacaaaaactcttaatccgtgttggagtgcctacaatattgcagacaggagagctcctccagtctatgttaatctttttactggtcaagcaacaacacaatttccaagtatgactgagactgtaagaggagggatactagcagacgcaatgggtcttggcaaaactgtgatgaccattgctctgatactttccaatcctaggggggagttctctaactgtataaaaggagacacaaggtatctaggagatcgtgcgaccagaggatacacctcaacatcctctgtgagaggaggtacccttgttgtttgccctatgtcattattgggccaatggaaggatgagttggaggcacattcggcacaaggagctctttctgtgtttgtgcattatgctggtgataaaactagtagcctcatgctgatggctcaacatgatgtcgttttaacaacctatggtgtcctctcagctgcatgcaaaacggaatgcaacagcatttttcacaggatggattggtataggattgtgcttgatgaagctcacacaatcaaatctcctaaaactaaaagtgcccaagcagcttatagattaaagtcggaatgcagatggtgccttacaggcacaccattgcaaaataatttggaggacctctacagtcttctctgcttcctacatgttgaaccatggtgcaatgcaaaatggtggcagaggcttattcagaaaccttatgagaatggtgatgatagagggttgaaacttgttagagctattcttaggccactaatgctaaggaggaccaaggaaacaaaagacaagattggcaatcccatactggttctacctccagctcgtattgaagttgtagagtgcgaacaatctgaacatgaacgtgatttctatgaagcacttttcaggagatcaaaggttcagtttgacaaatttgtagcacaaggcagtgttctgaacaattacgctaatattctcgagttacttctccggctaaggcagtgctgcgatcacccttttctggttatcagccgagctgaccctaaaaagtatgctgacctcaaccagcttgcacagcaattccttgaaggggtgcagcagagttcgtctggaagacagaacgtagtgccttcactggcttatgtagaaggggtcgtcgaggaaattcgccagggtgctacgatggagtgccctatctgtctcgagtcagcttcggacgatccagtgctcacgccttgcgcacaccggatgtgtggcgaatgccttgtttctagctggaggactccagacggagggccatgcccactctgtagacgtcacatcagcaagtctgacctgatcatactgcctgctcagagtcgtttccaggtggatgccaagaacaactggaaggactcgtgcaaagtgaaaacgctcgtaacgatgctggagagccttcagaggaagcaggagaagagcatcgtgttcagccagtttacttccttcttcgatcttctggagatccgcttcacccagaagggtatcaagttcttgaggtttgatggcaagctgagccagaagcacaaagagaaagttctgaaggagttcagtgagagccaggacaagctggtgctaatgatgtcgctcaaggctggaggtgtagggctaaatctaactgctgcctccaacgtttttatgatggatccgtggtggaatccggctgtggaagagcaggctatcatgagaattcaccgcattgggcagaaaagagaggtccgagtcaaacgcttcatcgtcaagggtactgtcgaggagcggatgcagcaggtccagatgcgcaagcagaggatggtttctggggcgctcaccgacgaggagattcgtggcgctcgcattgagcatctcaagatgttgtttaaataaatgatcattgccgatgtgtatagctgacgctacgccgttgatactttggtagtgtcaagtaggttgtcgagggcatgtttggtaggagtaagatctgggtttagaccattgtagatggggatggccggatgggagtgggtggaaccttgcccttccgatatgacggtcttcctttctaacgtgaatcagactggcatagagaatgggcattttggaaaacatgactacgataaatcacttttctcttgagtcttggattgcaggtgttaatctgtcatgttgttcttgttttactccctaccctttctgtatgctgtgccttttgttctctccttcagacttcccaggaatactgattctagtatgtccactaaggtatcttttgatcttgaaacatcatccttcgtggctgttgatggcatataatagaaaagcttttgggccacttccat

SEQ ID NO: 39608 - DNA, 4355 bp, Zea Mays
caaacctccccgtcgcggcgccctccccgccttcccattcccggccccgcccgcccacatctagtctcccacctcgccctcgcggcgccggtgtagcagccatgctagtctccgtcgccgccgacgactccggctggcaggagtccccgtcgcaggccgtcctcttcgccgacgagatcgctgccgtccgcgctgtcctgggcgggaccctctccgaggccagcatcattgccgcgctctcccagtgcggtggcaacgctgagcgcgccatcaacgcgatcctcgacgacgccgaggtcgtttccgcccccaagcgggccaaggtcgagctcgacgtcggtggtgttccggtgcaggtgccggtagctgtcaaggtgaaggccgaatccatcgacgtcggggccgtggcgccggcagctgtcaaggtgaaggccgagcccattgacggcgatgtcgtggggagccaacaatccgatggctcctccgcgaaggccaccgccaagatgaagagcgagccggccgaatggtccgccaagacacccgaccgattcgtccccgacgcgcgcagtgtaggtgcgcctgtggcggtggcgagcgccggcgccggcataagcatcgtcccgcggcagaataagaggccgaggcaggaggtggggaccatcgaactcactaccacgcacccggtgccgtacctcaactcgcggcccatccgggcgctgccacccatgccacccatgggcggggacggggaggtgtacgacccgaagcctatccagatggtgccgcccctggaaatccagatgcacgatccgaggaccaccctacctgcgccgtcacccatcgacatcgagatgtaccaacaaccgccgcggccgccgcccgtggacgtcgagatgtgcgagcagaggtcgcggccccggccccggcccctcagggcggttgtgcctgcctcggtgacggacatgaggatggtggtggcgccaccggacggcgagtttggcgacttccctgtggagcgcgactggatgctcgtcggcaagtcctatgtgcccgggctgtccaccaaccgtgggaggaggaggttggacgctggggagattgtccatttcgccttcccttcgtacgagaagatctatggcgggttaaagatgactgccaagaaggcggcggctctggcacagattgttcgcttttccaccaaacgagccggagagattgggaagctgtccccagagtggacgcaatgccttgtcccgcttgtcaactcgtccaaggtgaagattcaggggaagctcgtgttcccaacaatggagctgaggctgatgcaggagatattgctctatgttagcttctacatccacaaatctgtgctagccgaaatggacaactcaccctgtgacatgctcgatcatgcaaatgttgatttcactcccagtcctctccataaattgcttagtttgctcaacctaaagccatccaacaaggatgctttctcccttgacgatctcaccactagaaagctgaagcaaattctaaggggtaacaataataatggtgatgattctactccggtgcttggccatacatttctcgagcaaggcgctgatgagcaggcgatttcagaggctgccttgaacaaacttgttggcactgctgaaacatttgacttagaggaagcagagcctcccactacccttgtctctgttctaaagccataccagaaacaagctctcttctggatgtctaaattggagaagggaattgatgctaatgaagagacaaaaactcttaatccgtgttggagtgcctacaatattgcagacaggagagctcctccagtctatgttaatctttttactggtcaagcaacaacacaatttccaagtatgactgagactgtaagaggagggatactagcagacgcaatgggtcttggcaaaactgtgatgaccattgctctgatactttccaatcctaggggggagttctctaactgtataaaaggagacacaaggtatctaggagatcgtgcgaccagaggatacacctcaacatcctctgtgagaggaggtacccttgttgtttgccctatgtcattattgggccaatggaaggttagtatcttgatttactattgaagcaattgtcattagtaagctttttatttgtctttgtaatcaatggcagaatatttgaatgtcactgctaattttttcaatcttatcctgttattcatgcactgcatcttgaacaaacttaataattagtttagtttctgcaataaacttaatcacacaagaaaattaattacatccatattgtccatcctcacaggatgagttggaggcacattcggcacaaggagctctttctgtgtttgtgcattatgctggtgataaaactagtagcctcatgctgatggctcaacatgatgtcgttttaacaacctatggtgtcctctcagctgcatgcaaaacggaatgcaacagcatttttcacaggatggattggtataggattgtgcttgatgaagctcacacaatcaaatctcctaaaactaaaagtgcccaagcagcttatagattaaagtcggaatgcagatggtgccttacaggcacaccattgcaaaataatttggaggacctctacagtcttctctgcttcctacatgttgaaccatggtgcaatgcaaaatggtggcagaggcttattcagaaaccttatgagaatggtgatgatagagggttgaaacttgttagagctattcttaggccactaatgctaaggaggaccaaggaaacaaaagacaagattggcaatcccatactggttctacctccagctcgtattgaagttgtagagtgcgaacaatctgaacatgaacgtgatttctatgaagcacttttcaggagatcaaaggttcagtttgacaaatttgtagcacaaggcagtgttctgaacaattacgctaatattctcgagttacttctccggctaaggcagtgctgcgatcacccttttctggttatcagccgagctgaccctaaaaagtatgctgacctcaaccagcttgcacagcaattccttgaaggggtgcagcagagttcgtctggaagacagaacgtagtgccttcactggcttatgtagaaggggtcgtcgaggaaattcgccagggtgctacgatggagtgccctatctgtctcgagtcagcttcggacgatccagtgctcacgccttgcgcacaccggatgtgtggcgaatgccttgtttctagctggaggactccagacggagggccatgcccactctgtagacgtcacatcagcaagtctgacctgatcatactgcctgctcagagtcgtttccaggtggatgccaagaacaactggaaggactcgtgcaaagtgaaaacgctcgtaacgatgctggagagccttcagaggaagcaggagaagagcatcgtgttcagccagtttacttccttcttcgatcttctggagatccgcttcacccagaagggtatcaagttcttgaggtttgatggcaagctgagccagaagcacaaagagaaagttctgaaggagttcagtgagagccaggacaagctggtgctaatgatgtcgctcaaggctggaggtgtagggctaaatctaactgctgcctccaacgtttttatgatggatccgtggtggaatccggctgtggaagagcaggctatcatgagaattcaccgcattgggcagaaaagagaggtccgagtcaaacgcttcatcgtcaagggtactgtcgaggagcggatgcagcaggtccagatgcgcaagcagaggatggtttctggggcgctcaccgacgaggagattcgtggcgctcgcattgagcatctcaagatgttgtttaaataaatgatcattgccgatgtgtatagctgacgctacgccgttgatactttggtagtgtcaagtaggttgtcgagggcatgtttggtaggagtaagatctgggtttagaccattgtagatggggatggccggatgggagtgggtggaaccttgcccttccgatatgacggtcttcctttctaacgtgaatcagactggcatagagaatgggcattttggaaaacatgactacgataaatcacttttctcttgagtcttggattgcaggtgttaatctgtcatgttgttcttgttttactccctaccctttctgtatgctgtgccttttgttctctccttcagacttcccaggaatactgattctagtatgtccactaaggtatcttttgatcttgaaacatcatccttcgtggctgttgatggcatataatagaaaagcttttgggccacttccat

SEQ ID NO: 39609 - DNA, 3108 bp, Zea Mays
ccatgttctgcctccgcgtccgattcccccgacaccgcctcgcccgcaatctacgccgccgcggtgcccacgcccgcgacatccaccacctcgacctcacccccgcccgcggaaatctcgcccgcgagatccctctgcccacacaccgccccctctgctctccgtcgatggaagggcgccattaacacaccgcgatcctcgctaccgcccccacgaggccataccatgccctcgccccctcccagatcttcgaagaggccgccaccccgcccctgttcttggcccctcgtcggcgtcggcctcatcgcggcacgggctgcactccttcgccccgctcacggccgcggtgcttggccacctctgggcctccggggtggcggtgctcccgggcctgacagagctagagttggtgcgcaccaaggctgagatgtggtttgcgttcccgcccgacctccgtgccgtcctcgccgcgggcctgccgtcggggcccgggttcccggactggcagtcgcgcgtggggctgcggtccgcattcgacctgcccatcgcggcggcgtcgctacagatcgcgcggggcgagctgtggccgcgctgctagggcgtgcgccccgccgaccccaaccacgcgctatggtctgcttcatctatggcgtggttcctgttttgcctgcctcttgctcctatttgaccaccatgcgcgccgcgaggaccaccactaggtggagcgtgtctccgtggtcttcttcaccgaccacgaggctgctgagaccctaggggggctcgacctggacatcatcgcagtgctccccaccgtcaggtgccatcgtcggtcgaggtccgtgactaagtgtgacgtgtacctgggcgagttcgcgcacagggagcggctcaagcagttgtctctcttccagatcccctacctcctctttgttccctcggcttagccaccaccttggccggtgctccttgcacgtcgggataggaggatgccgaccaagttctagatgaagagcaactgatttgcttcccttggatggattccactgttgagccattcaaaatttgagatgcggattaatttttacaattcatgttttcagatttaccttccaattttcttagtaataataataatgtataggtagtgcaccatgttttgattctaatctatcttgggtcacctgttttataccgaggtaacacctgttttataccgagataattagtatgtattctgagcttcaatcattgttctttatggtgagattcaatgtctccagttaattcattttgtaaattttaggttacagaatgtctctcgagtgtgctagagatgctttgctgcaaaagaccatggacaacaaagaaaatacaaataagctcagagttgatctcatgaatatttctatgactactcttagttgaaaaatactttcccaagacaaggagtactttactaaacttgtgattgatgttgtcttgaggcttaaggtgtacaaatggtttaatgaaagttggttatcatttacattgaactatgatatcttcatctataaaattttactcttcaaaaaggtagcacccacttggaatctattgaaattctgaagatacatggagaatctcttaaggactgggtacgtatttatagaaaaaataccactatattcttttgaccacatagcactgggttgcatacaaattctctcacctagcaccaaattctcctttctgtcaatcagtccaacctaagagcccaatgcaatcaatttctatttttatcaacaccctaaccaattagaattagcgctacattttctaaaagatcaattgctcatttactagctaaataaagtaggaattagcactacattttcctatttgtttccattgctctgagcatttgggctttgtttcccttcatattcatgtgcagtgatttgaagaacaacacctcctatttctcaataagttaatctgccacattgctgattaagagagcaatgatcgccattcctatgaaaactaaagttaaaggttgtttaaattaaaggggtccgaacgtgtcttgttacctggactgatcctatttgcaggatgtgccaactgccgagacttgcacacgtcacaaattaaagctgtttgcattgccggctaaccaagctccagggtataaacttcataattagacattctagatcttagttggccgacttgatcataagccactacccaaagcaaaaaaaagtatattattgaagatgcaactctcccctatatttgagagaagatgaaggatatatcagtgtgtttggtaccctgtagctcctcgtcgacctggtgcaacagcttaagctcaggaagaatgctttacaaatccgaatataagttcagtacgatagtgcaaatagagagcatcagcactaaagaagatagggagagttcaatgcatgatgtttgttttgttgacactggaagaggcgactaattgaggcggttgtcattgccaccggtgtgcacacattctttgtcaaggccgcatatcttgtcgattcaacaaaccaagttggtcattttcagaaggcaagctaagtgtgatgccgccacataagaccatgcccactgtatttatattttatactaatttttaacgtccaaaggacaccagatgtttcaatgttaatggtgctattgttatacactgatgttttgttcctgtttgcttgcaactttttgcagctgttcatgctatcggtttggaaagaacatgtggaaagccaatctcggatcttgcttccttcagggattgtctccatcctcttgatagcgatctatattggttatttccgaagaagaatcaagaagcaattcaacattcatgcaagtgtggtaccagattgagatatgtctgttagtttgtaacaatataaacttgttagttatgtgtcagagaaaacatagtaacaatgatttgtgctctatttctacccgtcattgtgtcctatctcaatggtgacttctttgtacacaactgtgtggtctctctatgtcctaataaatacatgcatcatcaatgaacttaatggatattgtcaatacagtgttcta

SEQ ID NO: 39610 - DNA, 2779 bp, Zea Mays
ccatgttctgcctccgcgtccgattcccccgacaccgcctcgcccgcaatctacgccgccgcggtgcccacgcccgcgacatccaccacctcgacctcacccccgcccgcggaaatctcgcccgcgagatccctctgcccacacaccgccccctctgctctccgtcgatggaagggcgccattaacacaccgcgatcctcgctaccgcccccacgaggccataccatgccctcgccccctcccagatcttcgaagaggccgccaccccgcccctgttcttggcccctcgtcggcgtcggcctcatcgcggcacgggctgcactccttcgccccgctcacggccgcggtgcttggccacctctgggcctccggggtggcggtgctcccgggcctgacagagctagagttggtgcgcaccaaggctgagatgtggtttgcgttcccgcccgacctccgtgccgtcctcgccgcgggcctgccgtcggggcccgggttcccggactggcagtcgcgcgtggggctgcggtccgcattcgacctgcccatcgcggcggcgtcgctacagatcgcgcggggcgagctgtggccgcgctgctagggcgtgcgccccgccgaccccaaccacgcgctatggtctgcttcatctatggcgtggttcctgttttgcctgcctcttgctcctatttgaccaccatgcgcgccgcgaggaccaccactaggtggagcgtgtctccgtggtcttcttcaccgaccacgaggctgctgagaccctaggggggctcgacctggacatcatcgcagtgctccccaccgtcaggtgccatcgtcggtcgaggtccgtgactaagtgtgacgtgtacctgggcgagttcgcgcacagggagcggctcaagcagttgtctctcttccagatcccctacctcctctttgttccctcggcttagccaccaccttggccggtgctccttgcacgtcgggataggaggatgccgaccaagttctagatgaagagcaactgatttgcttcccttggatggattccactgttgagccattcaaaatttgagatgcggattaatttttacaattcatgttttcagatttaccttccaattttcttagtaataataataatgtataggtagtgcaccatgttttgattctaatctatcttgggtcacctgttttataccgaggtaacacctgttttataccgagataattagtatgtattctgagcttcaatcattgttctttatggtgagattcaatgtctccagttaattcattttgtaaattttaggttacagaatgtctctcgagtgtgctagagatgctttgctgcaaaagaccatggacaacaaagaaaatacaagtgaattattttcccgatctcgtgataagctcagagttgatctcatgaatatttctatgactactcttagttgaaaaatactttcccaagacaaggagtactttactaaacttgtgattgatgttgtcttgaggcttaaggtgtacaaatggtttaatgaaagttggttatcatttacattgaactatgatatcttcatctataaaattttactcttcaaaaaggtagcacccacttggaatctattgaaattctgaagatacatggagaatctcttaaggactgggaagaatgctttacaaatccgaatataagttcagtacgatagtgcaaatagagagcatcaggtactccttaggttcctattgacgtttaattgtcctaatgaggttgatccatgttctattacgaattgtatgtgtgctattttcccacaattttctaatcaaaatattcagcacaaaaggatgacctcgtatatgggatattcaattaattgtccatgaaatttgacaaaattagaaaaatgaaaaatatagcaggcctgtagatctgagcaaatgatatgaagtaaatgttgttactttctcaaaacgtagatgagctttttttgcaaggactttagttgaaaattggaaaatctaacatgcctgtagatctgagaagacgatatgaagtacatgttgttactttcacaaaatgtagatgagcttttttgcaaggacttcagttgttatgttgctcctcattaacactaaaacttaacctgcccgggttacaattatacatctcaatccagatcagccttttcattgttctggttctgctcatttatcctttctagtcacataaattcttgccatttgacaccagcactaaagaagatagggagagttcaatgcatgatgtttgttttgttgacactggaagaggcgactaattgaggcggttgtcattgccaccggtgtgcacacattctttgtcaaggccgcatatcttgtcgattcaacaaaccaagttggtcattttcagaagctgttcatgctatcggtttggaaagaacatgtggaaagccaatctcggatcttgcttccttcagggattgtctccatcctcttgatagcgatctatattggttatttccgaagaagaatcaagaagcaattcaacattcatgcaagtgtggtaccagattgagatatgtctgttagtttgtaacaatataaacttgttagttatgtgtcagagaaaacatagtaacaatgatttgtgctctatttctacccgtcattgtgtcctatctcaatggtgacttctttgtacacaactgtgtggtctctctatgtcctaataaatacatgcatcatcaatgaacttaatggatattgtcaatacagtgttcta

SEQ ID NO: 39611 - DNA, 3194 bp, Zea Mays
ccatgttctgcctccgcgtccgattcccccgacaccgcctcgcccgcaatctacgccgccgcggtgcccacgcccgcgacatccaccacctcgacctcacccccgcccgcggaaatctcgcccgcgagatccctctgcccacacaccgccccctctgctctccgtcgatggaagggcgccattaacacaccgcgatcctcgctaccgcccccacgaggccataccatgccctcgccccctcccagatcttcgaagaggccgccaccccgcccctgttcttggcccctcgtcggcgtcggcctcatcgcggcacgggctgcactccttcgccccgctcacggccgcggtgcttggccacctctgggcctccggggtggcggtgctcccgggcctgacagagctagagttggtgcgcaccaaggctgagatgtggtttgcgttcccgcccgacctccgtgccgtcctcgccgcgggcctgccgtcggggcccgggttcccggactggcagtcgcgcgtggggctgcggtccgcattcgacctgcccatcgcggcggcgtcgctacagatcgcgcggggcgagctgtggccgcgctgctagggcgtgcgccccgccgaccccaaccacgcgctatggtctgcttcatctatggcgtggttcctgttttgcctgcctcttgctcctatttgaccaccatgcgcgccgcgaggaccaccactaggtggagcgtgtctccgtggtcttcttcaccgaccacgaggctgctgagaccctaggggggctcgacctggacatcatcgcagtgctccccaccgtcaggtgccatcgtcggtcgaggtccgtgactaagtgtgacgtgtacctgggcgagttcgcgcacagggagcggctcaagcagttgtctctcttccagatcccctacctcctctttgttccctcggcttagccaccaccttggccggtgctccttgcacgtcgggataggaggatgccgaccaagttctagatgaagagcaactgatttgcttcccttggatggattccactgttgagccattcaaaatttgagatgcggattaatttttacaattcatgttttcagatttaccttccaattttcttagtaataataataatgtataggtagtgcaccatgttttgattctaatctatcttgggtcacctgttttataccgaggtaacacctgttttataccgagataattagtatgtattctgagcttcaatcattgttctttatggtgagattcaatgtctccagttaattcattttgtaaattttaggttacagaatgtctctcgagtgtgctagagatgctttgctgcaaaagaccatggacaacaaagaaaatacaagtgaattattttcccgatctcgtgataagctcagagttgatctcatgaatatttctatgactactcttagttgaaaaatactttcccaagacaaggagtactttactaaacttgtgattgatgttgtcttgaggcttaaggtgtacaaatggtttaatgaaagttggttatcatttacattgaactatgatatcttcatctataaaattttactcttcaaaaacacccacttggaatctattgaaattctgaagatacatggagaatctcttaaggactgggatgtgccaactgccgagacttgcacacgtcacaaattaaagctgtttgcattgccggctaaccaagctccagggtataaacttcataattagacattctagatcttagttggccgacttgatcataagccactacccaaagcaaaaaaaagtatattattgaagatgcaactctcccctatatttgagagaagatgaaggatatatcagtgtgtttggtaccctgtagctcctcgtcgacctggtgcaacagcttaagctcaggaagaatgctttacaaatccgaatataagttcagtacgatagtgcaaatagagagcatcaggtactccttaggttcctattgacgtttaattgtcctaatgaggttgatccatgttctattacgaattgtatgtgtgctattttcccacaattttctaatcaaaatattcagcacaaaaggatgacctcgtatatgggatattcaattaattgtccatgaaatttgacaaaattagaaaaatgaaaaatatagcaggcctgtagatctgagcaaatgatatgaagtaaatgttgttactttctcaaaacgtagatgagctttttttgcaaggactttagttgaaaattggaaaatctaacatgcctgtagatctgagaagacgatatgaagtacatgttgttactttcacaaaatgtagatgagcttttttgcaaggacttcagttgttatgttgctcctcattaacactaaaacttaacctgcccgggttacaattatacatctcaatccagatcagccttttcattgttctggttctgctcatttatcctttctagtcacataaattcttgccatttgacaccagcactaaagaagatagggagagttcaatgcatgatgtttgttttgttgacactggaagaggcgactaattgaggcggttgtcattgccaccggtgtgcacacattctttgtcaaggccgcatatcttgtcgattcaacaaaccaagttggtcattttcagaaggcaagctaagtgtgatgccgccacataagaccatgcccactgtatttatattttatactaatttttaacgtccaaaggacaccagatgtttcaatgttaatggtgctattgttatacactgatgttttgttcctgtttgcttgcaactttttgcagctgttcatgctatcggtttggaaagaacatgtggaaagccaatctcggatcttgcttccttcagggattgtctccatcctcttgatagcgatctatattggttatttccgaagaagaatcaagaagcaattcaacattcatgcaagtgtggtaccagattgagatatgtctgttagtttgtaacaatataaacttgttagttatgtgtcagagaaaacatagtaacaatgatttgtgctctatttctacccgtcattgtgtcctatctcaatggtgacttctttgtacacaactgtgtggtctctctatgtcctaataaatacatgcatcatcaatgaacttaatggatattgtcaatacagtgttcta

SEQ ID NO: 39612 - DNA, 2575 bp, Zea Mays
ccatgttctgcctccgcgtccgattcccccgacaccgcctcgcccgcaatctacgccgccgcggtgcccacgcccgcgacatccaccacctcgacctcacccccgcccgcggaaatctcgcccgcgagatccctctgcccacacaccgccccctctgctctccgtcgatggaagggcgccattaacacaccgcgatcctcgctaccgcccccacgaggccataccatgccctcgccccctcccagatcttcgaagaggccgccaccccgcccctgttcttggcccctcgtcggcgtcggcctcatcgcggcacgggctgcactccttcgccccgctcacggccgcggtgcttggccacctctgggcctccggggtggcggtgctcccgggcctgacagagctagagttggtgcgcaccaaggctgagatgtggtttgcgttcccgcccgacctccgtgccgtcctcgccgcgggcctgccgtcggggcccgggttcccggactggcagtcgcgcgtggggctgcggtccgcattcgacctgcccatcgcggcggcgtcgctacagatcgcgcggggcgagctgtggccgcgctgctagggcgtgcgccccgccgaccccaaccacgcgctatggtctgcttcatctatggcgtggttcctgttttgcctgcctcttgctcctatttgaccaccatgcgcgccgcgaggaccaccactaggtggagcgtgtctccgtggtcttcttcaccgaccacgaggctgctgagaccctaggggggctcgacctggacatcatcgcagtgctccccaccgtcaggtgccatcgtcggtcgaggttacagaatgtctctcgagtgtgctagagatgctttgctgcaaaagaccatggacaacaaagaaaatacaagtgaattattttcccgatctcgtgataagctcagagttgatctcatgaatatttctatgactactcttagttgaaaaatactttcccaagacaaggagtactttactaaacttgtgattgatgttgtcttgaggcttaaggtgtacaaatggtttaatgaaagttggttatcatttacattgaactatgatatcttcatctataaaattttactcttcaaaaaggtagcacccacttggaatctattgaaattctgaagatacatggagaatctcttaaggactgggatgtgccaactgccgagacttgcacacgtcacaaattaaagctgtttgcattgccggctaaccaagctccagggtataaacttcataattagacattctagatcttagttggccgacttgatcataagccactacccaaagcaaaaaaaagtatattattgaagatgcaactctcccctatatttgagagaagatgaaggatatatcagtgtgtttggtaccctgtagctcctcgtcgacctggtgcaacagcttaagctcaggaagaatgctttacaaatccgaatataagttcagtacgatagtgcaaatagagagcatcaggtactccttaggttcctattgacgtttaattgtcctaatgaggttgatccatgttctattacgaattgtatgtgtgctattttcccacaattttctaatcaaaatattcagcacaaaaggatgacctcgtatatgggatattcaattaattgtccatgaaatttgacaaaattagaaaaatgaaaaatatagcaggcctgtagatctgagcaaatgatatgaagtaaatgttgttactttctcaaaacgtagatgagctttttttgcaaggactttagttgaaaattggaaaatctaacatgcctgtagatctgagaagacgatatgaagtacatgttgttactttcacaaaatgtagatgagcttttttgcaaggacttcagttgttatgttgctcctcattaacactaaaacttaacctgcccgggttacaattatacatctcaatccagatcagccttttcattgttctggttctgctcatttatcctttctagtcacataaattcttgccatttgacaccagcactaaagaagatagggagagttcaatgcatgatgtttgttttgttgacactggaagaggcgactaattgaggcggttgtcattgccaccggtgtgcacacattctttgtcaaggccgcatatcttgtcgattcaacaaaccaagttggtcattttcagaagctgttcatgctatcggtttggaaagaacatgtggaaagccaatctcggatcttgcttccttcagggattgtctccatcctcttgatagcgatctatattggttatttccgaagaagaatcaagaagcaattcaacattcatgcaagtgtggtaccagattgagatatgtctgttagtttgtaacaatataaacttgttagttatgtgtcagagaaaacatagtaacaatgatttgtgctctatttctacccgtcattgtgtcctatctcaatggtgacttctttgtacacaactgtgtggtctctctatgtcctaataaatacatgcatcatcaatgaacttaatggatattgtcaatacagtgttcta

SEQ ID NO: 39613 - DNA, 2517 bp, Zea Mays
ccatgttctgcctccgcgtccgattcccccgacaccgcctcgcccgcaatctacgccgccgcggtgcccacgcccgcgacatccaccacctcgacctcacccccgcccgcggaaatctcgcccgcgagatccctctgcccacacaccgccccctctgctctccgtcgatggaagggcgccattaacacaccgcgatcctcgctaccgcccccacgaggccataccatgccctcgccccctcccagatcttcgaagaggccgccaccccgcccctgttcttggcccctcgtcggcgtcggcctcatcgcggcacgggctgcactccttcgccccgctcacggccgcggtgcttggccacctctgggcctccggggtggcggtgctcccgggcctgacagagctagagttggtgcgcaccaaggctgagatgtggtttgcgttcccgcccgacctccgtgccgtcctcgccgcgggcctgccgtcggggcccgggttcccggactggcagtcgcgcgtggggctgcggtccgcattcgacctgcccatcgcggcggcgtcgctacagatcgcgcggggcgagctgtggccgcgctgctagggcgtgcgccccgccgaccccaaccacgcgctatggtctgcttcatctatggcgtggttcctgttttgcctgcctcttgctcctatttgaccaccatgcgcgccgcgaggaccaccactaggtggagcgtgtctccgtggtcttcttcaccgaccacgaggctgctgagaccctaggggggctcgacctggacatcatcgcagtgctccccaccgtcaggtgccatcgtcggtcgaggtccgtgactaagtgtgacgtgtacctgggcgagttcgcgcacagggagcggctcaagcagttgtctctcttccagatcccctacctcctctttgttccctcggcttagccaccaccttggccggtgctccttgcacgtcgggataggaggatgccgaccaagttctagatgaagagcaactgatttgcttcccttggatggattccactgttgagccattcaaaatttgagatgcggattaatttttacaattcatgttttcagatttaccttccaattttcttagtaataataataatgtataggtagtgcaccatgttttgattctaatctatcttgggtcacctgttttataccgaggtaacacctgttttataccgagataattagtatgtattctgagcttcaatcattgttctttatggtgagattcaatgtctccagttaattcattttgtaaattttaggttacagaatgtctctcgagtgtgctagagatgctttgctgcaaaagaccatggacaacaaagaaaatacaagtgaattattttcccgatctcgtgataagctcagagttgatctcatgaatatttctatgactactcttagttgaaaaatactttcccaagacaaggagtactttactaaacttgtgattgatgttgtcttgaggcttaaggtgtacaaatggtttaatgaaagttggttatcatttacattgaactatgatatcttcatctataaaattttactcttcaaaaaggtagcacccacttggaatctattgaaattctgaagatacatggagaatctcttaaggactgggatgtgccaactgccgagacttgcacacgtcacaaattaaagctgtttgcattgccggctaaccaagctccagggtataaacttcataattagacattctagatcttagttggccgacttgatcataagccactacccaaagcaaaaaaaagtatattattgaagatgcaactctcccctatatttgagagaagatgaaggatatatcagtgtgtttggtaccctgtagctcctcgtcgacctggtgcaacagcttaagctcaggaagaatgctttacaaatccgaatataagttcagtacgatagtgcaaatagagagcatcagcactaaagaagatagggagagttcaatgcatgatgtttgttttgttgacactggaagaggcgactaattgaggcggttgtcattgccaccggtgtgcacacattctttgtcaaggccgcatatcttgtcgattcaacaaaccaagttggtcattttcagaagctgttcatgctatcggtttggaaagaacatgtggaaagccaatctcggatcttgcttccttcagggattgtctccatcctcttgatagcgatctatattggttatttccgaagaagaatcaagaagcaattcaacattcatgcaagtgtggtaccagattgagatatgtctgttagtttgtaacaatataaacttgttagttatgtgtcagagaaaacatagtaacaatgatttgtgctctatttctacccgtcattgtgtcctatctcaatggtgacttctttgtacacaactgtgtggtctctctatgtcctaataaatacatgcatcatcaatgaacttaatggatattgtcaatacagtgttcta

SEQ ID NO: 39614 - DNA, 3043 bp, Zea Mays
ccatgttctgcctccgcgtccgattcccccgacaccgcctcgcccgcaatctacgccgccgcggtgcccacgcccgcgacatccaccacctcgacctcacccccgcccgcggaaatctcgcccgcgagatccctctgcccacacaccgccccctctgctctccgtcgatggaagggcgccattaacacaccgcgatcctcgctaccgcccccacgaggccataccatgccctcgccccctcccagatcttcgaagaggccgccaccccgcccctgttcttggcccctcgtcggcgtcggcctcatcgcggcacgggctgcactccttcgccccgctcacggccgcggtgcttggccacctctgggcctccggggtggcggtgctcccgggcctgacagagctagagttggtgcgcaccaaggctgagatgtggtttgcgttcccgcccgacctccgtgccgtcctcgccgcgggcctgccgtcggggcccgggttcccggactggcagtcgcgcgtggggctgcggtccgcattcgacctgcccatcgcggcggcgtcgctacagatcgcgcggggcgagctgtggccgcgctgctagggcgtgcgccccgccgaccccaaccacgcgctatggtctgcttcatctatggcgtggttcctgttttgcctgcctcttgctcctatttgaccaccatgcgcgccgcgaggaccaccactaggtggagcgtgtctccgtggtcttcttcaccgaccacgaggctgctgagaccctaggggggctcgacctggacatcatcgcagtgctccccaccgtcaggtgccatcgtcggtcgaggtccgtgactaagtgtgacgtgtacctgggcgagttcgcgcacagggagcggctcaagcagttgtctctcttccagatcccctacctcctctttgttccctcggcttagccaccaccttggccggtgctccttgcacgtcgggataggaggatgccgaccaagttctagatgaagagcaactgatttgcttcccttggatggattccactgttgagccattcaaaatttgagatgcggattaatttttacaattcatgttttcagatttaccttccaattttcttagtaataataataatgtataggtagtgcaccatgttttgattctaatctatcttgggtcacctgttttataccgaggtaacacctgttttataccgagataattagtatgtattctgagcttcaatcattgttctttatggtgagattcaatgtctccagttaattcattttgtaaattttaggttacagaatgtctctcgagtgtgctagagatgctttgctgcaaaagaccatggacaacaaagaaaatacaagtgaattattttcccgatctcgtgataagctcagagttgatctcatgaatatttctatgactactcttagttgaaaaatactttcccaagacaaggagtactttactaaacttgtgattgatgttgtcttgaggcttaaggtgtacaaatggtttaatgaaagttggttatcatttacattgaactatgatatcttcatctataaaattttactcttcaaaaaggtagcacccacttggaatctattgaaattctgaagatacatggagaatctcttaaggactgggatgtgccaactgccgagacttgcacacgtcacaaattaaagctgtttgcattgccggctaaccaagctccagggtataaacttcataattagacattctagatcttagttggccgacttgatcataagccactacccaaagcaaaaaaaagtatattattgaagatgcaactctcccctatatttgagagaagatgaaggatatatcagtgtgtttggtaccctgtagctcctcgtcgacctggtgcaacagcttaagctcaggaagaatgctttacaaatccgaatataagttcagtacgatagtgcaaatagagagcatcaggtactccttaggttcctattgacgtttaattgtcctaatgaggttgatccatgttctattacgaattgtatgtgtgctattttcccacaattttctaatcaaaatattcagcacaaaaggatgacctcgtatatgggatattcaattaattgtccatgaaatttgacaaaattagaaaaatgaaaaatatagcaggcctgtagatctgagcaaatgatatgaagtaaatgttgttactttctcaaaacgtagatgagctttttttgcaaggactttagttgaaaattggaaaatctaacatgcctgtagatctgagaagacgatatgaagtacatgttgttactttcacaaaatgtagatgagcttttttgcaaggacttcagttgttatgttgctcctcattaacactaaaacttaacctgcccgggttacaattatacatctcaatccagatcagccttttcattgttctggttctgctcatttatcctttctagtcacataaattcttgccatttgacaccagcactaaagaagatagggagagttcaatgcatgatgtttgttttgttgacactggaagaggcgactaattgaggcggttgtcattgccaccggtgtgcacacattctttgtcaaggccgcatatcttgtcgattcaacaaaccaagttggtcattttcagaagctgttcatgctatcggtttggaaagaacatgtggaaagccaatctcggatcttgcttccttcagggattgtctccatcctcttgatagcgatctatattggttatttccgaagaagaatcaagaagcaattcaacattcatgcaagtgtggtaccagattgagatatgtctgttagtttgtaacaatataaacttgttagttatgtgtcagagaaaacatagtaacaatgatttgtgctctatttctacccgtcattgtgtcctatctcaatggtgacttctttgtacacaactgtgtggtctctctatgtcctaataaatacatgcatcatcaatgaacttaatggatattgtcaatacagtgttcta

SEQ ID NO: 39615 - DNA, 3170 bp, Zea Mays
ccatgttctgcctccgcgtccgattcccccgacaccgcctcgcccgcaatctacgccgccgcggtgcccacgcccgcgacatccaccacctcgacctcacccccgcccgcggaaatctcgcccgcgagatccctctgcccacacaccgccccctctgctctccgtcgatggaagggcgccattaacacaccgcgatcctcgctaccgcccccacgaggccataccatgccctcgccccctcccagatcttcgaagaggccgccaccccgcccctgttcttggcccctcgtcggcgtcggcctcatcgcggcacgggctgcactccttcgccccgctcacggccgcggtgcttggccacctctgggcctccggggtggcggtgctcccgggcctgacagagctagagttggtgcgcaccaaggctgagatgtggtttgcgttcccgcccgacctccgtgccgtcctcgccgcgggcctgccgtcggggcccgggttcccggactggcagtcgcgcgtggggctgcggtccgcattcgacctgcccatcgcggcggcgtcgctacagatcgcgcggggcgagctgtggccgcgctgctagggcgtgcgccccgccgaccccaaccacgcgctatggtctgcttcatctatggcgtggttcctgttttgcctgcctcttgctcctatttgaccaccatgcgcgccgcgaggaccaccactaggtggagcgtgtctccgtggtcttcttcaccgaccacgaggctgctgagaccctaggggggctcgacctggacatcatcgcagtgctccccaccgtcaggtgccatcgtcggtcgaggtccgtgactaagtgtgacgtgtacctgggcgagttcgcgcacagggagcggctcaagcagttgtctctcttccagatcccctacctcctctttgttccctcggcttagccaccaccttggccggtgctccttgcacgtcgggataggaggatgccgaccaagttctagatgaagagcaactgatttgcttcccttggatggattccactgttgagccattcaaaatttgagatgcggattaatttttacaattcatgttttcagatttaccttccaattttcttagtaataataataatgtataggtagtgcaccatgttttgattctaatctatcttgggtcacctgttttataccgaggtaacacctgttttataccgagataattagtatgtattctgagcttcaatcattgttctttatggtgagattcaatgtctccagttaattcattttgtaaattttaggttacagaatgtctctcgagtgtgctagagatgctttgctgcaaaagaccatggacaacaaagaaaatacaaataagctcagagttgatctcatgaatatttctatgactactcttagttgaaaaatactttcccaagacaaggagtactttactaaacttgtgattgatgttgtcttgaggcttaaggtgtacaaatggtttaatgaaagttggttatcatttacattgaactatgatatcttcatctataaaattttactcttcaaaaacacccacttggaatctattgaaattctgaagatacatggagaatctcttaaggactgggatgtgccaactgccgagacttgcacacgtcacaaattaaagctgtttgcattgccggctaaccaagctccagggtataaacttcataattagacattctagatcttagttggccgacttgatcataagccactacccaaagcaaaaaaaagtatattattgaagatgcaactctcccctatatttgagagaagatgaaggatatatcagtgtgtttggtaccctgtagctcctcgtcgacctggtgcaacagcttaagctcaggaagaatgctttacaaatccgaatataagttcagtacgatagtgcaaatagagagcatcaggtactccttaggttcctattgacgtttaattgtcctaatgaggttgatccatgttctattacgaattgtatgtgtgctattttcccacaattttctaatcaaaatattcagcacaaaaggatgacctcgtatatgggatattcaattaattgtccatgaaatttgacaaaattagaaaaatgaaaaatatagcaggcctgtagatctgagcaaatgatatgaagtaaatgttgttactttctcaaaacgtagatgagctttttttgcaaggactttagttgaaaattggaaaatctaacatgcctgtagatctgagaagacgatatgaagtacatgttgttactttcacaaaatgtagatgagcttttttgcaaggacttcagttgttatgttgctcctcattaacactaaaacttaacctgcccgggttacaattatacatctcaatccagatcagccttttcattgttctggttctgctcatttatcctttctagtcacataaattcttgccatttgacaccagcactaaagaagatagggagagttcaatgcatgatgtttgttttgttgacactggaagaggcgactaattgaggcggttgtcattgccaccggtgtgcacacattctttgtcaaggccgcatatcttgtcgattcaacaaaccaagttggtcattttcagaaggcaagctaagtgtgatgccgccacataagaccatgcccactgtatttatattttatactaatttttaacgtccaaaggacaccagatgtttcaatgttaatggtgctattgttatacactgatgttttgttcctgtttgcttgcaactttttgcagctgttcatgctatcggtttggaaagaacatgtggaaagccaatctcggatcttgcttccttcagggattgtctccatcctcttgatagcgatctatattggttatttccgaagaagaatcaagaagcaattcaacattcatgcaagtgtggtaccagattgagatatgtctgttagtttgtaacaatataaacttgttagttatgtgtcagagaaaacatagtaacaatgatttgtgctctatttctacccgtcattgtgtcctatctcaatggtgacttctttgtacacaactgtgtggtctctctatgtcctaataaatacatgcatcatcaatgaacttaatggatattgtcaatacagtgttcta

SEQ ID NO: 39616 - DNA, 2995 bp, Zea Mays
ccatgttctgcctccgcgtccgattcccccgacaccgcctcgcccgcaatctacgccgccgcggtgcccacgcccgcgacatccaccacctcgacctcacccccgcccgcggaaatctcgcccgcgagatccctctgcccacacaccgccccctctgctctccgtcgatggaagggcgccattaacacaccgcgatcctcgctaccgcccccacgaggccataccatgccctcgccccctcccagatcttcgaagaggccgccaccccgcccctgttcttggcccctcgtcggcgtcggcctcatcgcggcacgggctgcactccttcgccccgctcacggccgcggtgcttggccacctctgggcctccggggtggcggtgctcccgggcctgacagagctagagttggttacagaatgtctctcgagtgtgctagagatgctttgctgcaaaagaccatggacaacaaagaaaatacaagtgaattattttcccgatctcgtgataagctcagagttgatctcatgaatatttctatgactactcttagttgaaaaatactttcccaagacaaggagtactttactaaacttgtgattgatgttgtcttgaggcttaaggtgtacaaatggtttaatgaaagttggttatcatttacattgaactatgatatcttcatctataaaattttactcttcaaaaaggtagcacccacttggaatctattgaaattctgaagatacatggagaatctcttaaggactgggtacgtatttatagaaaaaataccactatattcttttgaccacatagcactgggttgcatacaaattctctcacctagcaccaaattctcctttctgtcaatcagtccaacctaagagcccaatgcaatcaatttctatttttatcaacaccctaaccaattagaattagcgctacattttctaaaagatcaattgctcatttactagctaaataaagtaggaattagcactacattttcctatttgtttccattgctctgagcatttgggctttgtttcccttcatattcatgtgcagtgatttgaagaacaacacctcctatttctcaataagttaatctgccacattgctgattaagagagcaatgatcgccattcctatgaaaactaaagttaaaggttgtttaaattaaaggggtccgaacgtgtcttgttacctggactgatcctatttgcaggatgtgccaactgccgagacttgcacacgtcacaaattaaagctgtttgcattgccggctaaccaagctccagggtataaacttcataattagacattctagatcttagttggccgacttgatcataagccactacccaaagcaaaaaaaagtatattattgaagatgcaactctcccctatatttgagagaagatgaaggatatatcagtgtgtttggtaccctgtagctcctcgtcgacctggtgcaacagcttaagctcaggaagaatgctttacaaatccgaatataagttcagtacgatagtgcaaatagagagcatcaggcgactaattgaggcggttgtcattgccaccggtgtgcacacattctttgtcaaggccgcatatcttgtcgattcaacaaaccaagttggtcattttcagaagctgttcatgctatcggtttggaaagaacatgtggaaagccaatctcggatcttgcttccttcaggtacagacaacccattcaccagagaatcagttcgtgctttttctgctgttactttagtatccaaaaattgtagtcatattgttgtgtaggtatgttgtgtatgattcaagtactatgtttcttgttgtcttcttaataaggtgtgaaatgcaagcagccatcatgcatgttatttggacagtctaagaaagctaatattttctcagccttataccatatagtgcttgatgtgcagttttttaattgacttgtcaatctgaacatcattttggataatcccttatttttgtggtatgtcttagacctgatctagcttaatgacctgtctttttatttgatgatgcatagagtgtatgctccaataaaatgtgcgccagccattctaaatattttgttggagagaatcagactgcaagttggatttgctggacagactcgtgcaatcatattttacttctaaccactttgtcagccttgaaagaccaacttgattttagctttagctcagttagtgcttctttcacaaaagtgttgtgaagtttctcctctcatctgattcagcatcaattatgtgaaatattatttgcattatatagtcagtttattatccttaacaaagtgataaaaggatattatggtatgttccaacatgtcccctttcatatatattaagggtgctgatgattctcgcataaagtgcatgtctctaaccactctatctactacataccatagtcgtggtgttgttacaatcttgttcacattgattttaagtttcctttgttaattacatgtttatttcagtgtgcctccctaatatgttgttaattttgatgtcttactcttattcacctagctaatgctagatgaaattcctttcaaggaatgatttactgcattttgttggatgttgtcctaatcaacccaatttccttttttgcaatgaggcatcatatatctttatatatatagggattgtctccatcctcttgatagcgatctatattggttatttccgaagaagaatcaagaagcaattcaacattcatgcaagtgtggtaccagattgagatatgtctgttagtttgtaacaatataaacttgttagttatgtgtcagagaaaacatagtaacaatgatttgtgctctatttctacccgtcattgtgtcctatctcaatggtgacttctttgtacacaactgtgtggtctctctatgtcctaataaatacatgcatcatcaatgaacttaatggatattgtcaatacagtgttcta

SEQ ID NO: 39617 - DNA, 487 bp, Zea Mays
cacgaacccgctcgccgctccaccaaatcgcctagcccggcccaactcctccatgccccgaccggcgtccccgctggtggctacgctccgtcagcccagcgacgcaaccctgtgccccatgttgttgccccgcctcgagccacgcaccgctgctacgccactcgctgcacctcccggccccggcgagagtcgccccgcgcctcctgcccgggccgcgcgtccccggcaccccgtcttaccccgatcgcatgttctcgatgcttcgtcctacctcggctaatttggtcgagcgccccagcgccgctcgccccgtctgagccgctagtgccgcccacgacacccggcagtccacgacccatccttcgcccgccccgtcctatccaccggctccataaggtatggaattatcccttttatggataacctcggagtgaatgatagaacatgttttttatgtcagacattagggtccaagggagattttgat

SEQ ID NO: 39618 - DNA, 7570 bp, Zea Mays
cacgaccatctatctcaggattgttctagctgatgtttgcctttgtggggacgactctcgttctcttcgcctctacgggtttgcagccgacgctctccatcctcgttcttgtcactccattcctctttcccacctcccctctgtcttggttcttcacacctggttcttctgcctcctgttgtctctgtcgtccgctctggtgaacccgcatcgttcctattccttgtgctgcttccgtcgtcagctccagtaaatcgctttgttcgtcagctcgagatcgtggatggcttgctaaaaaaatcaggatctttccgtttgaagtccagtgcagcgaagttggaagatacttctgattcttacagatttggcaaaggaggatcttttggtttgaagcccggttcggcgaagtttggaaattactactaatccttacagatttctcaaaggaggttcggtttattttagatcttttcgttcaagctcgtgcaataggacgtttgatccttctacaatttgctggcgaggtaccataaacatgagagcattctccgtgacaaatagagtattttctattctctctatattaacaaaccatggaagacaatcctcagtaccatcttccctacttacctaccccgaacagcatcttgtcacaagatgatgtacttggccttacaaccacgcaccagcgacatcattttccaaattatccacttctagcagccaaacaaacatggcccgatgattgctagcatatcctgatgtgccacagaatacagaggcggatgaacactacacagatcaacttaacaagaacgagctttcctcaccaccgaaaatgatgaagcacacccaagtcctagattctacaattccagaaaaatgaagcttgttacatcctcatgacatgcatgaaggaatttgcttttgcgtatctatggagggcttcgtcacttttgaatgaaaaaacatttatgtacatataaatcacttggtgaagcctttctcaggccatgtgtgttgatgcaacctctaggaaaaacaatgctattagttgttgacatatgctacttcaatactgcttgatatgtattgcactctcagtttcgtcgactgttggtccaaacagcatttgtgtacatacagaccagttgtattaaactttctaaatctgtgtatactaatgcaacctctcgaaaacactgttgttagcccttgacacgtatgctatttaaatgctacttaatatgtattgcaatctggttttcctgtacagaactgctacagttcccgttccaatattaaccggaagcttctgcaacctagcaaaatttccttaagtctgctttgtgtccatgtatttatgtgcttcataacgaatatccttcatataacatttccacgctacaatttctatccacttaaaggcttgttcgtttatatgttaatacatgtgtattggatgggattaagttggattaaatccatagcaagtaaaaatccatctcaatttcactcaatccacacaaatacacatggaatatgaataaccgaacaagccctaaatatactcacacacattctaaaatacgggtcaacaagcgcgcatggcgcacacaatacactagtagtttacactatactagaattatgccttttgttgccatagagacaaagttatagctcaccattttaagtttgaacatgtgttatattctacttaaaataatgtgttcccatgcacatcaacacttgaaatatattataatttttaatgattcatggaaaataatataatagtgatgattagctcaaagtacaattatttataatgtgcgattatattattcccattgcaacccatggatatgatcctagtttattgaatttcttcaccaatggataagcttccatacaacaatactatgcatttgtaatttatgaaaaaacacaacacaacaccaaatttcaatattttgcaagagaattcctaataaataaaaaacactgattgccatagccttacaggaaaaaacgaaaaggttctcccttgcatgtgaataaaatcatttggtgatgcttaacaagtgtggtgaaaaaaggggagaagaacatggtaaatcgaaggcaaactaggtgcacatgttgttgagcttgttccaacttcaaggcacttgcgtaaatctatattctattgtgaataacatattccattctctacacacaattatatggacaccctatgaatgatgcaaaactaaagtttggttattctttatgttgcattttgccccttttaaatgttggacaaacttttcctttttgcgaagaatgttgggccaagttgtacaaataaaacacaagatggctataaataaggtgctaatatatgcatattttattctcttttaggttaaaagcccaaattgatatgttgatgtattattttttttcatatgcaaatattatcgcatagagggatgtaaatttatcgtactagtaaattattaaatgaggaattctcaacaataaccaattgaaaatgcaagggtcaatacacagagaattcccatcatgaattaactctcgtgtgacttgcttccttagtagccatattcctgcacaggagttttcgttggccatgtattctaacaatgttagtagaagacataaaaagacataccattatatggttagtgtcatatgtacacacatgactatataacacgaagtttgtacctacatcatgccttccaaatgtactctaatatccatatatgcatccttacataatgttctatgggtgatgtgagaatttactatacatatatattgtcattaaaaatgaatttgtttctatattaaactctaaactctaaaccctaaaccctaaacaaaccaaccacttgcattcatttaattgacacttgatatcttctatagttaattagatggttgaatcataatagatcaacatagtttttgttaatcatacggaaaggaaaaagtacgcatgaacgtgaaatggtgttggtcattgttccaaaaatatgttctcaaactctatgaaagaaacatctagaaaataagcatttagcagaagggtgtgaaataacaatggtttctgttaaatgtggtcaacaaaataaaatactgtttctaactcaccttatagaggagcaaaatagtcacatttagaaattgtcagatgaataggcacaactccgtggaaatcatcgttataaaaaaaataaaaatgtatatgagtacccataatgaacgcagttctggaacacaaaatttaatatgtttgaacatagtttcagtgattagttctctattttgtaaaaaggggaaaagtattgatgattgtaatacggtggccatcatcatttgaagctatgttctcaaccgaaacaaaaaaatgcattcagtgtttatcacatctaaagcagcattatccactcagtaaggtaagaagtaaaacaacaatacaatagccagaaaatgatatgccaacattgcactcttttagtaaacacaggaggatgaattctaaacttatttaaaaggtaacaatacccatcttttggtaaacgctgtagcatggattttgatccttttttaaaaaagatatttgcaaatgttttgcatctgctggcatcgatgtcagtcgaacatagacggcggcggtcgggtaagcactaagtgaatggcggccgggtaagcaagaggcgtatgtgcaaatatcagagaaaatttaaaaaaaaaatcaaattcaccatgaatgaaacgctcaccagtgtttttcgcggtggagatgtcgcctcgcgatgacgtagttgccatgttgctgctgcgcaatccaaatgaaacccggccagggatgaggaaccgagactgcaatagaaatcaagcgtgatggcgctgaagaaggtgaagaagcaaaaacgcgaaataaatccaaggtaaagcagatagggtttgtcacctgttcgacagctgctacagcaatcgcgtgcgccacgacgaggacgacatccgtgacgagcaagacaagagaggagaagtggttgggcgagggacggatgcagctaggcgaggaggcgagcaggagacgagcggtgggggcacaacctccatcgattcgaccaccacctcgatgctcgagaggctatctcgaccgggggtagcatcatagcgccttgatggtgacagcggcgagcgcgaggtctagggtagggggcaggtgcggaggacggggcgggaggaggcaggcgcaacgggcacgggggaatcgcgagcggaggatggagccatggaggcgggggcgagctcacggtatccactgtggacgcggggaggagtacagacgaggatggaagggatgcggggaggagtatggaagaggcgggctaggatggaagggaggcggaggaggaggatggcggtcggatttgccggcggggatctcggtcggggggcgagggaagggggtcacagagcgctctgtgcatatttggaaaacaaaaaatctggagggccaggctggaaaattccattgccagcttgctgcgcgcctgcgcttccttctcgaggcggcccgcggccggctgtcaaatactacgaccccatcccccgattccaaccccacgagaacccaaagtcccaaaccaaacggccgaacccctgtgccgcgcaggctgctgcaatgctctccgtctccgcctccgatggcgatcgctcgccgtgtccggtggaggcacgccgcatcgtggttacccaccgcctccccctccacgcggagcccaatcccgacgcgccgtacggcttcgatttctccctcgacgccgacgcgctcccgctccagttggcccgcggtcttccccgccctgtggtcttcgtcggcgcgctcccctccgccgcggcgtcgatctctgcgtccgaggagctcgaggccgatctcctcgcgcgcttcggctgtagcccggtgttcctggaccccggcctccacaaggacttctacgacggattctgcaagcgctacctgtggccgatgctccactacctcctgccgttcacgctcacgcccttcttcggcagtggcggcctgaaattcaaagcgaacctctaccgcgcctacctcaccgccaacacgcagtacgccgaacgcgtgctcgagcaactcaaccccgacgaggacctcgttttcatccacgactaccatctgttggcgctccccaccatcctccgccacaagtcgccgcgcgcccgcataggcttcttcctccacacgcccttccccacctccgagctcttccgtacagtcccggttcgcgaggacctcctccgatccctcctcaacgccgacctcgtgggcttccataactacgattacgcccgccacttcctctccgcctgcactaggctcctcggcgtcaccagccacacccatcgcggctacatcagcatcgactactgcggccgcgctgtttccgtgaagatcctcgccggtggtgtcgacataggccagctacgtgaggtgttgtcgtcgcccgagactgaagcgaaggccaaggaggttgccacgaagtttgccggtcgtcagttgttgctcggagtagacgatgttgatttgttcaaggggattggcctcaagctcttggctatggagaggctgctagagtcgcagccggagctacatggccaggtggtgctcgtgcagatcaacaacccggtgcggagtcctgggtatgacaccgacgagatttgtgcggagctgcaggcgatgcgtaagcggatcaatgcccgcttcgcgacgccggcggggtatgaaccgatcgtgatcatcgaagaccccatgacgatgcacgagaagctggcgttctacacctcggcggacatctgcctcgtcaccgcggtgcgcgacggcctgaacaggacaccgtacatctacaccgtgtgccggcaggagggtccgatctccagtggcgtggtgggggcaccgaaggagggcgccatcgtcctgtccgagttcgtcgggtgcgcgacgtccctgggcggcgcggttcacatcaacccgtggaacgtggacgccgttgctgaggggatgcacatggcgctgaggtttaatgggcgcgagaagcaggtgcggcaagagaagcactacaggtttgtttccacgcacgacattgcctactgggggcgatcgctcgaccaggacctgcagagggcgagcaaggatcacgcgtccatgaagtttatgagcgttgggctcgccatgagctaccacatcgtcgtgcttagtcccaacttccagaagctctcacctgagcacatcaatccatcgtaccagcgggcaggcaacaggctcatcttactggactatgatgaaacagtaatgttccatccggggctgctcgacagacatcctagccagcggttgattggcatcctgaatgaactgtgctcagatccaaagaatactgtcttcgtagtcagtgggcggagcaaggatgaactggctcgatggcttgagccctgtgaaagactggggatctctgcagagcacggctacttcacaaggtggagcaggtattccccatgggagtcacccgacctgaaggtagactatggttggaaaaagatggttgagcctgtgatggacctttacgtggctgtaactgacgggtcatccgttgagactaaagaaacagcattggtctggcactacgagggaactgatccagttttcggaccaagtcaggccaaggagctccgggaccacctgagcgacgtgcttgccaaagagcctgtatctgtgagaagcggctacaatatcgtggaggttaatcctcaggaggtggacaaaggaaccgccgtgcagagaatcattgcggccatgagagatcggggaagaatgccagacttcatcctatgcgtcggcgacgacgcgtccgacgaagacatgttcaaggctgtcactgcaccgtccaacaagtccgcgttcccagaggatgccgaggtattcgcttgcaccatcggaaccaagccaagcctggccaagtactacctggacgaccccgtggaggtactgtcgatgctcaagggcctgatcaagtcgtcggtggaggagcgtcccggggacggggaagggccgtcgcgggtctcgttcgactgagagaagaggctcattttgtcgagatattcttcgttcttttttgtaacaaaagggttaggaaaatggccaggagggtgcaaaggaagaaaacaaaaatccactaggctgataggttactgatggctgatcattagcgcgaatgacaacagggttctggttcattttttgcaatcctcagtagtagtagtgtccttgtacaattcctcagaaattttgtccaaagattggaacgaaggaaagacagggtacaaagaaatcatatcgctggacgctccatctggtagtaccgtaccgtagtagccggcacaaggacacatgacagcagtgggcagtgtagcagtacaattgttacgtcttcccgcggcacacatgacagattgtttttgcttc

SEQ ID NO: 39619 - DNA, 242 bp, Zea Mays
tgcaagcttgatttagtatggtacgtgaattaaccacatgatgcggggaactagaactgagtcaaccacaagatatcgctacgcgtgagcttctccataagatggtgctgatgaacagaactgaaggtggacaaacgaaacaagtatcagaacaaaagctgatcgccaagtggtcgtcacctaacaaacactaacctagtgtttattccaagcaagccccggtgcatgcaaacccttccttg

SEQ ID NO: 39620 - DNA, 2954 bp, Zea Mays
attttcaacaatattttttagtaccaatagcagtagtaatacaaatttagattacagtaagtagcaagttgcattaaactggtatacttgagtgtccagcaatagtgtatctgtagagtttacatagacaaacatagttctaggaagacttcaactagagccatatgtacataaaagtctattgaccaaaagtgacctagcttttcttgcatacacacagttctaggaaggcttcaacatcagattaatatatatataaaagtcttatgaccaaaagtgatggagcctcttctatgcgtgcaaataaaagtctattgatcaaaagtgaccagtctttcttgcatagacacacagttctaggaaggcttcaacatcaggttaatatatacataaaagtctcatgaccaaaagtgatggagcctcttctatgcttgcaaaaaaagaaacaatacatgtatacaaatgagagtagtatgttagcataaacagcaccaaagagcacaatgtaatattaggatcataaaacaaataacatttttttgaaaagagagaaacaataacatacaatatgtttattttatctttccctctgatcaccgcaagcaggtactaagtctattagcacaacaagctatgttatgtctaagatctcaagttacaaaaacttaattgaaaagttaaagtgtttctcgaataagatatatcaagaggctaacagtctaacacactgttatgatgatatataaggaaaaaaaagagcagcatagaagcaagtttactaagaactgtgttgcaggaacattttttggtagtgtgtattttcagtgcgcactgtgtattttcagcacagaacataatgaacataatagcagtgttcaatgtgcactgtgtattttcagcacagaacattttttgaacatatattttaggaatgagtttgctcaggttattcttgcagcaaaaaagggctatgaagtatgaactacactaattagccaatagctacgagctatgtaatttgtttattttctctactatcttcttgcaccagatgctgtgaatcacttagcaagcaactacaataaaatcagaaactgaaagcaagcatattccaagatgaaagaaagtgcaatttttttctgttgcacaaatggaatgacatcagatagtgagagaatagaataaagaggggagagggacaggagtaaggtctgactttttaaaagaggaaaaaaagccatgaagatataaaatcgaaattagattcaacgaaggcgaactgaattattttttctgttctacaagaagtagacagtagagttcctatgaccattatggacccaaaattgtcctgcagcaacctacgagcacaaaaactgttttgttggccaaatgaaacgtaggctacacacacatcttagaatgaaacagagaaaccagggattaaatccaaaagctaaatttagggaaaaccataaacagtaaattttggggaaaaatttaaagaacatagacgttcagtctattcgcaaagtaaaatagtggcatcttagaacctcaatgtttggtggccaaatgaaatacgtgtgatatacaggtcttagaatggagcacagaaactaaggaataggtcaaaaagctaaaaccatggaaaccctaaacattgaaaaaaagtttgaagaacatagacgcttaatcaattagctaagtaaaatagtggccttttcaaacttcaatgtatcgacaaaaaaggaaaacaaagtctgtgcttcgatgcaaacagtttcacctgaatgaaatcagatgtctataggtgtactaatgtaggacttttctgtgtcgaagagaatccaaatgtaaggccactcatgtcatcaactgtgtttatgttggagaataaagccacattgcttctagcaccaaaggagcatgtttatcttttctccaagaaataatgaaactgaataaacaagaaagtaagaaacatagatggtttcctgaaatatatcatgtaccatacctcatatatggggttttagtcaagtttttccaaacatgctatttgcataggactcacgttttttgctttcagaacatggactttgtgcctaatatttgccttatgcataatatttagtggattttgttattgccatacatgagctaaacaagcacaggtaagaagcaagagcacttcatgttcctatcagtttatttagaaatgatttttctagctataccggtttgttggtacaggatggctgaccctgactttccttggatagctgcgacagtgggaggtatcatcatttagcaagacaatttaatgacgtcagcatcaaagtgtacgggatagaccagactggtgagaatctttttcccttttttagttgtcatgcttgaactcttatattatcacaaatgcatttttacctgtttttcatcatgttgatgattgtgtgtagacgaggatataaaacactacaccaaaatcatacaattcctacggttttttaactttctacaacttttataacaaaccgtaggaaataaataacttccgagcaactggtagctctaggaaataaacataacttcctacggtattttataaaagttataggaagttagctttcggtatataaatatacactgttgcactagcaaaacgaggaacacatgcaatgtttcataatttaaacgaaaaaatagaatcccaattgtacatatgtgcatgaactggtagattaaataacattgatggtgacagaccaaagtgtgtacgaagtacctggttgatgtagtcactgaacttcaggggtattactccacgtggttcggcccaaaaaagcagatctggggagaatctaaaacacatggagtacataaactaagttaaataaatgcaagcgtataagtaatcactaactacgtaatgatagtgtagagttata

SEQ ID NO: 39621 - DNA, 115 bp, Zea Mays
ggtatgggtaaatacgaagaaaccagtacataaggaattagtcaattaccacatgatgacatgtatgggtaagtacgaagaaagcatctttatatttatgcaatggaaaaaaata

SEQ ID NO: 39622 - DNA, 732 bp, Zea Mays
atacacaaaaacagctgccagttggtcatggaagatgagaacgaaaagaaaaaggaaagcaaatctttcgcttggctgttgttcccgtttccatcgataacttgagcaaaaataaaaagaagaagaagaagaagcacaaactttctccaataagaaacaacagctagccaagcgaaagatctgttcatcgatatggtcatgcatgcatgcatgctgttaatccattcccatcgtagaagaagttacatgcaactcagcaaaattacagccacaccaccagtcccgttctccacttcatcatttgcaaaaaaaaattacaaccccaccaaaatcgtgctcgggtcggggttctcttctcctggccggagatggtttttccagcgtcaaaagcgagctcagcttctccgagcaaagcaaaaaccgagacaaaaatcacacctcaggaatgcggcgctcctgatctcctccttctctccggcgctcactgtgctcgccaccattctgtccgccggcgtccatgacgctggccacggcggcttcgtctgcctgcacctccttgttgctctcctcctcctcgtcgtcgacgcccttgctgctgctacggtcgccgccgaaggaggacgccctgctcgacatgggcgtggcgaggcagggcaggacgcagcacttcgacctttgaagactttggggcctatgagacacatgaagctagctagggctgggacgacattt

SEQ ID NO: 39623 - DNA, 2912 bp, Zea Mays
tatggttataaagcccatcacccgagcaggaacccacaccacaccaccgccgacacactctcgctcgctctcgctagctagcgggaaactactatggcgtgggcgtctccgcgcggcacagcacctcagctcctcctcgtgctgtcgctgctgctggccgctgccagtgcctccctgcttcccctgagcaataatgcgcccccgccgagacttccgccggcggcgaaggcaagggagggcggcgcctcggtgtcggcggggctgctctccacgctgcgcgaggcgctggacgcggtcaaggacgtcacatccatcatctcgtcgttccccatcggcggcatcctcggggacggcggcggcgacctccgcctgtcgtccgccgtcgccgactgcctcgacctcctcgacctctcctccgacgagatgtcgtggtccatgtccatgtccaccgactcgagcggggcgggcggcggccgcctcggcaccggcgacgcccggtccgacctgcagtcctggctgagcggcgcgctcgggaaccaggacacctgcaaggaaggcctggacgcgaccggctccgtgctgggctcgctggttgccgcggggctggacgccgtcacgtcgcttctggccgacggcctcggccaggtcgccggcggcgacgacgcgaccgctccggcgtcgtcgttgccgccctcctcctcccgccgcggcgccgccccgccgcggtggctgcgcgcgagggagcggcggctgctgcagatgcctgtggggcccggaggcctggcggtggacgccgtggtggcgcaggacgggagcggcaacttcacgacggtgggcgcggccgtggaggcggcgcccgcgcagagcgcggcgcggtacgtggtgtacgtgaggaagggcgtgtacagggagacggtggaggtgaagaagaagaagtggaacctgatgctggtcggcgacggcatgggcgccacggtcatctccggccgccgcagctacggcgacggctacaccacctatcgcagcgccaccgtcgctgtgaacggcaagggcttcatcgcgcgggacctgacgttcgagaacacggcggggccggcgaagcaccaggccgtggcgctgcggtgcgactcggacctctccgtcttctaccgctgcgccttcgaggggtaccaggacacgctgtacgcgcactcgctgcgccagttctaccgcgactgccgcgtcgcgggcaccgtcgacttcgtcttcggcaacgccgccgccgtgttccaggactgcgcgctcctcgcgcgccgcccgctgcccggccagaagaactccgtcaccgcgcagggccgcctcgacgccaacatgaccacgggcttcgccttccagttctgcaacgtctccgcccaccccgacctcctcctgcagcagcagcagcagcaggcccagtccagcaacagcaacgggaccgcgaccacgcagacgtacctcggccggccctggaagccctactcccgggtggtgttcatgcagtcgtacatcggcgacgtggtgcgccccgagggctggctcgcgtgggacggggacttcgcgctcgacacgctctactacggggagtacgccaacaccggccccggcgccaccgtcgccgcgcgggtcaagtggcccggcttccacgttatgaccagccccaccgaggccggcaacttcaccgtcgcgcagttcatcgagggcaacatgtggttgccgcccaccggcgtcaagtacaccgccggactcacgtcctgatcctctcttcaaaccctgatggatgtaggctttagtacgtacgtgtacgtagtatttgcaaccttatactcctagcactttatatgctagcacaatagtcctactacatgcatggtacctcgtatctgtggaggagaatgtaaggtgggttgattagttgtttgattgggcctttttaaacaaaagtactatgtggaaatggccgagatttaagtctgtttggttcgtggctaactacgccacactttgcctaaggttagtcgttcaaattgaaaaactagagtctgtttggtttgttacctaagacgccataacgtgcctctgcctaaccttagttcttcaattcgagcgactaaggttaggcagattatggcgccttagctagaaaaccaaacagggctctaaccttaggcagaaaagttaggtaaagtgtggcaagttagacaggaaaccaaacataccctaaaatcatcatatgttctagaacttgtgacttcattcatgtgctacctgactgatagacaagccgaaactgagaatggacaaagcttgtctgaaaaaagactgaaaatctgaaacggcctgaccagggagagcttgtagccaaatcccctgttttccaggctactacaagttgtgatgaagtcctgcggtctgtaaagttcttcctgcgtcagcaaaccagttcttcagtttccaaaaaaaagttttttccaccctaggtatctcctagcctttttactacttttttcaactcataatatgttacactgaagaagaattcctatacatcaacacatgtcagtctgacagcatacaaatcaatacaaacaagtgtacaaatgatgcactgtatagggattatggtcagcatcacagcaccttgtcttgtccccgtggatcaacatgctcccaacaacgagaggacaggtatcccctccctctggccacggccgacgggcgactcccctcggagccaccggacgctaaccctcccctgttgtggacccgcaacactcggtgtaggtgcaccatacacgataaaatgttagatagtgaactgcagcgtctcgttaagtgtatctcgtccaactatatggcaatgtatttatagggcaaccggagtagatagatctaag

SEQ ID NO: 39624 - DNA, 796 bp, Zea Mays
ctgggcgtcgttctcgccgcggcgcacgtgatccaggaccgccatgtcgcgacgcacgagacctgctttgtgccaagacaaaggttgccaaagtttgacttgcatctccaggtcgcagcgacaaagaaaggtgggcgatacggtgacgacgcgggagcacaaccaccaggtatgtatggtattgatttggggacaatagtgggactggagcttgacgtcgacatcgtggcgacgaacgcaacgacaaagaaggacattgagttgtccaaagaaataaatgattcatttaggcaatcatctcgagctaggacaaggcttccctccagcattgaaataagtggccatgtgcttacaataggctattggcctacatatctaccaatggacgtgtatcgggaagacagtcctgacttatttactaatgaagaaaaaatcgatgaagtagaatcaatggatataggattgctgctgactcgtcttctaagcatggtgaagttgacatatcacattagcaatgaactatcagggcagtgatcatgattttgtacactactttggtgtatcattgcctaataaagtatccacaaactcatgagccttttttctggttccagctgcagaccccaaagaagaacctgtagttctagcaaataagtctaaatgttcaccagagcaggggcaacacaggatctaacgcccattctatgttgctgaagtcgaagcacctgtgctcacaatcgaaaagcatggaacaagaaggctggaattaactgagaggagaaaatttgaatgtgca

SEQ ID NO: 39625 - DNA, 6004 bp, Zea Mays
gaaaacgcgtcagttatcaatctcctctctccctttctatctccgtccccgtgaacccgcaccctccagcctcccgtgctccactggcgcccttctggaaccctcagccctcctaatctcagccgaagttattaacctctttttttcttatataggccaaattagttcccctcccgcgattccaaggctttgctcttcgatctcagccgcgccgtgttcttcgcggcgagttcggagcgttggtgcccaatccgtcgaggttgtgagttgcttccgctgctgctactgccgccgccaccgctggtgttagtgatctgatctggtgggcggattgcggcgcggaggtggaattgttttggctctggggaaagctagctatgcggattgaggcgtcgccggattgagcatgaggggcggggctgctggcggtggcggtggtaagcgtggcgcggatgatgggatcgccggatgggcggctcgtggagttgttcggtgcggtgaagtcgtggatgccgcggcggggcgaccactctccgccgcccgcgttgcagtcggacgcggcggctgggcagccgctgccgcatgacttgtcgagggacttctggatgccggaccagagctgccgcgtgtgttacgactgcgacgcgcagttcaccattctgaatcggcgccaccattgccggcactgcggccgtgtgttctgcgcccggtgcacggctaactctgtgccccgctcgccgggggacgccgcgagggaggacggcgagaggattagggtctgcaattactgctttaagcgctggatggaggaggaacccgcagcgcggggggccgctgcagggcaacagccgtctagcccgtctctgtctgccgctagtgtttgcagtgacaagtccagcttcactgggacgaatgggcaaatgtcgtcttatgcgaatattagctactccgaatttccggtccatggagagggcaactgcggcgaggatgacggctatcgtgaggagcagcagcctgctatggaccccgctccaaccatggagcctgcagcttacgctgataactcgtctgatcgattcaacttttgcttgcagaggagtgacgacgaagatgatgattacacagttttccgttcagatttggaagagcagcacatgcaaaattctgataaatattatggacctatgtattttgatggacatcatgttagctgtagtgatgacgcaaaagaatctacatccccaaggaaaaaattgacaaccctagttgattctttgggagcagataagaatgaagatcataacgttgatgagtgctgtaatgctcggtcttcttccatgtatagcatggaagtgctagataatgagcccgtagactttgaaaacaatagcttactttgggtagctccagaacccgaggacggagaggatgatcacgatggtgaacatgatgatgatgagggggtggatgctacaggagagtggggatatctacgcacaaacagctttggcagtgggcactgtcgaagtagagataagtcagctgaggaacacaagaaagccatgaaagacatagttgatggccactttcgggcgttagtttctcaacttcttcaggctgaaaaggtaccattagttgatgggagtggcaaagaaagttggctagatatagttacttctctgtcttgggaagctgcatctcttttgaagccagataccaccagcaaaggcggtcagatggaccctggtggctatgttaaggtgaaatgcttagcttgtggtcacccaagtgaaagtttcgttgtaaaaggagttgtttgtaagaagaatgttgctcaccggcgtatgtcatcaaaaaaggaaaagcctccaatcttgattcttggtggtgcactcgaatatcagcgtgtatcaaatttgctttcaagttttgatactttactgcagcaggaaacagattatttgaaaatggctgttgcgaagatcaaagcacaccaaccaagtgttgtattggtagagaaatctgtgtctcgttatgctcaggatttatttctagagaaaaatatctcccttgttctgaatatcaaaaggccactgctggaaaggatatcacgttgcactggtgctcatatagttccctcaattgattgtttgtcatccgagaagcttggacgctgtgatttattccatgtagagaagtatgttgaagagcatggaaccgctggggaaggtgggaagaaaatgctgaagaacctcatgttttttgaaggctgtcccaaaccgttcggttgtacaatcttgcttaaaggtgctaatggtgatgagctaaaaaaggtgaagcatgttttgcaatatggagtatttgcagcctaccatttggcacttgaaacatcattccttgtggatgaaggtgcaactcttccagaactccctttgaagtcgccaattattgtagcttttccagacaaaccttccagtgctgatagatctatctcgacaatacctatcataccaatccctagtgcttcaccgccaaacagttgcctgcaagcatttggcttgcaaaatgatgatctgacatttgatggcactaaacgaatggaacaaacagcattgggagttccttatgaacaaacagcatctgttcagatcaatagccaaaatggacatattaccggttttctggatatggtccctcaatcatctgttggtcccttgtttcagcagtcggacattcactgtcctgatggtactggaggtgtgaacagaaaaatgaatttacaaggcagcctacctggaaccactagaaatgtgttggttaatgactttagccatagtgtatctactgctcatccgacaaatttggtgtcagctaagggtgacggttcacttgccaagaatcctgagattggtgacaagatagcagataagccggctgcccctctcaacgtacagatttctcatgacgatgagagcataaagaataattcagttgcaaaaacagatgaaattccagcatctccagcagaaaatcagagtatattagtttctttatcctctcgttgcgtttggaaagagagtctgtgtgagcggccacaccttcttcgcataaaatattatggtaactttgacagacctttaggcaggtttttgcgtgaccagctatttgatcagagcaagctttgccaatcttgtgagctaccaccagaggcccatgtttattgctatgtacatccccaaggcagtttaacaatatcagtaaggaaactttcaataaagttgcctggcaatggtgaaaatgatggtagaatttggatgtggcatagatgcttacgctgccctcgagtcaatgggctccctccagcaactaaaagagtagtgatgtctgatgctgcttggggtttgtcttttggaaaatttttggaacttagtttttcaaaccatgcggcagcaagtagggttgccagctgtggtcattcacttcacagggattgccttcgcttttacggcttcggtgaaatggttgcttgcttccgatatgcatcaattagagtccactctgtgtatttaccaccaccaaaacttgattttacttctgagcatcaggaatgggtagaagaagaagcaaaagaggtggatgactcagctgaacttctgttctctgaagttctgaacgcactccacaaaatttcaggaggaaggccaattacaggttcttttgatggcaacttgaagattcttgagttgagaagaaatattggagaactggaagagatcctggtggcagagaagactgactttatggagtcattaaagaatctactgaaaacggatatgagaaaggaacagccgttcattgatattcttgatgtcaacaaactaaggaggcacttattatttctgtgttacttgtgggatcaacggctgaaattcattgcaaattcaggtggcaagtactgtgatgcactagctggtttacggattgggagtgggaattctgattttaatggtaaaccagttggtgcagccccaaagctagagaagggctcaaaggctacagttctttcaattgctaaggaagggtcgttacaacagagctcttgtccatctcatggtgaagatgaggggttcaaccaagccaatgaatataatgaaaatatctcaaggaatgctgcagaattgagcggcactgaagattccattgcaaaaatcaatcatgctaccagtgcagatgttaaggatcgactggataaccaagaatccagaactggtgtacgcagggttgtttctgatggacaatttccagttgctactgacattccagacacattggatgcaaaatggagaggtcagaatgaacctgctcctgattcaaacttggcaaaaccaccactttcagtcgaagacacaacagttgatgttaaaagtcaagccaaggctgtgcatacttttactttcactgttcgttctggagatgcagcagaggaattacttagatggattaagatgccatacatgacatcaaacagttccttaaacacaacttctagttcaccactgagattcacttccttggcagagtacattcctaaatacgtcgagttgttttgtgatctatcacagaaaggtggagcaagacttttcttacctactggagctaatgacattgttattcctgtatttgatgatgagccaacaagtgttatttcgtacgcacttgtttcacccatgtactgcttccagttgtctgatgacagcagcaaaaatagagacaaggagtcttcacttccattgcctgtatatgattcaggaaattttaatccatttcatttgtttgaggaatttggatcccactacgatgttacttcatcagtgtctggagttagaggatcctttgctcctgatcaggtgcacttgagtgtttcttttgaagatggtgggccacttgggaaagtcaaatataatgtcacatgctactatgcaaaaaagtttgaagcactaagaagagtccataagcactggaagccctacatgcttagcaaaaattttggggatctatcaggttactagtaagcatgtaaagggtggcaaggagtcaaagatggatttgcttgtgatggaaaatcttttgtttggacggaatattaccaggctctatgatctaaagggatcttcaaggtcaaggtataatgcagattcaaatggtagcaacaaggttcttcttgaccagaacttaattgaagcaatgccaacttcaccgatttttgttgggaacaaggcaaagcggctactggaaagagctgtttggaacgatacatctttcctagctggaatcgatgtgatggactattccttgcttgtgggagtcgacgaggagaaacatgaactggtcttaggaattattgattttatgaggcagtatacatgggacaagcaccttgaaacatgggtaaaatcttctggcattctaggtgggccgaagaacgcttctccaactgtcatttcacctatgcaatataagaagcggttcaggaaagccatgtctgcttattttattgtcattcctgagcaatggatgcctgcaataatcaatccaagcaaatcatcatcaaatatttgccaagaagattctcaaaatgggtctcaagagtgatatgatgttcgataagtccggttttttgtcctgtcctgtcgtgaaaagttctgaactgctagtctggcgcaatgccttggctgctactgttgcgtcaaagtgatattctggctgaccgcattctcttgtgctaattggcacaggtccgattgcatcattgagtccctcaagcatcggatgtgtatattcccaaagatgtaattatgccctagtcgtagttttccccccttcaataaatcagttccatagtatcatcacttgtgtcgtcgtcgcttaatttttgttgtatgtatagaactagcaggacgcttgtttttgtggtcgttttgtatattattaaatcttccatttt

SEQ ID NO: 39626 - DNA, 5894 bp, Zea Mays
ctcctctctccctttctatctccgtccccgtgaacccgcaccctccagcctcccgtgctccactggcgcccttctggaaccctcagccctcctaatctcagccgaagttattaacctctttttttcttatataggccaaattagttcccctcccgcgattccaaggctttgctcttcgatctcagccgcgccgtgttcttcgcggcgagttcggagcgttggtgcccaatccgtcgaggttgtgagttgcttccgctgctgctactgccgccgccaccgctggtgttagtgatctgatctggtgggcggattgcggcgcggaggtggaattgttttggctctggggaaagctagctatgcggattgaggcgtcgccggattgagcatgaggggcggggctgctggcggtggcggtggtaagcgtggcgcggatgatgggatcgccggatgggcggctcgtggagttgttcggtgcggtgaagtcgtggatgccgcggcggggcgaccactctccgccgcccgcgttgcagtcggacgcggcggctgggcagccgctgccgcatgacttgtcgagggacttctggatgccggaccagagctgccgcgtgtgttacgactgcgacgcgcagttcaccattctgaatcggcgccaccattgccggcactgcggccgtgtgttctgcgcccggtgcacggctaactctgtgccccgctcgccgggggacgccgcgagggaggacggcgagaggattagggtctgcaattactgctttaagcgctggatggaggaggaacccgcagcgcggggggccgctgcagggcaacagccgtctagcccgtctctgtctgccgctagtgtttgcagtgacaagtccagcttcactgggacgaatgggcaaatgtcgtcttatgcgaatattagctactccgaatttccggtccatggagagggcaactgcggcgaggatgacggctatcgtgaggagcagcagcctgctatggaccccgctccaaccatggagcctgcagcttacgctgataactcgtctgatcgattcaacttttgcttgcagaggagtgacgacgaagatgatgattacacagttttccgttcagatttggaagagcagcacatgcaaaattctgataaatattatggacctatgtattttgatggacatcatgttagctgtagtgatgacgcaaaagaatctacatccccaaggaaaaaattgacaaccctagttgattctttgggagcagataagaatgaagatcataacgttgatgagtgctgtaatgctcggtcttcttccatgtatagcatggaagtgctagataatgagcccgtagactttgaaaacaatagcttactttgggtagctccagaacccgaggacggagaggatgatcacgatggtgaacatgatgatgatgagggggtggatgctacaggagagtggggatatctacgcacaaacagctttggcagtgggcactgtcgaagtagagataagtcagctgaggaacacaagaaagccatgaaagacatagttgatggccactttcgggcgttagtttctcaacttcttcaggctgaaaaggtaccattagttgatgggagtggcaaagaaagttggctagatatagttacttctctgtcttgggaagctgcatctcttttgaagccagataccaccagcaaaggcggtcagatggaccctggtggctatgttaaggtgaaatgcttagcttgtggtcacccaagtgaaagtttcgttgtaaaaggagttgtttgtaagaagaatgttgctcaccggcgtatgtcatcaaaaaaggaaaagcctccaatcttgattcttggtggtgcactcgaatatcagcgtgtatcaaatttgctttcaagttttgatactttactgcagcaggaaacagattatttgaaaatggctgttgcgaagatcaaagcacaccaaccaagtgttgtattggtagagaaatctgtgtctcgttatgctcaggatttatttctagagaaaaatatctcccttgttctgaatatcaaaaggccactgctggaaaggatatcacgttgcactggtgctcatatagttccctcaattgattgtttgtcatccgagaagcttggacgctgtgatttattccatgtagagaagtatgttgaagagcatggaaccgctggggaaggtgggaagaaaatgctgaagaacctcatgttttttgaaggctgtcccaaaccgttcggttgtacaatcttgcttaaaggtgctaatggtgatgagctaaaaaaggtgaagcatgttttgcaatatggagtatttgcagcctaccatttggcacttgaaacatcattccttgtggatgaaggtgcaactcttccagaactccctttgaagtcgccaattattgtagcttttccagacaaaccttccagtgctgatagatctatctcgacaatacctatcataccaatccctagtgcttcaccgccaaacagttgcctgcaagcatttggcttgcaaaatgatgatctgacatttgatggcactaaacgaatggaacaaacagcattgggagttccttatgaacaaacagcatctgttcagatcaatagccaaaatggacatattaccggttttctggatatggtccctcaatcatctgttggtcccttgtttcagcagtcggacattcactgtcctgatggtactggaggtgtgaacagaaaaatgaatttacaaggcagcctacctggaaccactagaaatgtgttggttaatgactttagccatagtgtatctactgctcatccgacaaatttggtgtcagctaagggtgacggttcacttgccaagaatcctgagattggtgacaagatagcagataagccggctgcccctctcaacgtacagatttctcatgacgatgagagcataaagaataattcagttgcaaaaacagatgaaattccagcatctccagcagaaaatcagagtatattagtttctttatcctctcgttgcgtttggaaagagagtctgtgtgagcggccacaccttcttcgcataaaatattatggtaactttgacagacctttaggcaggtttttgcgtgaccagctatttgatcagagcaagctttgccaatcttgtgagctaccaccagaggcccatgtttattgctatgtacatccccaaggcagtttaacaatatcagtaaggaaactttcaataaagttgcctggcaatggtgaaaatgatggtagaatttggatgtggcatagatgcttacgctgccctcgagtcaatgggctccctccagcaactaaaagagtagtgatgtctgatgctgcttggggtttgtcttttggaaaatttttggaacttagtttttcaaaccatgcggcagcaagtagggttgccagctgtggtcattcacttcacagggattgccttcgcttttacggcttcggtgaaatggttgcttgcttccgatatgcatcaattagagtccactctgtgtatttaccaccaccaaaacttgattttacttctgagcatcaggaatgggtagaagaagaagcaaaagaggtggatgactcagctgaacttctgttctctgaagttctgaacgcactccacaaaatttcaggaggaaggccaattacaggttcttttgatggcaacttgaagattcttgagttgagaagaaatattggagaactggaagagatcctggtggcagagaagactgactttatggagtcattaaagaatctactgaaaacggatatgagaaaggaacagccgttcattgatattcttgatgtcaacaaactaaggaggcacttattatttctgtgttacttgtgggatcaacggctgaaattcattgcaaattcaggtggcaagtactgtgatgcactagctggtttacggattgggagtgggaattctgattttaatggtaaaccagttggtgcagccccaaagctagagaagggctcaaaggctacagttctttcaattgctaaggaagggtcgttacaacagagctcttgtccatctcatggtgaagatgaggggttcaaccaagccaatgaatataatgaaaatatctcaaggaatgctgcagaattgagcggcactgaagattccattgcaaaaatcaatcatgctaccagtgcagatgttaaggatcgactggataaccaagaatccagaactggtgtacgcagggttgtttctgatggacaatttccagttgctactgacattccagacacattggatgcaaaatggagaggtcagaatgaacctgctcctgattcaaacttggcaaaaccaccactttcagtcgaagacacaacagttgatgttaaaagtcaagccaaggctgtgcatacttttactttcactgttcgttctggagatgcagcagaggaattacttagatggattaagatgccatacatgacatcaaacagttccttaaacacaacttctagttcaccactgagattcacttccttggcagagtacattcctaaatacgtcgagttgttttgtgatctatcacagaaaggtggagcaagacttttcttacctactggagctaatgacattgttattcctgtatttgatgatgagccaacaagtgttatttcgtacgcacttgtttcacccatgtactgcttccagttgtctgatgacagcagcaaaaatagagacaaggagtcttcacttccattgcctgtatatgattcaggaaattttaatccatttcatttgtttgaggaatttggatcccactacgatgttacttcatcagtgtctggagttagaggatcctttgctcctgatcaggtgcacttgagtgtttcttttgaagatggtgggccacttgggaaagtcaaatataatgtcacatgctactatgcaaaaaagtttgaagcactaagaagagtccataagcactggaagccctacatgcttagcaaaaattttggggatctatcaggctctatgatctaaagggatcttcaaggtcaaggtataatgcagattcaaatggtagcaacaaggttcttcttgaccagaacttaattgaagcaatgccaacttcaccgatttttgttgggaacaaggcaaagcggctactggaaagagctgtttggaacgatacatctttcctagctggaatcgatgtgatggactattccttgcttgtgggagtcgacgaggagaaacatgaactggtcttaggaattattgattttatgaggcagtatacatgggacaagcaccttgaaacatgggtaaaatcttctggcattctaggtgggccgaagaacgcttctccaactgtcatttcacctatgcaatataagaagcggttcaggaaagccatgtctgcttattttattgtcattcctgagcaatggatgcctgcaataatcaatccaagcaaatcatcatcaaatatttgccaagaagattctcaaaatgggtctcaagagtgatatgatgttcgataagtccggttttttgtcctgtcctgtcgtgaaaagttctgaactgctagtctggcgcaatgccttggctgctactgttgcgtcaaagtgatattctggctgaccgcattctcttgtgctaattggcacaggtccgattgcatcattgagtccctcaagcatcggatgtgtatattcccaaagatgtaattatgccctagtcgtagttttccccccttcaataaatcagttccatagtatcatcacttgtgtcgtcgtcgcttaatttttgttgtatgtatagaactagcaggacgcttgtttttgtggtcgttttgtatattattaaatcttccatttt

SEQ ID NO: 39627 - DNA, 5129 bp, Zea Mays
atgttaagagctttacattgtccttatcaggagtgacgacgaagatgatgattacacagttttccgttcagatttggaagagcagcacatgcaaaattctgataaatattatggacctatgtattttgatggacatcatgttagctgtagtgatgacgcaaaagaatctacatccccaaggaaaaaattgacaaccctagttgattctttgggagcagataagaatgaagatcataacgttgatgagtgctgtaatgctcggtcttcttccatgtatagcatggaagtgctagataatgagcccgtagactttgaaaacaatagcttactttgggtagctccagaacccgaggacggagaggatgatcacgatggtgaacatgatgatgatgagggggtggatgctacaggagagtggggatatctacgcacaaacagctttggcagtgggcactgtcgaagtagagataagtcagctgaggaacacaagaaagccatgaaagacatagttgatggccactttcgggcgttagtttctcaacttcttcaggctgaaaaggtaccattagttgatgggagtggcaaagaaagttggctagatatagttacttctctgtcttgggaagctgcatctcttttgaagccagataccaccagcaaaggcggtcagatggaccctggtggctatgttaaggtgaaatgcttagcttgtggtcacccaagtgaaagtttcgttgtaaaaggagttgtttgtaagaagaatgttgctcaccggcgtatgtcatcaaaaaaggaaaagcctccaatcttgattcttggtggtgcactcgaatatcagcgtgtatcaaatttgctttcaagttttgatactttactgcagcaggaaacagattatttgaaaatggctgttgcgaagatcaaagcacaccaaccaagtgttgtattggtagagaaatctgtgtctcgttatgctcaggatttatttctagagaaaaatatctcccttgttctgaatatcaaaaggccactgctggaaaggatatcacgttgcactggtgctcatatagttccctcaattgattgtttgtcatccgagaagcttggacgctgtgatttattccatgtagagaagtatgttgaagagcatggaaccgctggggaaggtgggaagaaaatgctgaagaacctcatgttttttgaaggctgtcccaaaccgttcggttgtacaatcttgcttaaaggtgctaatggtgatgagctaaaaaaggtgaagcatgttttgcaatatggagtatttgcagcctaccatttggcacttgaaacatcattccttgtggatgaaggtgcaactcttccagaactccctttgaagtcgccaattattgtagcttttccagacaaaccttccagtgctgatagatctatctcgacaatacctatcataccaatccctagtgcttcaccgccaaacagttgcctgcaagcatttggcttgcaaaatgatgatctgacatttgatggcactaaacgaatggaacaaacagcattgggagttccttatgaacaaacagcatctgttcagatcaatagccaaaatggacatattaccggttttctggatatggtccctcaatcatctgttggtcccttgtttcagcagtcggacattcactgtcctgatggtactggaggtgtgaacagaaaaatgaatttacaaggcagcctacctggaaccactagaaatgtgttggttaatgactttagccatagtgtatctactgctcatccgacaaatttggtgtcagctaagggtgacggttcacttgccaagaatcctgagattggtgacaagatagcagataagccggctgcccctctcaacgtacagatttctcatgacgatgagagcataaagaataattcagttgcaaaaacagatgaaattccagcatctccagcagaaaatcagagtatattagtttctttatcctctcgttgcgtttggaaagagagtctgtgtgagcggccacaccttcttcgcataaaatattatggtaactttgacagacctttaggcaggtttttgcgtgaccagctatttgatcagagcaagctttgccaatcttgtgagctaccaccagaggcccatgtttattgctatgtacatccccaaggcagtttaacaatatcagtaaggaaactttcaataaagttgcctggcaatggtgaaaatgatggtagaatttggatgtggcatagatgcttacgctgccctcgagtcaatgggctccctccagcaactaaaagagtagtgatgtctgatgctgcttggggtttgtcttttggaaaatttttggaacttagtttttcaaaccatgcggcagcaagtagggttgccagctgtggtcattcacttcacagggattgccttcgcttttacggcttcggtgaaatggttgcttgcttccgatatgcatcaattagagtccactctgtgtatttaccaccaccaaaacttgattttacttctgagcatcaggaatgggtagaagaagaagcaaaagaggtggatgactcagctgaacttctgttctctgaagttctgaacgcactccacaaaatttcaggaggaaggccaattacaggttcttttgatggcaacttgaagattcttgagttgagaagaaatattggagaactggaagagatcctggtggcagagaagactgactttatggagtcattaaagaatctactgaaaacggatatgagaaaggaacagccgttcattgatattcttgatgtcaacaaactaaggaggcacttattatttctgtgttacttgtgggatcaacggctgaaattcattgcaaattcaggtggcaagtactgtgatgcactagctggtttacggattgggagtgggaattctgattttaatggtaaaccagttggtgcagccccaaagctagagaagggctcaaaggctacagttctttcaattgctaaggaagggtcgttacaacagagctcttgtccatctcatggtgaagatgaggggttcaaccaagccaatgaatataatgaaaatatctcaaggaatgctgcagaattgagcggcactgaagattccattgcaaaaatcaatcatgctaccagtgcagatgttaaggatcgactggataaccaagaatccagaactggtgtacgcagggttgtttctgatggacaatttccagttgctactgacattccagacacattggatgcaaaatggagaggtcagaatgaacctgctcctgattcaaacttggcaaaaccaccactttcagtcgaagacacaacagttgatgttaaaagtcaagccaaggctgtgcatacttttactttcactgttcgttctggagatgcagcagaggaattacttagatggattaagatgccatacatgacatcaaacagttccttaaacacaacttctagttcaccactgagattcacttccttggcagagtacattcctaaatacgtcgagttgttttgtgatctatcacagaaaggtggagcaagacttttcttacctactggagctaatgacattgttattcctgtatttgatgatgagccaacaagtgttatttcgtacgcacttgtttcacccatgtactgcttccagttgtctgatgacagcagcaaaaatagagacaaggagtcttcacttccattgcctgtatatgattcaggaaattttaatccatttcatttgtttgaggaatttggatcccactacgatgttacttcatcagtgtctggagttagaggatcctttgctcctgatcaggtgcacttgagtgtttcttttgaagatggtgggccacttgggaaagtcaaatataatgtcacatgctactatgcaaaaaagtttgaagcactaagaaggtcttgctgtccatctgagcttgatttttttagatccattagtcgatgtaaaaaatggggagcacagggtggtaaaagcaatgtgttttttgcaaaatctttggatgatagatttataataaaacaagttacaaagacagagcttgaatcattccttaagtttggcactgaatattttaaatatctgtcagagtccataagcactggaagccctacatgcttagcaaaaattttggggatctatcaggttactagtaagcatgtaaagggtggcaaggagtcaaagatggatttgcttgtgatggaaaatcttttgtttggacggaatattaccaggctctatgatctaaagggatcttcaaggtcaaggtataatgcagattcaaatggtagcaacaaggttcttcttgaccagaacttaattgaagcaatgccaacttcaccgatttttgttgggaacaaggcaaagcggctactggaaagagctgtttggaacgatacatctttcctagctggaatcgatgtgatggactattccttgcttgtgggagtcgacgaggagaaacatgaactggtcttaggaattattgattttatgaggcagtatacatgggacaagcaccttgaaacatgggtaaaatcttctggcattctaggtgggccgaagaacgcttctccaactgtcatttcacctatgcaatataagaagcggttcaggaaagccatgtctgcttattttattgtcattcctgagcaatggatgcctgcaataatcaatccaagcaaatcatcatcaaatatttgccaagaagattctcaaaatgggtctcaagagtgatatgatgttcgataagtccggttttttgtcctgtcctgtcgtgaaaagttctgaactgctagtctggcgcaatgccttggctgctactgttgcgtcaaagtgatattctggctgaccgcattctcttgtgctaattggcacaggtccgattgcatcattgagtccctcaagcatcggatgtgtatattcccaaagatgtaattatgccctagtcgtagttttccccccttcaataaatcagttccatagtatcatcacttgtgtcgtcgtcgcttaatttttgttgtatgtatagaactagcaggacgcttgtttttgtggtcgttttgtatattattaaatcttccatttt

SEQ ID NO: 39628 - DNA, 797 bp, Zea Mays
cttctcatcaaagcttataggaaatgcagtggcttccagagctatcttcaacttcttcttttgttcaacaatcttcagcctgattttttggatcagaatctagcttcttattagcaccaaaggaatcgatgtgatggactattccttgcttgtgggagtcgacgaggagaaacatgaactggtcttaggaattattgattttatgaggcagtatacatgggacaagcaccttgaaacatgggtaaaatcttctggcattctaggtgggccgaagaacgcttctccaactgtcatttcacctatgcaatataagaagcggttcaggaaagccatgtctgcttattttattgtcattcctgagcaatggatgcctgcaataatcaatccaagcaaatcatcatcaaatatttgccaagaagattctcaaaatgggtctcaagagtgatatgatgttcgataagtccggttttttgtcctgtcctgtcgtgaaaagttctgaactgctagtctggcgcaatgccttggctgctactgttgcgtcaaagtgatattctggctgaccgcattctcttgtgctaattggcacaggtccgattgcatcattgagtccctcaagcatcggatgtgtatattcccaaagatgtaattatgccctagtcgtagttttccccccttcaataaatcagttccatagtatcatcacttgtgtcgtcgtcgcttaatttttgttgtatgtatagaactagcaggacgcttgtttttgtggtcgttttgtatattattaaatcttccatttt

SEQ ID NO: 39629 - DNA, 1171 bp, Zea Mays
aactgaactgaaccccagagaagccaaactgaagttgcaggcatagattcttcgtcattttcctcgcaaaaggaagccggtgagccggagagattcccgtcgtttcgacgcaccggatcgcgggacctctcgcctcccctcccttcccttccctgcgccgcccacggcagaatggcgggagccgacggggcgcagcaacaccatccttgcagcatctgcatggagcccatggcgccctccgcggcccaccgcggcggcgccgcctgcacgcacgcattctgcggcgcgtgcctgtccggtcacgtccgcgccaagctagagtgcggcggcggcggcgccgtggtgcggtgccccgacgcgtcctgcgctgccacgctcgacccggagctctgccgcggcgcgctcccctccgaagtcttcgagcgctggtgcgccaagctctgcgagtccctgttcctcggagcgcgccgcacctactgcccgttcccggactgctctgagatgatggtggccgacgacgacggcgaggagtgcgtgacccagtccgagtgccacgggtgccggcggctgttctgcgcgcggtgcgcggtgccgtggcacgccggcttgacctgcgaggagattgcgcggctcggtgagggggagcgcgagcgggaggacctgctgctcgtgaaggccgcccgggagggcagctggaagcgctgcccgcgctgcaggttctacgttgagaagtccagtggctgcctgcacataacctgcaggtgcggatatgagttttgctatggatgcggtcagcaatggcagctgatacatgacggctgtcctggagcatgaaacagggcttcgagctctcctgtggcttcgttaagcaatgggagctgatacgtgaatcacgtgatgagggtttcaaggatggagtaggtattgatgttgctatcagtatggtttctgtagtcccatggaacaatggtccatggatagtctgacaaccttctctacagaactttggaacattcttctctcatgtatgttgtctgtcttcagttaacatgccagacataatatctttctttaatttagctgagtttgacagtgcttggagttttgcgatgcattatatacaggctgaacagaacagaacgacatttgcatcagtatggccagaaaacgc

SEQ ID NO: 39630 - DNA, 1071 bp, Zea Mays
aactgaactgaaccccagagaagccaaactgaagttgcaggcatagattcttcgtcattttcctcgcaaaaggaagccggtgagccggagagattcccgtcgtttcgacgcaccggatcgcgggacctctcgcctcccctcccttcccttccctgcgccgcccacggcagaatggcgggagccgacggggcgcagcaacaccatccttgcagcatctgcatggagcccatggcgccctccgcggcccaccgcggcggcgccgcctgcacgcacgcattctgcggcgcgtgcctgtccggtcacgtccgcgccaagctagagtgcggcggcggcggcgccgtggtgcggtgccccgacgcgtcctgcgctgccacgctcgacccggagctctgccgcggcgcgctcccctccgaagtcttcgagcgctggtgcgccaagctctgcgagtccctgttcctcggagcgcgccgcacctactgcccgttcccggactgctctgagatgatggtggccgacgacgacggcgaggagtgcgtgacccagtccgagtgccacgggtgccggcggctgttctgcgcgcggtgcgcggtgccgtggcacgccggcttgacctgcgaggagattgcgcggctcggtgagggggagcgcgagcgggaggacctgctgctcgtgaaggccgcccgggagggcagctggaagcgctgcccgcgctgcaggttctacgttgagaagtccagtggctgcctgcacataacctgcaggtgcggatatgagttttgctatggatgcggtcagcaatggcagctgatacatgacggctgtcctggagcatgaaacagggcttcgagctctcctgtggcttcgttaagcaatgggagctgatacgtgaatcacgtgatgagggtttcaaggatggagtaggtattgatgttgctatcagtatggtttctgtagtcccatggaacaatggtccatggatagtctgacaaccttctctacagaactttggaacattcttctctcatctgaacagaacagaacgacatttgcatcagtatggccagaaaacgc

SEQ ID NO: 39631 - DNA, 2328 bp, Zea Mays
ccggagcagagcagcagtacatagtggagccaggtcgcctcgcctcctccacttctatatcagttccgccctctgtcccagcagccctgtgcgccatcgcgcggcccacacgagcggcttgccggattcgcgccgacgcggcagacccagacaggtcagcttcggatcgaggaagaggaggcggtggaggcgaggagtcaactaaacttgccagccatggacggatcggccgcggagctggaggcggcggagcgggtggtgatgcggtgggactcgtccttggcgtgcggtggcacggacgagccgatgctgttcgacggcggcggaaaccgtgccgaggccgaccggttcctccgcgccgtcgacgacctgcgccggctcgcgccgccatcgcccgcggtcgtgggcagcccgcgccgcctctcgtcgtcttcggcggcgaggagcggcgccgtgctggtcgctatgacacggctcgaggacgagttccgccacgtgctgtcgtcgcgcgccctcgaccacgagatcgaggcgctcgcggaccttagctcgctctccatcaacggcgaccggtccaactcggcctcctccgccgacctctccgccgccgacgaggacgactccgtgtcctcctccattggccgccgcagcaccgcctaccgctcgctccggagcatccgcgagatcgacctgctgcccgacgacgccgttgcggacctccgcgccatcgcgtcccgcatggccgccgccgagcacggccgcgagtgcgcgcaggtgtacgcgtccgtccgcaagccctctgtcgacgcctccctgcgccggctcggcgtcgagcgcctcagcatcggtgacgtccagcgcctcgagtgggacgcgctcgaggccaagatccgccggtggatccgcgccgcccgcgccgccgtccgcggcgtcttcgccagcgagcgccgcctctgcttccacatcttccacgaccttcccatctccgccgcctcagcgcccgccacgcacgacacccccttcgccgaggccgtcaagggcgccgcgctgcagctcttcggcttcgccgaggccatcagcatcgatcgccgctcccccgagaagctcttcaagatcatagacctccacgacgcgctctcggacctcctacccgacgtctccgacatcttcgccgcctccaaggtcgcggagtccatatacgtgcaggccgttgagatccggtcgcgcctcgccgatgccgtgagagggatattctcggagttcgagaacgccgtgctccacgacccgcccaagaccgcagtgcctggcggtaccgtccacccgctcactcggtatgtgatgaactatagcagcctcatttgcgactacaaggccacgctatccgagctgatcgtatcgcgtccatcagctagcgctcgtcttgctgctgagggcaatgagctcgtgccgtccttagctgacctcgagctccccgagcttgagaaccagttaccacttgcctctcacattgtctggatcattgttattcttgaacacaacctggagggcaaggcaacactctacaaggatccagctctctcgcatctgttcatgatgaacaatgtgcactacatcgttcacaaggtgaaagattcgccagatctctggggcatgatagctgatgattacctgaaacggcttactggcaagttcacaatggcggccacaaactaccagcaggcctcatggttgaagatcctgaattgtttgcgtgatgaggggctccatgtaagtggtggcttttcgtcagggatatccaagtcggcactgcgggagcggttcaagtccttcaacgctgcatttgaggacgcgcatagggtgcagtcagggtggtgcgtgccagacaaccagctgagggaggagctcaggatctcgattgctgagaagctgctgccagcataccagtcattccttggcaggtttcggcatcatatagagaatgggaagcatccagagctgtacattaagtactctgttgaggaccttgagatagctgtgggtgatttctttgagggcgttcctccttccccgcatcacaggaggagatcacatgggtgaaggtcctgtacatcaggcacttactcatgaaccctagccacatgcattacaacgaggcttataccttcgggattaaacgacgatgtcattagagcgaccccttggaactctgcccctcgacgggatgtcttccggaacgagttctagtgttcttcgcggagaagaagaccctctgtgctatcgcgaaccgtccggtcccaggtgcggaccgtccggaagtgtgcaaaggag

SEQ ID NO: 39632 - DNA, 1349 bp, Zea Mays
gtgatatgttagcatgatagataatccagatcaggtccccctctatctctctctgaatatgttagcaatcttgatttcttattcttattgacggagcatcacttcttcggcgcccaagacctacatacgactattaaagaaatccagaggaatgacacagtcgaggtcgccacccacccccatccttggtcgcatcttcctcgttttagaatcgcccatttggacctttgtcacctcggacaacagaatccctgctactctcccccccataagttttgtagattgttttgtcctactgcctactatctgacttgaggaagtaccaaggggtttcggttccgtctttagtggcacaaacaagattggtgatggtggtttcggttctgtcttcagtgacgcaaacaagattggccacttctatcatacgtggtaatttgcaatatgcttatctaagtgcactaagaaggctttcacttgatcctggtaatcaaacattcctccaacgagatgtgcaaggatatctgcgttaaggaattgacatgggaatttttagccaggggatcatatcaaggagagctttaggtggccttttttgctgaaaagctttgcaactgtttgcaatgggtttaggagatattctccgcaatgatatgtccagtttgtcgtggcatctataattgcagtatatgcagaactaagaaaggatggttccctactggttctgcatgtaggaaggcggtcggacttgggtacaaatctgtagcacactttctaattgccaagcataataacaaacaagtgccactgatatagtgaacaacgcggaggagctccaataatctgatgtgggaacaggacctgccatgtttgaggataagaagataggtgatgagttcttttcctttattgttgactgtaaagatctgaaggcatgtactattttgttgatgggagcaagttgaaaattggtgcccactaaaagtctagtgatctagctggatgaaattgtcgacaaggccattagcatcatgcaagttacctcgaagcatctcatgtatatatgcaagaagctgcactcacggaaggcattgagtgcaatagaggtgaaggaactgcatgaagccctttaagcaattgctaaaggtttggacctagattcactcttgtgccagagtttggtgtagtcctcgattataaactgtgtaccatgttaatatagtgacatagtttgtatgatgcaattcatagtgatgttgtttgaagctgtttgtatggattatgatgtctgatgcagtttgtatgaactatgtcatattatgttgaatgaagctattgaatgcccttattct

SEQ ID NO: 39633 - DNA, 545 bp, Zea Mays
ctcaaatacttccgaaaagagcgcacaaaactactatgatgaacattccgaacaggtaacagatagtctcaaaatgctgaacaacgacctacaaatccttgcatacatagttcatatgctcaaagaatatatagcgtgccactgcagacagacaggagatggtgacaaagcaaaataatggcagaaaacattacacctacttacacgctcacaaagcagctacagcaaaaagaatggccgtcaccagcctcagcgcaccagcactggtcaaaacggcgccatttgtggggcccgagcagtcgtcattgttgccactgaagcatcccgggtggatggctgccttcggcacttcgccatccaccttgaagctggtagtcggcttgccgtcactgaacaggacgcaccagaagtacggtccaccgccatcggtgccgctcacagccgccccgacctccgtgtggttcttgctgcgcagtatctggaggcccttcgcgtcgttcaccaacaagacgccaaaggcctcagctggagccaagtaccgcacc

SEQ ID NO: 39634 - DNA, 2328 bp, Zea Mays
tgattgtgaaaaggagtgttataatatggaaaaaggaataattggatctataacattaaaaagttacaattttagatatatatatcattggctccacatgttattgatttattggaccataagtgagataacaattgtacatatctaaagttatataatattttaattgtaaagatccaaattttcaaaaaaaaaaaaaaactcaccccgtccccttacccttgtccgtttcctcgcgaatctacttgctctcgcacgagacacgcacgcccgcgcgcgtgaaggtacgcggaagcaggggcgaggattctccgaagcggagggcgaggcggcggcagcgaccttgagggagatggcggcgggcggtagggtttcaatcccggcaggggcgcggcgcacgatcgcggacatcaaggagatcgccggcggccacaccgacgaggaggtctacgctatgctccgcgagtgcaacatggatcccaacgagaccgttcagaggctcctcctcgaagatacctttcatgaggtgaaaaggaagcgtgacaagaaaaaggaggttagtaaagagccatcagattctcggtggagacctgccgtgcaggggcaaggtggaaagaattgtcggaattgtgcttcacgcagtttgtccagctctaatgattctgctggacgaagtgctatttctggaaaggagaatggaataagtttgatcatgggaaaaggtagtggttctactccgataaccaatatgaatatggatgtcaaagcttccactttcatgccaagtttgttgagtggtctttgcaacggtccatatcaatcagttgatcctgctgctgtgctggtgtctagttctagtgctgttggtgataagtctggttcaacagccttggctgatcttacagacaaactattggaatcaagaagacatcagtagaacataaggtggggcgtgatgtatcaacagacaaaggctcctccgaacaatctgtgcaatcttcatttcgacgatcctctgctagtagaccatcttccagctacaacagtcattcagaacaatcccaaaaagcaaccgaggatgctaccgtacatgataatgtacctttggctgctgctgacactatcacccaatcagctccagtaccgaattcagctggtacagaggattcgttgaaggtggacatatgtttaaatgatctacagttatcagataagcagcatgtgataattccagatcatcttcaagtttctgagtctgaaaagtatgttctaagctttggaagcttcgacgtcagttttcagcaaactaagggctcttcagatcctgattatgtgaagagctctttaccgaaattcagttcgtctcatgagttggatggcaacattgatgaacttcagtccatgcaaagagatcagaattcaacatctgttgtccaagaggaagctggtcatgttcctcaaccttctgcaaagctagaaaaatgtgcaccctcagcaatggagatttcatctattgcccttatggaatcaaaagactgtgatgacgattcagccacttcaggggatccccaatctacaggaactcatagtgcaccatcttatgtgacatatggatttgcaccacaatcacatgttaatcagattgagaagtccgaatctcattctcagtcgtaccatcccacaactgatgctgatgaacggctgtccccttctcttgctactcaagctgctcacaagtatgggaatatcccagttgttcccacacaaactggccaggatcaagaggggaacgactcacctgtgattatttcatctgtttctgcttccgttgctacccctgctgctggagttctgtcggcttcagttgctatccctcaacagtctgttcctgtatttcgccagcctttaggtgttcatataccacatctcccgatgaattatgtcccttacaatcagtacatttcaccattttttattccaccccctacccttcacccttttatgggtaatgctacattttctcagccaccttcaacaggggtcatgtacccaactcctggaaccgcaagagttcttccacctgtcaaattcccagttccttcattcaagcctggtgctaacattgggagccaggcatctattggagttcctggttgctatggaacatatggttctagtccatcggtttacactaataacgcacccgtgtcatctggaaatctagcagaaaatgacaatgttacttcatctcagttcaaggaaaataacatctattttgctgggctccagatgagaagctttcctccaccaacctgcgaaacaactatc

SEQ ID NO: 39635 - DNA, 3711 bp, Zea Mays
tgattgtgaaaaggagtgttataatatggaaaaaggaataattggatctataacattaaaaagttacaattttagatatatatatcattggctccacatgttattgatttattggaccataagtgagataacaattgtacatatctaaagttatataatattttaattgtaaagatccaaattttcaaaaaaaaaaaaaaactcaccccgtccccttacccttgtccgtttcctcgcgaatctacttgctctcgcacgagacacgcacgcccgcgcgcgtgaaggtacgcggaagcaggggcgaggattctccgaagcggagggcgaggcggcggcagcgaccttgagggagatggcggcgggcggtagggtttcaatcccggcaggggcgcggcgcacgatcgcggacatcaaggagatcgccggcggccacaccgacgaggaggtctacgctatgctccgcgagtgcaacatggatcccaacgagaccgttcagaggctcctcctcgaagatacctttcatgaggtgaaaaggaagcgtgacaagaaaaaggaggttagtaaagagccatcagattctcggtggagacctgccgtgcaggggcaaggtggaaagaattgtcggaattgtgcttcacgcagtttgtccagctctaatgattctgctggacgaagtgctatttctggaaaggagaatggaataagtttgatcatgggaaaaggtagtggttctactccgataaccaatatgaatatggatgtcaaagcttccactttcatgccaagtaacagtttgttgagtggtctttgcaacggtccatatcaatcagttgatcctgctgctgtgctggtgtctagttctagtgctgttggtgataagtctggttcaacagccttggctgatcttacaggtggtcttccattcaaagatgtagtcgctactatagatccaaattcactgcaaccattgaaaccagcaccaccatcagatcctgtggttgtatcttttctcaactctcacagccttggtgacgttggtgcttccagacaaactattggaatcaagaagacatcagtagaacataaggtggggcgtgatgtatcaacagacaaagttattccaagtaaagaatggaaacctaaactgacttgcttggctgcttctcaagcaaccgaggatgctaccgtacatgataatgtacctttggctgctgctgacactatcacccaatcagctccagtaccgaattcagctggtacagaggattcgttgaaggtggacatatgtttaaatgatctacagttatcagataagcagcatgtgataattccagatcatcttcaagtttctgagtctgaaaagtatgttctaagctttggaagcttcgacgtcagttttcagcaaactaagggctcttcagatcctgattatgtgaagagctctttaccgaaattcagttcgtctcatgagttggatggcaacattgatgaacttcagtccatgcaaagagatcagaattcaacatctgttgtccaagaggaagctggtcatgttcctcaaccttctgcaaagctagaaaaatgtgcaccctcagcaatggagatttcatctattgcccttatggaatcaaaagactgtgatgacgattcagccacttcaggggatccccaatctacaggaactcatagtgcaccatcttatgtgacatatggatttgcaccacaatcacatgttaatcagattgagaagtccgaatctcattctcagtcgtaccatcccacaactgatgctgatgaacggctgtccccttctcttgctactcaagctgctcacaagtatgggaatatcccagttgttcccacacaaactggccaggatcaagaggggaacgactcacctgtgattatttcatctgtttctgcttccgttgctacccctgctgctggagttctgtcggcttcagttgctatccctcaacagtctgttcctgtatttcgccagcctttaggtgttcatataccacatctcccgatgaattatgtcccttacaatcagtacatttcaccattttttattccaccccctacccttcacccttttatgggtaatgctacattttctcagccaccttcaacaggggtcatgtacccaactcctggaaccgcaagagttcttccacctgtcaaattcccagttccttcattcaagcctggtgctaacattgggagccaggcatctattggagttcctggttgctatggaacatatggttctagtccatcggtttacactaataacgcacccgtgtcatctggaaatctagcagaaaatgacaatgttacttcatctcagttcaaggaaaataacatctattttgctgggctccagaccgacggcttgactctgtgggttcctacacctggacgtgatatttctgctctccaggtcaattccttctatggtctcccccctccgggacaccaggtaacatatgcgcctcaggctggacatggtccttatggagggatctaccacccagcacattctgtggcaggagctactgttactccactgctccagccatctcacacaatggctggagctgttgaaatagttggggcacctggtggtgtttaccagcatccccaagctcacatgaattggggaagttactgataggccatgattattgtttctttgactttgggtgtccatgacaacacatttggcagaggtgttcaagttttaacaaaggtgaacttgatcaggagtgtatatatgttctcagcatggctgatctgcagggcgggttattgcttccagaagcttccagattgttgtggttgtatttgtagcagataatggccatgaaattggttgagtttatctgctcaggttccttaatacaattttagcctcctgcgcccatcctgaaacttctgcaaggagcgtgatttcgctatcttgtctgattgagggtatggagtacttgaaactgaaattgagcaagtggattttcgttctttccgctgctttacatgtaaattaaattttggttcgatgtgtgacagctgttgtacttggtatcagttgtggacttgcagctaaccagagtcaaagtgctttgaaggacttactgagcacgtttctgttcctgtaggctgtagctcagagcctagtgcttcgttatattgcttattactcattattactatttattgttcctatgaactcgtattgtttggggttaaagggccagacatttgttagtgcccctttggtataagaaaaaatggcatgcaggctacgtgccgactcacgaggttggcgtgtgggagtgatgatcggccgaatggccttggatgactctggtttggtctcgggtgggcgaatgatgtgatatgttattatttgagtaattacatttattggacaatgcacgtgaatgatcatttgataaagatcgtttctatttgattcatcatgaagagtaatatataatattttaattcaatactctatttgttctaaattataagatgttttggagttttcaaatatgtatttagatagtgaatatctgataacatagcttatatataaaaaattgaaacatcctaatttggaagagggagtacatagcttgtaaaatgatggtcatatgactttttagatcacatcgaccattgtggtgcaccacttaatcatac

SEQ ID NO: 39636 - DNA, 3800 bp, Zea Mays
tgattgtgaaaaggagtgttataatatggaaaaaggaataattggatctataacattaaaaagttacaattttagatatatatatcattggctccacatgttattgatttattggaccataagtgagataacaattgtacatatctaaagttatataatattttaattgtaaagatccaaattttcaaaaaaaaaaaaaaactcaccccgtccccttacccttgtccgtttcctcgcgaatctacttgctctcgcacgagacacgcacgcccgcgcgcgtgaaggtacgcggaagcaggggcgaggattctccgaagcggagggcgaggcggcggcagcgaccttgagggagatggcggcgggcggtagggtttcaatcccggcaggggcgcggcgcacgatcgcggacatcaaggagatcgccggcggccacaccgacgaggaggtctacgctatgctccgcgagtgcaacatggatcccaacgagaccgttcagaggctcctcctcgaagatacctttcatgaggtgaaaaggaagcgtgacaagaaaaaggaggttagtaaagagccatcagattctcggtggagacctgccgtgcaggggcaaggtggaaagaattgtcggaattgtgcttcacgcagtttgtccagctctaatgattctgctggacgaagtgctatttctggaaaggagaatggaataagtttgatcatgggaaaaggtagtggttctactccgataaccaatatgaatatggatgtcaaagcttccactttcatgccaagtaacagtttgttgagtggtctttgcaacggtccatatcaatcagttgatcctgctgctgtgctggtgtctagttctagtgctgttggtgataagtctggttcaacagccttggctgatcttacaggtggtcttccattcaaagatgtagtcgctactatagatccaaattcactgcaaccattgaaaccagcaccaccatcagatcctgtggttgtatcttttctcaactctcacagccttggtgacgttggtgcttccagacaaactattggaatcaagaagacatcagtagaacataaggtggggcgtgatgtatcaacagacaaaggctcctccgaacaatctgtgcaatcttcatttcgacgatcctctgctagtagaccatcttccagctacaacagtcattcagaacaatcccaaaaagttattccaagtaaagaatggaaacctaaactgacttgcttggctgcttctcaagcaaccgaggatgctaccgtacatgataatgtacctttggctgctgctgacactatcacccaatcagctccagtaccgaattcagctggtacagaggattcgttgaaggtggacatatgtttaaatgatctacagttatcagataagcagcatgtgataattccagatcatcttcaagtttctgagtctgaaaagtatgttctaagctttggaagcttcgacgtcagttttcagcaaactaagggctcttcagatcctgattatgtgaagagctctttaccgaaattcagttcgtctcatgagttggatggcaacattgatgaacttcagtccatgcaaagaattcaacatctgttgtccaagaggaagctggtcatgttcctcaaccttctgcaaagctagaaaaatgtgcaccctcagcaatggagatttcatctattgcccttatggaatcaaaagactgtgatgacgattcagccacttcaggggatccccaatctacaggaactcatagtgcaccatcttatgtgacatatggatttgcaccacaatcacatgttaatcagattgagaagtccgaatctcattctcagtcgtaccatcccacaactgatgctgatgaacggctgtccccttctcttgctactcaagctgctcacaagtatgggaatatcccagttgttcccacacaaactggccaggatcaagaggggaacgactcacctgtgattatttcatctgtttctgcttccgttgctacccctgctgctggagttctgtcggcttcagttgctatccctcaacagtctgttcctgtatttcgccagcctttaggtgttcatataccacatctcccgatgaattatgtcccttacaatcagtacatttcaccattttttattccaccccctacccttcacccttttatgggtaatgctacattttctcagccaccttcaacaggggtcatgtacccaactcctggaaccgcaagagttcttccacctgtcaaattcccagttccttcattcaagcctggtgctaacattgggagccaggcatctattggagttcctggttgctatggaacatatggttctagtccatcggtttacactaataacgcacccgtgtcatctggaaatctagcagaaaatgacaatgttacttcatctcagttcaaggaaaataacatctattttgctgggctccagaccgacggcttgactctgtgggttcctacacctggacgtgatatttctgctctccaggtcaattccttctatggtctcccccctccgggacaccaggtaacatatgcgcctcaggctggacatggtccttatggagggatctaccacccagcacattctgtggcaggagctactgttactccactgctccagccatctcacacaatggctggagctgttgaaatagttggggcacctggtggtgtttaccagcatccccaagctcacatgaattggggaagttactgataggccatgattattgtttctttgactttgggtgtccatgacaacacatttggcagaggtgttcaagttttaacaaaggtgaacttgatcaggagtgtatatatgttctcagcatggctgatctgcagggcgggttattgcttccagaagcttccagattgttgtggttgtatttgtagcagataatggccatgaaattggttgagtttatctgctcaggttccttaatacaattttagcctcctgcgcccatcctgaaacttctgcaaggagcgtgatttcgctatcttgtctgattgagggtatggagtacttgaaactgaaattgagcaagtggattttcgttctttccgctgctttacatgtaaattaaattttggttcgatgtgtgacagctgttgtacttggtatcagttgtggacttgcagctaaccagagtcaaagtgctttgaaggacttactgagcacgtttctgttcctgtaggctgtagctcagagcctagtgcttcgttatattgcttattactcattattactatttattgttcctatgaactcgtattgtttggggttaaagggccagacatttgttagtgcccctttggtataagaaaaaatggcatgcaggctacgtgccgactcacgaggttggcgtgtgggagtgatgatcggccgaatggccttggatgactctggtttggtctcgggtgggcgaatgatgtgatatgttattatttgagtaattacatttattggacaatgcacgtgaatgatcatttgataaagatcgtttctatttgattcatcatgaagagtaatatataatattttaattcaatactctatttgttctaaattataagatgttttggagttttcaaatatgtatttagatagtgaatatctgataacatagcttatatataaaaaattgaaacatcctaatttggaagagggagtacatagcttgtaaaatgatggtcatatgactttttagatcacatcgaccattgtggtgcaccacttaatcatac

SEQ ID NO: 39637 - DNA, 3682 bp, Zea Mays
tgattgtgaaaaggagtgttataatatggaaaaaggaataattggatctataacattaaaaagttacaattttagatatatatatcattggctccacatgttattgatttattggaccataagtgagataacaattgtacatatctaaagttatataatattttaattgtaaagatccaaattttcaaaaaaaaaaaaaaactcaccccgtccccttacccttgtccgtttcctcgcgaatctacttgctctcgcacgagacacgcacgcccgcgcgcgtgaaggtacgcggaagcaggggcgaggattctccgaagcggagggcgaggcggcggcagcgaccttgagggagatggcggcgggcggtagggtttcaatcccggcaggggcgcggcgcacgatcgcggacatcaaggagatcgccggcggccacaccgacgaggaggtctacgctatgctccgcgagtgcaacatggatcccaacgagaccgttcagaggctcctcctcgaagatacctttcatgaggtgaaaaggaagcgtgacaagaaaaaggaggttagtaaagagccatcagattctcggtggagacctgccgtgcaggggcaaggtggaaagaattgtcggaattgtgcttcacgcagtttgtccagctctaatgattctgctggacgaagtgctatttctggaaaggagaatggaataagtttgatcatgggaaaaggtagtggttctactccgataaccaatatgaatatggatgtcaaagcttccactttcatgccaaggtggtcttccattcaaagatgtagtcgctactatagatccaaattcactgcaaccattgaaaccagcaccaccatcagatcctgtggttgtatcttttctcaactctcacagccttggtgacgttggtgcttccagacaaactattggaatcaagaagacatcagtagaacataaggtggggcgtgatgtatcaacagacaaaggctcctccgaacaatctgtgcaatcttcatttcgacgatcctctgctagtagaccatcttccagctacaacagtcattcagaacaatcccaaaaagttattccaagtaaagaatggaaacctaaactgacttgcttggctgcttctcaagcaaccgaggatgctaccgtacatgataatgtacctttggctgctgctgacactatcacccaatcagctccagtaccgaattcagctggtacagaggattcgttgaaggtggacatatgtttaaatgatctacagttatcagataagcagcatgtgataattccagatcatcttcaagtttctgagtctgaaaagtatgttctaagctttggaagcttcgacgtcagttttcagcaaactaagggctcttcagatcctgattatgtgaagagctctttaccgaaattcagttcgtctcatgagttggatggcaacattgatgaacttcagtccatgcaaagagatcagaattcaacatctgttgtccaagaggaagctggtcatgttcctcaaccttctgcaaagctagaaaaatgtgcaccctcagcaatggagatttcatctattgcccttatggaatcaaaagactgtgatgacgattcagccacttcaggggatccccaatctacaggaactcatagtgcaccatcttatgtgacatatggatttgcaccacaatcacatgttaatcagattgagaagtccgaatctcattctcagtcgtaccatcccacaactgatgctgatgaacggctgtccccttctcttgctactcaagctgctcacaagtatgggaatatcccagttgttcccacacaaactggccaggatcaagaggggaacgactcacctgtgattatttcatctgtttctgcttccgttgctacccctgctgctggagttctgtcggcttcagttgctatccctcaacagtctgttcctgtatttcgccagcctttaggtgttcatataccacatctcccgatgaattatgtcccttacaatcagtacatttcaccattttttattccaccccctacccttcacccttttatgggtaatgctacattttctcagccaccttcaacaggggtcatgtacccaactcctggaaccgcaagagttcttccacctgtcaaattcccagttccttcattcaagcctggtgctaacattgggagccaggcatctattggagttcctggttgctatggaacatatggttctagtccatcggtttacactaataacgcacccgtgtcatctggaaatctagcagaaaatgacaatgttacttcatctcagttcaaggaaaataacatctattttgctgggctccagaccgacggcttgactctgtgggttcctacacctggacgtgatatttctgctctccaggtcaattccttctatggtctcccccctccgggacaccaggtaacatatgcgcctcaggctggacatggtccttatggagggatctaccacccagcacattctgtggcaggagctactgttactccactgctccagccatctcacacaatggctggagctgttgaaatagttggggcacctggtggtgtttaccagcatccccaagctcacatgaattggggaagttactgataggccatgattattgtttctttgactttgggtgtccatgacaacacatttggcagaggtgttcaagttttaacaaaggtgaacttgatcaggagtgtatatatgttctcagcatggctgatctgcagggcgggttattgcttccagaagcttccagattgttgtggttgtatttgtagcagataatggccatgaaattggttgagtttatctgctcaggttccttaatacaattttagcctcctgcgcccatcctgaaacttctgcaaggagcgtgatttcgctatcttgtctgattgagggtatggagtacttgaaactgaaattgagcaagtggattttcgttctttccgctgctttacatgtaaattaaattttggttcgatgtgtgacagctgttgtacttggtatcagttgtggacttgcagctaaccagagtcaaagtgctttgaaggacttactgagcacgtttctgttcctgtaggctgtagctcagagcctagtgcttcgttatattgcttattactcattattactatttattgttcctatgaactcgtattgtttggggttaaagggccagacatttgttagtgcccctttggtataagaaaaaatggcatgcaggctacgtgccgactcacgaggttggcgtgtgggagtgatgatcggccgaatggccttggatgactctggtttggtctcgggtgggcgaatgatgtgatatgttattatttgagtaattacatttattggacaatgcacgtgaatgatcatttgataaagatcgtttctatttgattcatcatgaagagtaatatataatattttaattcaatactctatttgttctaaattataagatgttttggagttttcaaatatgtatttagatagtgaatatctgataacatagcttatatataaaaaattgaaacatcctaatttggaagagggagtacatagcttgtaaaatgatggtcatatgactttttagatcacatcgaccattgtggtgcaccacttaatcatac

SEQ ID NO: 39638 - DNA, 3687 bp, Zea Mays
tgattgtgaaaaggagtgttataatatggaaaaaggaataattggatctataacattaaaaagttacaattttagatatatatatcattggctccacatgttattgatttattggaccataagtgagataacaattgtacatatctaaagttatataatattttaattgtaaagatccaaattttcaaaaaaaaaaaaaaactcaccccgtccccttacccttgtccgtttcctcgcgaatctacttgctctcgcacgagacacgcacgcccgcgcgcgtgaaggtacgcggaagcaggggcgaggattctccgaagcggagggcgaggcggcggcagcgaccttgagggagatggcggcgggcggtagggtttcaatcccggcaggggcgcggcgcacgatcgcggacatcaaggagatcgccggcggccacaccgacgaggaggtctacgctatgctccgcgagtgcaacatggatcccaacgagaccgttcagaggctcctcctcgaagatacctttcatgaggtgaaaaggaagcgtgacaagaaaaaggaggttagtaaagagccatcagattctcggtggagacctgccgtgcaggggcaaggtggaaagaattgtcggaattgtgcttcacgcagtttgtccagctctaatgattctgctggacgaagtgctatttctggaaaggagaatggaataagtttgatcatgggaaaaggtagtggttctactccgataaccaatatgaatatggatgtcaaagcttccactttcatgccaagtaacagtttgttgagtggtctttgcaacggtccatatcaatcagttgatcctgctgctgtgctggtgtctagttctagtgctgttggtgataagtctggttcaacagccttggctgatcttacaggtggtcttccattcaaagatgtagtcgctactatagatccaaattcactgcaaccattgaaaccagcaccaccatcagatcctgtggttgtatcttttctcaactctcacagccttggtgacgttggtgcttccagacaaactattggaatcaagaagacatcagtagaacataaggtggggcgtgatgtatcaacagacaaaggctcctccgaacaatctgtgcaatcttcatttcgacgatcctctgctagtagaccatcttccagctacaacagtcattcagaacaatcccaaaaagctccagtaccgaattcagctggtacagaggattcgttgaaggtggacatatgtttaaatgatctacagttatcagataagcagcatgtgataattccagatcatcttcaagtttctgagtctgaaaagtatgttctaagctttggaagcttcgacgtcagttttcagcaaactaagggctcttcagatcctgattatgtgaagagctctttaccgaaattcagttcgtctcatgagttggatggcaacattgatgaacttcagtccatgcaaagagatcagaattcaacatctgttgtccaagaggaagctggtcatgttcctcaaccttctgcaaagctagaaaaatgtgcaccctcagcaatggagatttcatctattgcccttatggaatcaaaagactgtgatgacgattcagccacttcaggggatccccaatctacaggaactcatagtgcaccatcttatgtgacatatggatttgcaccacaatcacatgttaatcagattgagaagtccgaatctcattctcagtcgtaccatcccacaactgatgctgatgaacggctgtccccttctcttgctactcaagctgctcacaagtatgggaatatcccagttgttcccacacaaactggccaggatcaagaggggaacgactcacctgtgattatttcatctgtttctgcttccgttgctacccctgctgctggagttctgtcggcttcagttgctatccctcaacagtctgttcctgtatttcgccagcctttaggtgttcatataccacatctcccgatgaattatgtcccttacaatcagtacatttcaccattttttattccaccccctacccttcacccttttatgggtaatgctacattttctcagccaccttcaacaggggtcatgtacccaactcctggaaccgcaagagttcttccacctgtcaaattcccagttccttcattcaagcctggtgctaacattgggagccaggcatctattggagttcctggttgctatggaacatatggttctagtccatcggtttacactaataacgcacccgtgtcatctggaaatctagcagaaaatgacaatgttacttcatctcagttcaaggaaaataacatctattttgctgggctccagaccgacggcttgactctgtgggttcctacacctggacgtgatatttctgctctccaggtcaattccttctatggtctcccccctccgggacaccaggtaacatatgcgcctcaggctggacatggtccttatggagggatctaccacccagcacattctgtggcaggagctactgttactccactgctccagccatctcacacaatggctggagctgttgaaatagttggggcacctggtggtgtttaccagcatccccaagctcacatgaattggggaagttactgataggccatgattattgtttctttgactttgggtgtccatgacaacacatttggcagaggtgttcaagttttaacaaaggtgaacttgatcaggagtgtatatatgttctcagcatggctgatctgcagggcgggttattgcttccagaagcttccagattgttgtggttgtatttgtagcagataatggccatgaaattggttgagtttatctgctcaggttccttaatacaattttagcctcctgcgcccatcctgaaacttctgcaaggagcgtgatttcgctatcttgtctgattgagggtatggagtacttgaaactgaaattgagcaagtggattttcgttctttccgctgctttacatgtaaattaaattttggttcgatgtgtgacagctgttgtacttggtatcagttgtggacttgcagctaaccagagtcaaagtgctttgaaggacttactgagcacgtttctgttcctgtaggctgtagctcagagcctagtgcttcgttatattgcttattactcattattactatttattgttcctatgaactcgtattgtttggggttaaagggccagacatttgttagtgcccctttggtataagaaaaaatggcatgcaggctacgtgccgactcacgaggttggcgtgtgggagtgatgatcggccgaatggccttggatgactctggtttggtctcgggtgggcgaatgatgtgatatgttattatttgagtaattacatttattggacaatgcacgtgaatgatcatttgataaagatcgtttctatttgattcatcatgaagagtaatatataatattttaattcaatactctatttgttctaaattataagatgttttggagttttcaaatatgtatttagatagtgaatatctgataacatagcttatatataaaaaattgaaacatcctaatttggaagagggagtacatagcttgtaaaatgatggtcatatgactttttagatcacatcgaccattgtggtgcaccacttaatcatac

SEQ ID NO: 39639 - DNA, 3801 bp, Zea Mays
tgattgtgaaaaggagtgttataatatggaaaaaggaataattggatctataacattaaaaagttacaattttagatatatatatcattggctccacatgttattgatttattggaccataagtgagataacaattgtacatatctaaagttatataatattttaattgtaaagatccaaattttcaaaaaaaaaaaaaaactcaccccgtccccttacccttgtccgtttcctcgcgaatctacttgctctcgcacgagacacgcacgcccgcgcgcgtgaaggtacgcggaagcaggggcgaggattctccgaagcggagggcgaggcggcggcagcgaccttgagggagatggcggcgggcggtagggtttcaatcccggcaggggcgcggcgcacgatcgcggacatcaaggagatcgccggcggccacaccgacgaggaggtctacgctatgctccgcgagtgcaacatggatcccaacgagaccgttcagaggctcctcctcgaagatacctttcatgaggtgaaaaggaagcgtgacaagaaaaaggaggttagtaaagagccatcagattctcggtggagacctgccgtgcaggggcaaggtggaaagaattgtcggaattgtgcttcacgcagtttgtccagctctaatgattctgctggacgaagtgctatttctggaaaggagaatggaataagtttgatcatgggaaaaggtagtggttctactccgataaccaatatgaatatggatgtcaaagcttccactttcatgccaagtttgttgagtggtctttgcaacggtccatatcaatcagttgatcctgctgctgtgctggtgtctagttctagtgctgttggtgataagtctggttcaacagccttggctgatcttacaggtggtcttccattcaaagatgtagtcgctactatagatccaaattcactgcaaccattgaaaccagcaccaccatcagatcctgtggttgtatcttttctcaactctcacagccttggtgacgttggtgcttccagacaaactattggaatcaagaagacatcagtagaacataaggtggggcgtgatgtatcaacagacaaaggctcctccgaacaatctgtgcaatcttcatttcgacgatcctctgctagtagaccatcttccagctacaacagtcattcagaacaatcccaaaaagttattccaagtaaagaatggaaacctaaactgacttgcttggctgcttctcaagcaaccgaggatgctaccgtacatgataatgtacctttggctgctgctgacactatcacccaatcagctccagtaccgaattcagctggtacagaggattcgttgaaggtggacatatgtttaaatgatctacagttatcagataagcagcatgtgataattccagatcatcttcaagtttctgagtctgaaaagtatgttctaagctttggaagcttcgacgtcagttttcagcaaactaagggctcttcagatcctgattatgtgaagagctctttaccgaaattcagttcgtctcatgagttggatggcaacattgatgaacttcagtccatgcaaagagatcagaattcaacatctgttgtccaagaggaagctggtcatgttcctcaaccttctgcaaagctagaaaaatgtgcaccctcagcaatggagatttcatctattgcccttatggaatcaaaagactgtgatgacgattcagccacttcaggggatccccaatctacaggaactcatagtgcaccatcttatgtgacatatggatttgcaccacaatcacatgttaatcagattgagaagtccgaatctcattctcagtcgtaccatcccacaactgatgctgatgaacggctgtccccttctcttgctactcaagctgctcacaagtatgggaatatcccagttgttcccacacaaactggccaggatcaagaggggaacgactcacctgtgattatttcatctgtttctgcttccgttgctacccctgctgctggagttctgtcggcttcagttgctatccctcaacagtctgttcctgtatttcgccagcctttaggtgttcatataccacatctcccgatgaattatgtcccttacaatcagtacatttcaccattttttattccaccccctacccttcacccttttatgggtaatgctacattttctcagccaccttcaacaggggtcatgtacccaactcctggaaccgcaagagttcttccacctgtcaaattcccagttccttcattcaagcctggtgctaacattgggagccaggcatctattggagttcctggttgctatggaacatatggttctagtccatcggtttacactaataacgcacccgtgtcatctggaaatctagcagaaaatgacaatgttacttcatctcagttcaaggaaaataacatctattttgctgggctccagaccgacggcttgactctgtgggttcctacacctggacgtgatatttctgctctccaggtcaattccttctatggtctcccccctccgggacaccaggtaacatatgcgcctcaggctggacatggtccttatggagggatctaccacccagcacattctgtggcaggagctactgttactccactgctccagccatctcacacaatggctggagctgttgaaatagttggggcacctggtggtgtttaccagcatccccaagctcacatgaattggggaagttactgataggccatgattattgtttctttgactttgggtgtccatgacaacacatttggcagaggtgttcaagttttaacaaaggtgaacttgatcaggagtgtatatatgttctcagcatggctgatctgcagggcgggttattgcttccagaagcttccagattgttgtggttgtatttgtagcagataatggccatgaaattggttgagtttatctgctcaggttccttaatacaattttagcctcctgcgcccatcctgaaacttctgcaaggagcgtgatttcgctatcttgtctgattgagggtatggagtacttgaaactgaaattgagcaagtggattttcgttctttccgctgctttacatgtaaattaaattttggttcgatgtgtgacagctgttgtacttggtatcagttgtggacttgcagctaaccagagtcaaagtgctttgaaggacttactgagcacgtttctgttcctgtaggctgtagctcagagcctagtgcttcgttatattgcttattactcattattactatttattgttcctatgaactcgtattgtttggggttaaagggccagacatttgttagtgcccctttggtataagaaaaaatggcatgcaggctacgtgccgactcacgaggttggcgtgtgggagtgatgatcggccgaatggccttggatgactctggtttggtctcgggtgggcgaatgatgtgatatgttattatttgagtaattacatttattggacaatgcacgtgaatgatcatttgataaagatcgtttctatttgattcatcatgaagagtaatatataatattttaattcaatactctatttgttctaaattataagatgttttggagttttcaaatatgtatttagatagtgaatatctgataacatagcttatatataaaaaattgaaacatcctaatttggaagagggagtacatagcttgtaaaatgatggtcatatgactttttagatcacatcgaccattgtggtgcaccacttaatcatac

SEQ ID NO: 39640 - DNA, 3501 bp, Zea Mays
tgattgtgaaaaggagtgttataatatggaaaaaggaataattggatctataacattaaaaagttacaattttagatatatatatcattggctccacatgttattgatttattggaccataagtgagataacaattgtacatatctaaagttatataatattttaattgtaaagatccaaattttcaaaaaaaaaaaaaaactcaccccgtccccttacccttgtccgtttcctcgcgaatctacttgctctcgcacgagacacgcacgcccgcgcgcgtgaaggtacgcggaagcaggggcgaggattctccgaagcggagggcgaggcggcggcagcgaccttgagggagatggcggcgggcggtagggtttcaatcccggcaggggcgcggcgcacgatcgcggacatcaaggagatcgccggcggccacaccgacgaggaggtctacgctatgctccgcgagtgcaacatggatcccaacgagaccgttcagaggctcctcctcgaagatacctttcatgaggtgaaaaggaagcgtgacaagaaaaaggaggttagtaaagagccatcagattctcggtggagacctgccgtgcaggggcaaggtggaaagaattgtcggaattgtgcttcacgcagtttgtccagctctaatgattctgctggacgaagtgctatttctggaaaggagaatggaataagtttgatcatgggaaaaggtagtggttctactccgataaccaatatgaatatggatgtcaaagcttccactttcatgccaagtaacagtttgttgagtggtctttgcaacggtccatatcaatcagttgatcctgctgctgtgctggtgtctagttctagtgctgttggtgataagtctggttcaacagccttggctgatcttacagacaaactattggaatcaagaagacatcagtagaacataaggtggggcgtgatgtatcaacagacaaaggctcctccgaacaatctgtgcaatcttcatttcgacgatcctctgctagtagaccatcttccagctacaacagtcattcagaacaatcccaaaaagcaaccgaggatgctaccgtacatgataatgtacctttggctgctgctgacactatcacccaatcagctccagtaccgaattcagctggtacagaggattcgttgaaggtggacatatgtttaaatgatctacagttatcagataagcagcatgtgataattccagatcatcttcaagtttctgagtctgaaaagtatgttctaagctttggaagcttcgacgtcagttttcagcaaactaagggctcttcagatcctgattatgtgaagagctctttaccgaaattcagttcgtctcatgagttggatggcaacattgatgaacttcagtccatgcaaagagatcagaattcaacatctgttgtccaagaggaagctggtcatgttcctcaaccttctgcaaagctagaaaaatgtgcaccctcagcaatggagatttcatctattgcccttatggaatcaaaagactgtgatgacgattcagccacttcaggggatccccaatctacaggaactcatagtgcaccatcttatgtgacatatggatttgcaccacaatcacatgttaatcagattgagaagtccgaatctcattctcagtcgtaccatcccacaactgatgctgatgaacggctgtccccttctcttgctactcaagctgctcacaagtatgggaatatcccagttgttcccacacaaactggccaggatcaagaggggaacgactcacctgtgattatttcatctgtttctgcttccgttgctacccctgctgctggagttctgtcggcttcagttgctatccctcaacagtctgttcctgtatttcgccagcctttagccaccttcaacaggggtcatgtacccaactcctggaaccgcaagagttcttccacctgtcaaattcccagttccttcattcaagcctggtgctaacattgggagccaggcatctattggagttcctggttgctatggaacatatggttctagtccatcggtttacactaataacgcacccgtgtcatctggaaatctagcagaaaatgacaatgttacttcatctcagttcaaggaaaataacatctattttgctgggctccagaccgacggcttgactctgtgggttcctacacctggacgtgatatttctgctctccaggtcaattccttctatggtctcccccctccgggacaccaggtaacatatgcgcctcaggctggacatggtccttatggagggatctaccacccagcacattctgtggcaggagctactgttactccactgctccagccatctcacacaatggctggagctgttgaaatagttggggcacctggtggtgtttaccagcatccccaagctcacatgaattggggaagttactgataggccatgattattgtttctttgactttgggtgtccatgacaacacatttggcagaggtgttcaagttttaacaaaggtgaacttgatcaggagtgtatatatgttctcagcatggctgatctgcagggcgggttattgcttccagaagcttccagattgttgtggttgtatttgtagcagataatggccatgaaattggttgagtttatctgctcaggttccttaatacaattttagcctcctgcgcccatcctgaaacttctgcaaggagcgtgatttcgctatcttgtctgattgagggtatggagtacttgaaactgaaattgagcaagtggattttcgttctttccgctgctttacatgtaaattaaattttggttcgatgtgtgacagctgttgtacttggtatcagttgtggacttgcagctaaccagagtcaaagtgctttgaaggacttactgagcacgtttctgttcctgtaggctgtagctcagagcctagtgcttcgttatattgcttattactcattattactatttattgttcctatgaactcgtattgtttggggttaaagggccagacatttgttagtgcccctttggtataagaaaaaatggcatgcaggctacgtgccgactcacgaggttggcgtgtgggagtgatgatcggccgaatggccttggatgactctggtttggtctcgggtgggcgaatgatgtgatatgttattatttgagtaattacatttattggacaatgcacgtgaatgatcatttgataaagatcgtttctatttgattcatcatgaagagtaatatataatattttaattcaatactctatttgttctaaattataagatgttttggagttttcaaatatgtatttagatagtgaatatctgataacatagcttatatataaaaaattgaaacatcctaatttggaagagggagtacatagcttgtaaaatgatggtcatatgactttttagatcacatcgaccattgtggtgcaccacttaatcatac

SEQ ID NO: 39641 - DNA, 3671 bp, Zea Mays
tgattgtgaaaaggagtgttataatatggaaaaaggaataattggatctataacattaaaaagttacaattttagatatatatatcattggctccacatgttattgatttattggaccataagtgagataacaattgtacatatctaaagttatataatattttaattgtaaagatccaaattttcaaaaaaaaaaaaaaactcaccccgtccccttacccttgtccgtttcctcgcgaatctacttgctctcgcacgagacacgcacgcccgcgcgcgtgaaggtacgcggaagcaggggcgaggattctccgaagcggagggcgaggcggcggcagcgaccttgagggagatggcggcgggcggtagggtttcaatcccggcaggggcgcggcgcacgatcgcggacatcaaggagatcgccggcggccacaccgacgaggaggtctacgctatgctccgcgagtgcaacatggatcccaacgagaccgttcagaggctcctcctcgaagatacctttcatgaggtgaaaaggaagcgtgacaagaaaaaggaggttagtaaagagccatcagattctcggtggagacctgccgtgcaggggcaaggtggaaagaattgtcggaattgtgcttcacgcagtttgtccagctctaatgattctgctggacgaagtgctatttctggaaaggagaatggaataagtttgatcatgggaaaaggtagtggttctactccgataaccaatatgaatatggatgtcaaagcttccactttcatgccaagtaacagtttgttgagtggtctttgcaacggtccatatcaatcagttgatcctgctgctgtgctggtgtctagttctagtgctgttggtgataagtctggttcaacagccttggctgatcttacagacaaactattggaatcaagaagacatcagtagaacataaggtggggcgtgatgtatcaacagacaaaggctcctccgaacaatctgtgcaatcttcatttcgacgatcctctgctagtagaccatcttccagctacaacagtcattcagaacaatcccaaaaagttattccaagtaaagaatggaaacctaaactgacttgcttggctgcttctcaagcaaccgaggatgctaccgtacatgataatgtacctttggctgctgctgacactatcacccaatcagctccagtaccgaattcagctggtacagaggattcgttgaaggtggacatatgtttaaatgatctacagttatcagataagcagcatgtgataattccagatcatcttcaagtttctgagtctgaaaagtatgttctaagctttggaagcttcgacgtcagttttcagcaaactaagggctcttcagatcctgattatgtgaagagctctttaccgaaattcagttcgtctcatgagttggatggcaacattgatgaacttcagtccatgcaaagagatcagaattcaacatctgttgtccaagaggaagctggtcatgttcctcaaccttctgcaaagctagaaaaatgtgcaccctcagcaatggagatttcatctattgcccttatggaatcaaaagactgtgatgacgattcagccacttcaggggatccccaatctacaggaactcatagtgcaccatcttatgtgacatatggatttgcaccacaatcacatgttaatcagattgagaagtccgaatctcattctcagtcgtaccatcccacaactgatgctgatgaacggctgtccccttctcttgctactcaagctgctcacaagtatgggaatatcccagttgttcccacacaaactggccaggatcaagaggggaacgactcacctgtgattatttcatctgtttctgcttccgttgctacccctgctgctggagttctgtcggcttcagttgctatccctcaacagtctgttcctgtatttcgccagcctttaggtgttcatataccacatctcccgatgaattatgtcccttacaatcagtacatttcaccattttttattccaccccctacccttcacccttttatgggtaatgctacattttctcagccaccttcaacaggggtcatgtacccaactcctggaaccgcaagagttcttccacctgtcaaattcccagttccttcattcaagcctggtgctaacattgggagccaggcatctattggagttcctggttgctatggaacatatggttctagtccatcggtttacactaataacgcacccgtgtcatctggaaatctagcagaaaatgacaatgttacttcatctcagttcaaggaaaataacatctattttgctgggctccagaccgacggcttgactctgtgggttcctacacctggacgtgatatttctgctctccaggtcaattccttctatggtctcccccctccgggacaccaggtaacatatgcgcctcaggctggacatggtccttatggagggatctaccacccagcacattctgtggcaggagctactgttactccactgctccagccatctcacacaatggctggagctgttgaaatagttggggcacctggtggtgtttaccagcatccccaagctcacatgaattggggaagttactgataggccatgattattgtttctttgactttgggtgtccatgacaacacatttggcagaggtgttcaagttttaacaaaggtgaacttgatcaggagtgtatatatgttctcagcatggctgatctgcagggcgggttattgcttccagaagcttccagattgttgtggttgtatttgtagcagataatggccatgaaattggttgagtttatctgctcaggttccttaatacaattttagcctcctgcgcccatcctgaaacttctgcaaggagcgtgatttcgctatcttgtctgattgagggtatggagtacttgaaactgaaattgagcaagtggattttcgttctttccgctgctttacatgtaaattaaattttggttcgatgtgtgacagctgttgtacttggtatcagttgtggacttgcagctaaccagagtcaaagtgctttgaaggacttactgagcacgtttctgttcctgtaggctgtagctcagagcctagtgcttcgttatattgcttattactcattattactatttattgttcctatgaactcgtattgtttggggttaaagggccagacatttgttagtgcccctttggtataagaaaaaatggcatgcaggctacgtgccgactcacgaggttggcgtgtgggagtgatgatcggccgaatggccttggatgactctggtttggtctcgggtgggcgaatgatgtgatatgttattatttgagtaattacatttattggacaatgcacgtgaatgatcatttgataaagatcgtttctatttgattcatcatgaagagtaatatataatattttaattcaatactctatttgttctaaattataagatgttttggagttttcaaatatgtatttagatagtgaatatctgataacatagcttatatataaaaaattgaaacatcctaatttggaagagggagtacatagcttgtaaaatgatggtcatatgactttttagatcacatcgaccattgtggtgcaccacttaatcatac

SEQ ID NO: 39642 - DNA, 4093 bp, Zea Mays
tgattgtgaaaaggagtgttataatatggaaaaaggaataattggatctataacattaaaaagttacaattttagatatatatatcattggctccacatgttattgatttattggaccataagtgagataacaattgtacatatctaaagttatataatattttaattgtaaagatccaaattttcaaaaaaaaaaaaaaactcaccccgtccccttacccttgtccgtttcctcgcgaatctacttgctctcgcacgagacacgcacgcccgcgcgcgtgaaggtacgcggaagcaggggcgaggattctccgaagcggagggcgaggcggcggcagcgaccttgagggagatggcggcgggcggtagggtttcaatcccggcaggggcgcggcgcacgatcgcggacatcaaggagatcgccggcggccacaccgacgaggaggtctacgctatgctccgcgagtgcaacatggatcccaacgagaccgttcagaggctcctcctcgaagatacctttcatgaggtgaaaaggaagcgtgacaagaaaaaggaggttagtaaagagccatcagattctcggtggagacctgccgtgcaggggcaaggtggaaagaattgtcggaattgtgcttcacgcagtttgtccagctctaatgattctgctggacgaagtgctatttctggaaaggagaatggaataagtttgatcatgggaaaaggtagtggttctactccgataaccaatatgaatatggatgtcaaagcttccactttcatgccaagtttgttgagtggtctttgcaacggtccatatcaatcagttgatcctgctgctgtgctggtgtctagttctagtgctgttggtgataagtctggttcaacagccttggctgatcttacaggtggtcttccattcaaagatgtagtcgctactatagatccaaattcactgcaaccattgaaaccagcaccaccatcagatcctgtggttgtatcttttctcaactctcacagccttggtgacgttggtgcttccagacaaactattggaatcaagaagacatcagtagaacataaggtggggcgtgatgtatcaacagacaaaggctcctccgaacaatctgtgcaatcttcatttcgacgatcctctgctagtagaccatcttccagctacaacagtcattcagaacaatcccaaaaagttattccaagtaaagaatggaaacctaaactgacttgcttggctgcttctcaagcaaccgaggatgctaccgtacatgataatgtacctttggctgctgctgacactatcacccaatcagctccagtaccgaattcagctggtacagaggattcgttgaaggtggacatatgtttaaatgatctacagttatcagataagcagcatgtgataattccagatcatcttcaagtttctgagtctgaaaagtatgttctaagctttggaagcttcgacgtcagttttcagcaaactaagggctcttcagatcctgattatgtgaagagctctttaccgaaattcagttcgtctcatgagttggatggcaacattgatgaacttcagtccatgcaaaggttagttttaactccctttatcttgatttttggaggctatccttgtgatgctcttttatgctgttattgtgtatttttttggcagcatcaacttcagattttatcttgtttcttctagtttgatgattcgtttgtgtactacagcccactattgtagtttctaatgtgctactgcatcacctgattgtacctagcttgcaactcgctttgtttgatgccaccatttcatttaatttcctagacttttattgatttaaatattttcatatcaacaaaatctatctacgtactctgcaataatgatgtttgaagaccatgggcaccttggtttttcacccgcactaacatgagatcagaattcaacatctgttgtccaagaggaagctggtcatgttcctcaaccttctgcaaagctagaaaaatgtgcaccctcagcaatggagatttcatctattgcccttatggaatcaaaagactgtgatgacgattcagccacttcaggggatccccaatctacaggaactcatagtgcaccatcttatgtgacatatggatttgcaccacaatcacatgttaatcagattgagaagtccgaatctcattctcagtcgtaccatcccacaactgatgctgatgaacggctgtccccttctcttgctactcaagctgctcacaagtatgggaatatcccagttgttcccacacaaactggccaggatcaagaggggaacgactcacctgtgattatttcatctgtttctgcttccgttgctacccctgctgctggagttctgtcggcttcagttgctatccctcaacagtctgttcctgtatttcgccagcctttaggtgttcatataccacatctcccgatgaattatgtcccttacaatcagtacatttcaccattttttattccaccccctacccttcacccttttatgggtaatgctacattttctcagccaccttcaacaggggtcatgtacccaactcctggaaccgcaagagttcttccacctgtcaaattcccagttccttcattcaagcctggtgctaacattgggagccaggcatctattggagttcctggttgctatggaacatatggttctagtccatcggtttacactaataacgcacccgtgtcatctggaaatctagcagaaaatgacaatgttacttcatctcagttcaaggaaaataacatctattttgctgggctccaggtcaattccttctatggtctcccccctccgggacaccaggtaacatatgcgcctcaggctggacatggtccttatggagggatctaccacccagcacattctgtggcaggagctactgttactccactgctccagccatctcacacaatggctggagctgttgaaatagttggggcacctggtggtgtttaccagcatccccaagctcacatgaattggggaagttactgataggccatgattattgtttctttgactttgggtgtccatgacaacacatttggcagaggtgttcaagttttaacaaaggtgaacttgatcaggagtgtatatatgttctcagcatggctgatctgcagggcgggttattgcttccagaagcttccagattgttgtggttgtatttgtagcagataatggccatgaaattggttgagtttatctgctcaggttccttaatacaattttagcctcctgcgcccatcctgaaacttctgcaaggagcgtgatttcgctatcttgtctgattgagggtatggagtacttgaaactgaaattgagcaagtggattttcgttctttccgctgctttacatgtaaattaaattttggttcgatgtgtgacagctgttgtacttggtatcagttgtggacttgcagctaaccagagtcaaagtgctttgaaggacttactgagcacgtttctgttcctgtaggctgtagctcagagcctagtgcttcgttatattgcttattactcattattactatttattgttcctatgaactcgtattgtttggggttaaagggccagacatttgttagtgcccctttggtataagaaaaaatggcatgcaggctacgtgccgactcacgaggttggcgtgtgggagtgatgatcggccgaatggccttggatgactctggtttggtctcgggtgggcgaatgatgtgatatgttattatttgagtaattacatttattggacaatgcacgtgaatgatcatttgataaagatcgtttctatttgattcatcatgaagagtaatatataatattttaattcaatactctatttgttctaaattataagatgttttggagttttcaaatatgtatttagatagtgaatatctgataacatagcttatatataaaaaattgaaacatcctaatttggaagagggagtacatagcttgtaaaatgatggtcatatgactttttagatcacatcgaccattgtggtgcaccacttaatcatac

SEQ ID NO: 39643 - DNA, 3525 bp, Zea Mays
tgattgtgaaaaggagtgttataatatggaaaaaggaataattggatctataacattaaaaagttacaattttagatatatatatcattggctccacatgttattgatttattggaccataagtgagataacaattgtacatatctaaagttatataatattttaattgtaaagatccaaattttcaaaaaaaaaaaaaaactcaccccgtccccttacccttgtccgtttcctcgcgaatctacttgctctcgcacgagacacgcacgcccgcgcgcgtgaaggtacgcggaagcaggggcgaggattctccgaagcggagggcgaggcggcggcagcgaccttgagggagatggcggcgggcggtagggtttcaatcccggcaggggcgcggcgcacgatcgcggacatcaaggagatcgccggcggccacaccgacgaggaggtctacgctatgctccgcgagtgcaacatggatcccaacgagaccgttcagaggctcctcctcgaagatacctttcatgaggtgaaaaggaagcgtgacaagaaaaaggaggttagtaaagagccatcagattctcggtggagacctgccgtgcaggggcaaggtggaaagaattgtcggaattgtgcttcacgcagtttgtccagctctaatgattctgctggacgaagtgctatttctggaaaggagaatggaataagtttgatcatgggaaaaggtagtggttctactccgataaccaatatgaatatggatgtcaaagcttccactttcatgccaaggtggtcttccattcaaagatgtagtcgctactatagatccaaattcactgcaaccattgaaaccagcaccaccatcagatcctgtggttgtatcttttctcaactctcacagccttggtgacgttggtgcttccagacaaactattggaatcaagaagacatcagtagaacataaggtggggcgtgatgtatcaacagacaaagcaaccgaggatgctaccgtacatgataatgtacctttggctgctgctgacactatcacccaatcagctccagtaccgaattcagctggtacagaggattcgttgaaggtggacatatgtttaaatgatctacagttatcagataagcagcatgtgataattccagatcatcttcaagtttctgagtctgaaaagtatgttctaagctttggaagcttcgacgtcagttttcagcaaactaagggctcttcagatcctgattatgtgaagagctctttaccgaaattcagttcgtctcatgagttggatggcaacattgatgaacttcagtccatgcaaagaattcaacatctgttgtccaagaggaagctggtcatgttcctcaaccttctgcaaagctagaaaaatgtgcaccctcagcaatggagatttcatctattgcccttatggaatcaaaagactgtgatgacgattcagccacttcaggggatccccaatctacaggaactcatagtgcaccatcttatgtgacatatggatttgcaccacaatcacatgttaatcagattgagaagtccgaatctcattctcagtcgtaccatcccacaactgatgctgatgaacggctgtccccttctcttgctactcaagctgctcacaagtatgggaatatcccagttgttcccacacaaactggccaggatcaagaggggaacgactcacctgtgattatttcatctgtttctgcttccgttgctacccctgctgctggagttctgtcggcttcagttgctatccctcaacagtctgttcctgtatttcgccagcctttaggtgttcatataccacatctcccgatgaattatgtcccttacaatcagtacatttcaccattttttattccaccccctacccttcacccttttatgggtaatgctacattttctcagccaccttcaacaggggtcatgtacccaactcctggaaccgcaagagttcttccacctgtcaaattcccagttccttcattcaagcctggtgctaacattgggagccaggcatctattggagttcctggttgctatggaacatatggttctagtccatcggtttacactaataacgcacccgtgtcatctggaaatctagcagaaaatgacaatgttacttcatctcagttcaaggaaaataacatctattttgctgggctccagaccgacggcttgactctgtgggttcctacacctggacgtgatatttctgctctccaggtcaattccttctatggtctcccccctccgggacaccaggtaacatatgcgcctcaggctggacatggtccttatggagggatctaccacccagcacattctgtggcaggagctactgttactccactgctccagccatctcacacaatggctggagctgttgaaatagttggggcacctggtggtgtttaccagcatccccaagctcacatgaattggggaagttactgataggccatgattattgtttctttgactttgggtgtccatgacaacacatttggcagaggtgttcaagttttaacaaaggtgaacttgatcaggagtgtatatatgttctcagcatggctgatctgcagggcgggttattgcttccagaagcttccagattgttgtggttgtatttgtagcagataatggccatgaaattggttgagtttatctgctcaggttccttaatacaattttagcctcctgcgcccatcctgaaacttctgcaaggagcgtgatttcgctatcttgtctgattgagggtatggagtacttgaaactgaaattgagcaagtggattttcgttctttccgctgctttacatgtaaattaaattttggttcgatgtgtgacagctgttgtacttggtatcagttgtggacttgcagctaaccagagtcaaagtgctttgaaggacttactgagcacgtttctgttcctgtaggctgtagctcagagcctagtgcttcgttatattgcttattactcattattactatttattgttcctatgaactcgtattgtttggggttaaagggccagacatttgttagtgcccctttggtataagaaaaaatggcatgcaggctacgtgccgactcacgaggttggcgtgtgggagtgatgatcggccgaatggccttggatgactctggtttggtctcgggtgggcgaatgatgtgatatgttattatttgagtaattacatttattggacaatgcacgtgaatgatcatttgataaagatcgtttctatttgattcatcatgaagagtaatatataatattttaattcaatactctatttgttctaaattataagatgttttggagttttcaaatatgtatttagatagtgaatatctgataacatagcttatatataaaaaattgaaacatcctaatttggaagagggagtacatagcttgtaaaatgatggtcatatgactttttagatcacatcgaccattgtggtgcaccacttaatcatac

SEQ ID NO: 39644 - DNA, 2757 bp, Zea Mays
tgattgtgaaaaggagtgttataatatggaaaaaggaataattggatctataacattaaaaagttacaattttagatatatatatcattggctccacatgttattgatttattggaccataagtgagataacaattgtacatatctaaagttatataatattttaattgtaaagatccaaattttcaaaaaaaaaaaaaaactcaccccgtccccttacccttgtccgtttcctcgcgaatctacttgctctcgcacgagacacgcacgcccgcgcgcgtgaaggtacgcggaagcaggggcgaggattctccgaagcggagggcgaggcggcggcagcgaccttgagggagatggcggcgggcggtagggtttcaatcccggcaggggcgcggcgcacgatcgcggacatcaaggagatcgccggcggccacaccgacgaggaggtctacgctatgctccgcgagtgcaacatggatcccaacgagaccgttcagaggctcctcctcgaagatacctttcatgaggtgaaaaggaagcgtgacaagaaaaaggaggttagtaaagagccatcagattctcggtggagacctgccgtgcaggggcaaggtggaaagaattgtcggaattgtgcttcacgcagtttgtccagctctaatgattctgctggacgaagtgctatttctggaaaggagaatggaataagtttgatcatgggaaaaggtagtggttctactccgataaccaatatgaatatggatgtcaaagcttccactttcatgccaagtaacagtttgttgagtggtctttgcaacggtccatatcaatcagttgatcctgctgctgtgctggtgtctagttctagtgctgttggtgataagtctggttcaacagccttggctgatcttacaggtggtcttccattcaaagatgtagtcgctactatagatccaaattcactgcaaccattgaaaccagcaccaccatcagatcctgtggttgtatcttttctcaactctcacagccttggtgacgttggtgcttccagacaaactattggaatcaagaagacatcagtagaacataaggtggggcgtgatgtatcaacagacaaaggctcctccgaacaatctgtgcaatcttcatttcgacgatcctctgctagtagaccatcttccagctacaacagtcattcagaacaatcccaaaaagcaaccgaggatgctaccgtacatgataatgtacctttggctgctgctgacactatcacccaatcagctccagtaccgaattcagctggtacagaggattcgttgaaggtggacatatgtttaaatgatctacagttatcagataagcagcatgtgataattccagatcatcttcaagtttctgagtctgaaaagtatgttctaagctttggaagcttcgacgtcagttttcagcaaactaagggctcttcagatcctgattatgtgaagagctctttaccgaaattcagttcgtctcatgagttggatggcaacattgatgaacttcagtccatgcaaagagatcagaattcaacatctgttgtccaagaggaagctggtcatgttcctcaaccttctgcaaagctagaaaaatgtgcaccctcagcaatggagatttcatctattgcccttatggaatcaaaagactgtgatgacgattcagccacttcaggggatccccaatctacaggaactcatagtgcaccatcttatgtgacatatggatttgcaccacaatcacatgttaatcagattgagaagtccgaatctcattctcagtcgtaccatcccacaactgatgctgatgaacggctgtccccttctcttgctactcaagctgctcacaagtatgggaatatcccagttgttcccacacaaactggccaggatcaagaggggaacgactcacctgtgattatttcatctgtttctgcttccgttgctacccctgctgctggagttctgtcggcttcagttgctatccctcaacagtctgttcctgtatttcgccagcctttaggtgttcatataccacatctcccgatgaattatgtcccttacaatcagtacatttcaccattttttattccaccccctacccttcacccttttatgggtaatgctacattttctcagccaccttcaacaggggtcatgtacccaactcctggaaccgcaagagttcttccacctgtcaaattcccagttccttcattcaagcctggtgctaacattgggagccaggcatctattggagttcctggttgctatggaacatatggttctagtccatcggtttacactaataacgcacccgtgtcatctggaaatctagcagaaaatgacaatgttacttcatctcagttcaaggaaaataacatctattttgctgggctccagttcaaggatacaacatggactgaactgaggcaatgaggagggcaacacctcaaagaagacaccagaagacttattgatgacttaccaacatcatgcaagagtccaaggcacaagacaagaaaaaacccaagaaaaggaactcaaagaaacaagaaaatcaagcaacacaaaggagcatcaaaccaatccactatacattggtggctcactagacctgtgttctggatgaatagaagactgactgaagccctgcatgcacatgactcggtctggtgagcaccagacgagtcttcggactcaacacatagagagggtgcaaaacacac

SEQ ID NO: 39645 - DNA, 2590 bp, Zea Mays
tgattgtgaaaaggagtgttataatatggaaaaaggaataattggatctataacattaaaaagttacaattttagatatatatatcattggctccacatgttattgatttattggaccataagtgagataacaattgtacatatctaaagttatataatattttaattgtaaagatccaaattttcaaaaaaaaaaaaaaactcaccccgtccccttacccttgtccgtttcctcgcgaatctacttgctctcgcacgagacacgcacgcccgcgcgcgtgaaggtacgcggaagcaggggcgaggattctccgaagcggagggcgaggcggcggcagcgaccttgagggagatggcggcgggcggtagggtttcaatcccggcaggggcgcggcgcacgatcgcggacatcaaggagatcgccggcggccacaccgacgaggaggtctacgctatgctccgcgagtgcaacatggatcccaacgagaccgttcagaggctcctcctcgaagatacctttcatgaggtgaaaaggaagcgtgacaagaaaaaggaggttagtaaagagccatcagattctcggtggagacctgccgtgcaggggcaaggtggaaagaattgtcggaattgtgcttcacgcagtttgtccagctctaatgattctgctggacgaagtgctatttctggaaaggagaatggaataagtttgatcatgggaaaaggtagtggttctactccgataaccaatatgaatatggatgtcaaagcttccactttcatgccaaggtggtcttccattcaaagatgtagtcgctactatagatccaaattcactgcaaccattgaaaccagcaccaccatcagatcctgtggttgtatcttttctcaactctcacagccttggtgacgttggtgcttccagacaaactattggaatcaagaagacatcagtagaacataaggtggggcgtgatgtatcaacagacaaagttattccaagtaaagaatggaaacctaaactgacttgcttggctgcttctcaagcaaccgaggatgctaccgtacatgataatgtacctttggctgctgctgacactatcacccaatcagctccagtaccgaattcagctggtacagaggattcgttgaaggtggacatatgtttaaatgatctacagttatcagataagcagcatgtgataattccagatcatcttcaagtttctgagtctgaaaagtatgttctaagctttggaagcttcgacgtcagttttcagcaaactaagggctcttcagatcctgattatgtgaagagctctttaccgaaattcagttcgtctcatgagttggatggcaacattgatgaacttcagtccatgcaaagagatcagaattcaacatctgttgtccaagaggaagctggtcatgttcctcaaccttctgcaaagctagaaaaatgtgcaccctcagcaatggagatttcatctattgcccttatggaatcaaaagactgtgatgacgattcagccacttcaggggatccccaatctacaggaactcatagtgcaccatcttatgtgacatatggatttgcaccacaatcacatgttaatcagattgagaagtccgaatctcattctcagtcgtaccatcccacaactgatgctgatgaacggctgtccccttctcttgctactcaagctgctcacaagtatgggaatatcccagttgttcccacacaaactggccaggatcaagaggggaacgactcacctgtgattatttcatctgtttctgcttccgttgctacccctgctgctggagttctgtcggcttcagttgctatccctcaacagtctgttcctgtatttcgccagcctttaggtgttcatataccacatctcccgatgaattatgtcccttacaatcagtacatttcaccattttttattccaccccctacccttcacccttttatgggtaatgctacattttctcagccaccttcaacaggggtcatgtacccaactcctggaaccgcaagagttcttccacctgtcaaattcccagttccttcattcaagcctggtgctaacattgggagccaggcatctattggagttcctggttgctatggaacatatggttctagtccatcggtttacactaataacgcacccgtgtcatctggaaatctagcagaaaatgacaatgttacttcatctcagttcaaggaaaataacatctattttgctgggctccagttcaaggatacaacatggactgaactgaggcaatgaggagggcaacacctcaaagaagacaccagaagacttattgatgacttaccaacatcatgcaagagtccaaggcacaagacaagaaaaaacccaagaaaaggaactcaaagaaacaagaaaatcaagcaacacaaaggagcatcaaaccaatccactatacattggtggctcactagacctgtgttctggatgaatagaagactgactgaagccctgcatgcacatgactcggtctggtgagcaccagacgagtcttcggactcaacacatagagagggtgcaaaacacac

SEQ ID NO: 39646 - DNA, 2798 bp, Zea Mays
tgattgtgaaaaggagtgttataatatggaaaaaggaataattggatctataacattaaaaagttacaattttagatatatatatcattggctccacatgttattgatttattggaccataagtgagataacaattgtacatatctaaagttatataatattttaattgtaaagatccaaattttcaaaaaaaaaaaaaaactcaccccgtccccttacccttgtccgtttcctcgcgaatctacttgctctcgcacgagacacgcacgcccgcgcgcgtgaaggtacgcggaagcaggggcgaggattctccgaagcggagggcgaggcggcggcagcgaccttgagggagatggcggcgggcggtagggtttcaatcccggcaggggcgcggcgcacgatcgcggacatcaaggagatcgccggcggccacaccgacgaggaggtctacgctatgctccgcgagtgcaacatggatcccaacgagaccgttcagaggctcctcctcgaagatacctttcatgaggtgaaaaggaagcgtgacaagaaaaaggaggttagtaaagagccatcagattctcggtggagacctgccgtgcaggggcaaggtggaaagaattgtcggaattgtgcttcacgcagtttgtccagctctaatgattctgctggacgaagtgctatttctggaaaggagaatggaataagtttgatcatgggaaaaggtagtggttctactccgataaccaatatgaatatggatgtcaaagcttccactttcatgccaagtttgttgagtggtctttgcaacggtccatatcaatcagttgatcctgctgctgtgctggtgtctagttctagtgctgttggtgataagtctggttcaacagccttggctgatcttacaggtggtcttccattcaaagatgtagtcgctactatagatccaaattcactgcaaccattgaaaccagcaccaccatcagatcctgtggttgtatcttttctcaactctcacagccttggtgacgttggtgcttccagacaaactattggaatcaagaagacatcagtagaacataaggtggggcgtgatgtatcaacagacaaaggctcctccgaacaatctgtgcaatcttcatttcgacgatcctctgctagtagaccatcttccagctacaacagtcattcagaacaatcccaaaaagttattccaagtaaagaatggaaacctaaactgacttgcttggctgcttctcaagcaaccgaggatgctaccgtacatgataatgtacctttggctgctgctgacactatcacccaatcagctccagtaccgaattcagctggtacagaggattcgttgaaggtggacatatgtttaaatgatctacagttatcagataagcagcatgtgataattccagatcatcttcaagtttctgagtctgaaaagtatgttctaagctttggaagcttcgacgtcagttttcagcaaactaagggctcttcagatcctgattatgtgaagagctctttaccgaaattcagttcgtctcatgagttggatggcaacattgatgaacttcagtccatgcaaagaattcaacatctgttgtccaagaggaagctggtcatgttcctcaaccttctgcaaagctagaaaaatgtgcaccctcagcaatggagatttcatctattgcccttatggaatcaaaagactgtgatgacgattcagccacttcaggggatccccaatctacaggaactcatagtgcaccatcttatgtgacatatggatttgcaccacaatcacatgttaatcagattgagaagtccgaatctcattctcagtcgtaccatcccacaactgatgctgatgaacggctgtccccttctcttgctactcaagctgctcacaagtatgggaatatcccagttgttcccacacaaactggccaggatcaagaggggaacgactcacctgtgattatttcatctgtttctgcttccgttgctacccctgctgctggagttctgtcggcttcagttgctatccctcaacagtctgttcctgtatttcgccagcctttaggtgttcatataccacatctcccgatgaattatgtcccttacaatcagtacatttcaccattttttattccaccccctacccttcacccttttatgggtaatgctacattttctcagccaccttcaacaggggtcatgtacccaactcctggaaccgcaagagttcttccacctgtcaaattcccagttccttcattcaagcctggtgctaacattgggagccaggcatctattggagttcctggttgctatggaacatatggttctagtccatcggtttacactaataacgcacccgtgtcatctggaaatctagcagaaaatgacaatgttacttcatctcagttcaaggaaaataacatctattttgctgggctccagttcaaggatacaacatggactgaactgaggcaatgaggagggcaacacctcaaagaagacaccagaagacttattgatgacttaccaacatcatgcaagagtccaaggcacaagacaagaaaaaacccaagaaaaggaactcaaagaaacaagaaaatcaagcaacacaaaggagcatcaaaccaatccactatacattggtggctcactagacctgtgttctggatgaatagaagactgactgaagccctgcatgcacatgactcggtctggtgagcaccagacgagtcttcggactcaacacatagagagggtgcaaaacacac

SEQ ID NO: 39647 - DNA, 3218 bp, Zea Mays
aagtcaaatgtacctgtttgaatggttagtaaagagccatcagattctcggtggagacctgccgtgcaggggcaaggtggaaagaattgtcggaattgtgcttcacgcagtttgtccagctctaatgattctgctggacgaagtgctatttctggaaaggagaatggaataagtttgatcatgggaaaaggtagtggttctactccgataaccaatatgaatatggatgtcaaagcttccactttcatgccaagtaacagtttgttgagtggtctttgcaacggtccatatcaatcagttgatcctgctgctgtgctggtgtctagttctagtgctgttggtgataagtctggttcaacagccttggctgatcttacaggtggtcttccattcaaagatgtagtcgctactatagatccaaattcactgcaaccattgaaaccagcaccaccatcagatcctgtggttgtatcttttctcaactctcacagccttggtgacgttggtgcttccagacaaactattggaatcaagaagacatcagtagaacataaggtggggcgtgatgtatcaacagacaaaggctcctccgaacaatctgtgcaatcttcatttcgacgatcctctgctagtagaccatcttccagctacaacagtcattcagaacaatcccaaaaagttattccaagtaaagaatggaaacctaaactgacttgcttggctgcttctcaagcaaccgaggatgctaccgtacatgataatgtacctttggctgctgctgacactatcacccaatcagctccagtaccgaattcagctggtacagaggattcgttgaaggtggacatatgtttaaatgatctacagttatcagataagcagcatgtgataattccagatcatcttcaagtttctgagtctgaaaagtatgttctaagctttggaagcttcgacgtcagttttcagcaaactaagggctcttcagatcctgattatgtgaagagctctttaccgaaattcagttcgtctcatgagttggatggcaacattgatgaacttcagtccatgcaaagagatcagaattcaacatctgttgtccaagaggaagctggtcatgttcctcaaccttctgcaaagctagaaaaatgtgcaccctcagcaatggagatttcatctattgcccttatggaatcaaaagactgtgatgacgattcagccacttcaggggatccccaatctacaggaactcatagtgcaccatcttatgtgacatatggatttgcaccacaatcacatgttaatcagattgagaagtccgaatctcattctcagtcgtaccatcccacaactgatgctgatgaacggctgtccccttctcttgctactcaagctgctcacaagtatgggaatatcccagttgttcccacacaaactggccaggatcaagaggggaacgactcacctgtgattatttcatctgtttctgcttccgttgctacccctgctgctggagttctgtcggcttcagttgctatccctcaacagtctgttcctgtatttcgccagcctttaggtgttcatataccacatctcccgatgaattatgtcccttacaatcagtacatttcaccattttttattccaccccctacccttcacccttttatgggtaatgctacattttctcagccaccttcaacaggggtcatgtacccaactcctggaaccgcaagagttcttccacctgtcaaattcccagttccttcattcaagcctggtgctaacattgggagccaggcatctattggagttcctggttgctatggaacatatggttctagtccatcggtttacactaataacgcacccgtgtcatctggaaatctagcagaaaatgacaatgttacttcatctcagttcaaggaaaataacatctattttgctgggctccaggtcaattccttctatggtctcccccctccgggacaccaggtaacatatgcgcctcaggctggacatggtccttatggagggatctaccacccagcacattctgtggcaggagctactgttactccactgctccagccatctcacacaatggctggagctgttgaaatagttggggcacctggtggtgtttaccagcatccccaagctcacatgaattggggaagttactgataggccatgattattgtttctttgactttgggtgtccatgacaacacatttggcagaggtgttcaagttttaacaaaggtgaacttgatcaggagtgtatatatgttctcagcatggctgatctgcagggcgggttattgcttccagaagcttccagattgttgtggttgtatttgtagcagataatggccatgaaattggttgagtttatctgctcaggttccttaatacaattttagcctcctgcgcccatcctgaaacttctgcaaggagcgtgatttcgctatcttgtctgattgagggtatggagtacttgaaactgaaattgagcaagtggattttcgttctttccgctgctttacatgtaaattaaattttggttcgatgtgtgacagctgttgtacttggtatcagttgtggacttgcagctaaccagagtcaaagtgctttgaaggacttactgagcacgtttctgttcctgtaggctgtagctcagagcctagtgcttcgttatattgcttattactcattattactatttattgttcctatgaactcgtattgtttggggttaaagggccagacatttgttagtgcccctttggtataagaaaaaatggcatgcaggctacgtgccgactcacgaggttggcgtgtgggagtgatgatcggccgaatggccttggatgactctggtttggtctcgggtgggcgaatgatgtgatatgttattatttgagtaattacatttattggacaatgcacgtgaatgatcatttgataaagatcgtttctatttgattcatcatgaagagtaatatataatattttaattcaatactctatttgttctaaattataagatgttttggagttttcaaatatgtatttagatagtgaatatctgataacatagcttatatataaaaaattgaaacatcctaatttggaagagggagtacatagcttgtaaaatgatggtcatatgactttttagatcacatcgaccattgtggtgcaccacttaatcatac

SEQ ID NO: 39648 - DNA, 3119 bp, Zea Mays
gtttggagggtgaatcgctaaagtattactgaaaacaacactcaggttagtaaagagccatcagattctcggtggagacctgccgtgcaggggcaaggtggaaagaattgtcggaattgtgcttcacgcagtttgtccagctctaatgattctgctggacgaagtgctatttctggaaaggagaatggaataagtttgatcatgggaaaaggtagtggttctactccgataaccaatatgaatatggatgtcaaagcttccactttcatgccaagtaacagtttgttgagtggtctttgcaacggtccatatcaatcagttgatcctgctgctgtgctggtgtctagttctagtgctgttggtgataagtctggttcaacagccttggctgatcttacaggtggtcttccattcaaagatgtagtcgctactatagatccaaattcactgcaaccattgaaaccagcaccaccatcagatcctgtggttgtatcttttctcaactctcacagccttggtgacgttggtgcttccagacaaactattggaatcaagaagacatcagtagaacataaggtggggcgtgatgtatcaacagacaaaggctcctccgaacaatctgtgcaatcttcatttcgacgatcctctgctagtagaccatcttccagctacaacagtcattcagaacaatcccaaaaagctccagtaccgaattcagctggtacagaggattcgttgaaggtggacatatgtttaaatgatctacagttatcagataagcagcatgtgataattccagatcatcttcaagtttctgagtctgaaaagtatgttctaagctttggaagcttcgacgtcagttttcagcaaactaagggctcttcagatcctgattatgtgaagagctctttaccgaaattcagttcgtctcatgagttggatggcaacattgatgaacttcagtccatgcaaagagatcagaattcaacatctgttgtccaagaggaagctggtcatgttcctcaaccttctgcaaagctagaaaaatgtgcaccctcagcaatggagatttcatctattgcccttatggaatcaaaagactgtgatgacgattcagccacttcaggggatccccaatctacaggaactcatagtgcaccatcttatgtgacatatggatttgcaccacaatcacatgttaatcagattgagaagtccgaatctcattctcagtcgtaccatcccacaactgatgctgatgaacggctgtccccttctcttgctactcaagctgctcacaagtatgggaatatcccagttgttcccacacaaactggccaggatcaagaggggaacgactcacctgtgattatttcatctgtttctgcttccgttgctacccctgctgctggagttctgtcggcttcagttgctatccctcaacagtctgttcctgtatttcgccagcctttaggtgttcatataccacatctcccgatgaattatgtcccttacaatcagtacatttcaccattttttattccaccccctacccttcacccttttatgggtaatgctacattttctcagccaccttcaacaggggtcatgtacccaactcctggaaccgcaagagttcttccacctgtcaaattcccagttccttcattcaagcctggtgctaacattgggagccaggcatctattggagttcctggttgctatggaacatatggttctagtccatcggtttacactaataacgcacccgtgtcatctggaaatctagcagaaaatgacaatgttacttcatctcagttcaaggaaaataacatctattttgctgggctccaggtcaattccttctatggtctcccccctccgggacaccaggtaacatatgcgcctcaggctggacatggtccttatggagggatctaccacccagcacattctgtggcaggagctactgttactccactgctccagccatctcacacaatggctggagctgttgaaatagttggggcacctggtggtgtttaccagcatccccaagctcacatgaattggggaagttactgataggccatgattattgtttctttgactttgggtgtccatgacaacacatttggcagaggtgttcaagttttaacaaaggtgaacttgatcaggagtgtatatatgttctcagcatggctgatctgcagggcgggttattgcttccagaagcttccagattgttgtggttgtatttgtagcagataatggccatgaaattggttgagtttatctgctcaggttccttaatacaattttagcctcctgcgcccatcctgaaacttctgcaaggagcgtgatttcgctatcttgtctgattgagggtatggagtacttgaaactgaaattgagcaagtggattttcgttctttccgctgctttacatgtaaattaaattttggttcgatgtgtgacagctgttgtacttggtatcagttgtggacttgcagctaaccagagtcaaagtgctttgaaggacttactgagcacgtttctgttcctgtaggctgtagctcagagcctagtgcttcgttatattgcttattactcattattactatttattgttcctatgaactcgtattgtttggggttaaagggccagacatttgttagtgcccctttggtataagaaaaaatggcatgcaggctacgtgccgactcacgaggttggcgtgtgggagtgatgatcggccgaatggccttggatgactctggtttggtctcgggtgggcgaatgatgtgatatgttattatttgagtaattacatttattggacaatgcacgtgaatgatcatttgataaagatcgtttctatttgattcatcatgaagagtaatatataatattttaattcaatactctatttgttctaaattataagatgttttggagttttcaaatatgtatttagatagtgaatatctgataacatagcttatatataaaaaattgaaacatcctaatttggaagagggagtacatagcttgtaaaatgatggtcatatgactttttagatcacatcgaccattgtggtgcaccacttaatcatac

SEQ ID NO: 39649 - DNA, 2205 bp, Zea Mays
gtaatttccggcttacccgttgtcgccttccctcgcctcccgcacgccagtccctgctgccctgccctcttccgccgcgtcgtcccctcctacgttcccctctccctcggtccgcctagatctcgccagggtttgccgcgtctcgtcttgatttttgctccggaaccagggctccatcggggcagagaggcaggaggggtaggccatcccggaaagtggcggatctgggtgttatcggaggaagagcatcgtgtagcgtttctgtcggtggcaggcatcgacgaggtgtgatttagaaggcatttgtgagtacggcatggactgcgtcggagctgtggacagcagcggttctgccagtgacagactggccattggtacctacccactggtttgaaccagtcagcagaggcatgaaaggcagtggacgcatcactggtaatggaagagatagtgttggtgcttctctgtatactagagttcaacctcagacagacatggaaacacaaatacatgagcttgagcaagaagcatattgttcagttcttagagcattcaaggctcaatctgatgctataacatgggaaaaagaaagtctcattactgagcttaggaaggagctacaagtatctgacaaggaacacagggagttgctaaacaaagttaatggcgatgatattattcgaagaataaggaaatggagagagtcaactggtgggcttatgattaatttggtgaataattctcagcgtacacatgaccctattcccagccctacgacatctgctcgcaagaggcaaaagatgtctcaacccattctctctgcatgtgtacctgcaccatctgctatgcattcacagcctttaactgcaccgatgcaaccatcatcttcaggagcaaaaaagggagctcaacccggcacaaaagtgaagaagaccaaaccaggccagaagatacctggtggctctgcagtcaaatctatgccatcttctgctggtcctggtgggcgaggaactattatcaataggaatatgtctgctggccttccacctgaaagttcacaattaaatccattaattggtcgtaaagtcatgactcggtggcctgacgataatagcttttatgaagctgaaataactgactatgatgcatcaaaggatatctatacactggtttatgacataaatacagcagacgagacatgggaatgggttgacttcaaggagatggcacctgaggatataagatgggatggcgaggagcctgatttaaaccttataggtcgtggtgctcccgtccatggtatgaagtcaagcagtcgtggtggccccatgtcaggtaccggaagagacagaggtccccaaaagaactcattcaagaaagattatccatcacaaaacggtattgggaagaagagtgttgactacatagaaattctccatacagagacactcataaaggaggtggagcgggttttcagttcagccaaccctgacccccttgagatggagagggctaagaaagcgctaaaggagcacgaacaatcattaattgatgcgattgcaaggcttgctgaggcgtctgatgatgatcgtgtgcgatctttggagtataaccgtggatggaggaaccaacatggaggaagatatgcggatgatatgaccatggacggccacatggctggagatgcagatgccatgtaaacctgccaatgtgtacacaaaattccttcattagcttattttttgcctgttgtaaaatcttgacgctaatttttctctctctagatttagccgtaggtacttctgattggtcctaaccaaagaaacagttaggatcaccactctgattgttcagcttttgtagtagaattacgcccagctcatcctttacactgtaaatttagatttggagctgattttgtcggtcgctagacatttgataagcatctgccgtggcctgtttggtttcctagtgcaaacggaaggcatttttgctaatgttgtactacctccatttttttatttgacgcaggttggttcaattttatactaaaaaaatataaaaaatcggagggagtagctagtaatgttgtgttatagcacaaagggtgtaataggatcaactatggatagctgtcgaatacagacatgactggatgctcggttacaaatactaataagaggctgtttggttatatgtttttgg

SEQ ID NO: 39650 - DNA, 2234 bp, Zea Mays
acccgttgtcgccttccctcgcctcccgcacgccagtccctgctgccctgccctcttccgccgcgtcgtcccctcctacgttcccctctccctcggtccgcctagatctcgccagggtttgccgcgtctcgtcttgatttttgctccggaaccagggctccatcggggcagagaggcaggaggggtaggccatcccggaaagtggcggatctgggtgttatcggaggaagagcatcgtgtagcgtttctgtcggtggcaggcatcgacgaggtgtgatttagaaggcatttgtgagtacggcatggactgcgtcggagctgtggacagcagcggttctgccagtgacagactggccattggtacctacccactggtttgaaccagtcagcagaggcatgaaaggcagtggacgcatcactggtaatggaagagatagtgttggtgcttctctgtatactagagttcaacctcagacagacatggaaacacaaatacatgagcttgagcaagaagcatattgttcagttcttagagcattcaaggctcaatctgatgctataacatgggaaaaagaaagtctcattactgagcttaggaaggagctacaagtatctgacaaggaacacagggagttgctaaacaaagttaatggcgatgatattattcgaagaataaggaaatggagagagtcaactggtgggcttatgattaatttggtgaataattctcagcgtacacatgaccctattcccagccctacgacatctgctcgcaagaggcaaaagatgtctcaacccattctctctgcatgtgtacctgcaccatctgctatgcattcacagcctttaactgcaccgatgcaaccatcatcttcaggagcaaaaaagggagctcaacccggcacaaaagtgaagaagaccaaaccaggccagaagatacctggtggctctgcagtcaaatctatgccatcttctgctggtcctggtgggcgaggaactattatcaataggaatatgtctgctggccttccacctgaaagttcacaattaaatccattaattggtcgtaaagtcatgactcggtggcctgacgataatagcttttatgaagctgaaataactgactatgatgcatcaaaggatatctatacactggtttatgacataaatacagcagacgagacatgggaatgggttgacttcaaggagatggcacctgaggatataagatgggatggcgaggagcctgatttaaaccttataggtcgtggtgctcccgtccatggtatgaagtcaagcagtcgtggtggccccatgtcaggtaccggaagagacagaggtccccaaaagaactcattcaagaaagattatccatcacaaaacggtattgggaagaagagtgttgactacatagaaattctccatacagagacactcataaaggaggtggagcgggttttcagttcagccaaccctgacccccttgagatggagagggctaagaaagcgctaaaggagcacgaacaatcattaattgatgcgattgcaaggcttgctgaggcgtctgatggtgagggtgttaagtgttgtgcataattcctcttttcaactctatgatcgtgtgcgatctttggagtataaccgtggatggaggaaccaacatggaggaagatatgcggatgatatgaccatggacggccacatggctggagatgcagatgccatgtaaacctgccaatgtgtacacaaaattccttcattagcttattttttgcctgttgtaaaatcttgacgctaatttttctctctctagatttagccgtaggtacttctgattggtcctaaccaaagaaacagttaggatcaccactctgattgttcagcttttgtagtagaattacgcccagctcatcctttacactgtaaatttagatttggagctgattttgtcggtcgctagacatttgataagcatctgccgtggcctgtttggtttcctagtgcaaacggaaggcatttttgctaatgttgtactacctccatttttttatttgacgcaggttggttcaattttatactaaaaaaatataaaaaatcggagggagtagctagtaatgttgtgttatagcacaaagggtgtaataggatcaactatggatagctgtcgaatacagacatgactggatgctcggttacaaatactaataagaggctgtttggttatatgtttttgg

SEQ ID NO: 39651 - DNA, 2230 bp, Zea Mays
acccgttgtcgccttccctcgcctcccgcacgccagtccctgctgccctgccctcttccgccgcgtcgtcccctcctacgttcccctctccctcggtccgcctagatctcgccagggtttgccgcgtctcgtcttgatttttgctccggaaccagggctccatcggggcagagaggcaggaggggtaggccatcccggaaagtggcggatctgggtgttatcggaggaagagcatcgtgtagcgtttctgtcggtggcaggcatcgacgaggtgtgatttagaaggcatttgtgagtacggcatggactgcgtcggagctgtggacagcagcggaaccgatgatgatcttccacaatcatatcagaacagcagaggcatgaaaggcagtggacgcatcactggtaatggaagagatagtgttggtgcttctctgtatactagagttcaacctcagacagacatggaaacacaaatacatgagcttgagcaagaagcatattgttcagttcttagagcattcaaggctcaatctgatgctataacatgggtacactcttgtctcttcatgtaattaatttatttactctggttggcctagatttcatggagtcttgtaagggtttgaattcattgtctcaggaaaaagaaagtctcattactgagcttaggaaggagctacaagtatctgacaaggaacacagggagttgctaaacaaagttaatggcgatgatattattcgaagaataaggaaatggagagagtcaactggtgggcttatgattaatttggtgaataattctcagcgtacacatgaccctattcccagccctacgacatctgctcgcaagaggcaaaagatgtctcaacccattctctctgcatgtgtacctgcaccatctgctatgcattcacagcctttaactgcaccgatgcaaccatcatcttcaggagcaaaaaagggagctcaacccggcacaaaagtgaagaagaccaaaccaggccagaagatacctggtggctctgcagtcaaatctatgccatcttctgctggtcctggtgggcgaggaactattatcaataggaatatgtctgctggccttccacctgaaagttcacaattaaatccattaattggtcgtaaagtcatgactcggtggcctgacgataatagcttttatgaagctgaaataactgactatgatgcatcaaagcagacgagacatgggaatgggttgacttcaaggagatggcacctgaggatataagatgggatggcgaggagcctgatttaaaccttataggtcgtggtgctcccgtccatggtatgaagtcaagcagtcgtggtggccccatgtcaggtaccggaagagacagaggtccccaaaagaactcattcaagaaagattatccatcacaaaacggtattgggaagaagagtgttgactacatagaaattctccatacagagacactcataaaggaggtggagcgggttttcagttcagccaaccctgacccccttgagatggagagggctaagaaagcgctaaaggagcacgaacaatcattaattgatgcgattgcaaggcttgctgaggcgtctgatgatgatcgtgtgcgatctttggagtataaccgtggatggaggaaccaacatggaggaagatatgcggatgatatgaccatggacggccacatggctggagatgcagatgccatgtaaacctgccaatgtgtacacaaaattccttcattagcttattttttgcctgttgtaaaatcttgacgctaatttttctctctctagatttagccgtaggtacttctgattggtcctaaccaaagaaacagttaggatcaccactctgattgttcagcttttgtagtagaattacgcccagctcatcctttacactgtaaatttagatttggagctgattttgtcggtcgctagacatttgataagcatctgccgtggcctgtttggtttcctagtgcaaacggaaggcatttttgctaatgttgtactacctccatttttttatttgacgcaggttggttcaattttatactaaaaaaatataaaaaatcggagggagtagctagtaatgttgtgttatagcacaaagggtgtaataggatcaactatggatagctgtcgaatacagacatgactggatgctcggttacaaatactaataagaggctgtttggttatatgtttttgg

SEQ ID NO: 39652 - DNA, 2175 bp, Zea Mays
acccgttgtcgccttccctcgcctcccgcacgccagtccctgctgccctgccctcttccgccgcgtcgtcccctcctacgttcccctctccctcggtccgcctagatctcgccagggtttgccgcgtctcgtcttgatttttgctccggaaccagggctccatcggggcagagaggcaggaggggtaggccatcccggaaagtggcggatctgggtgttatcggaggaagagcatcgtgtagcgtttctgtcggtggcaggcatcgacgaggtgtgatttagaaggcatttgtgagtacggcatggactgcgtcggagctgtggacagcagcggaaccgatgatgatcttccacaatcatatcagaacagcagaggcatgaaaggcagtggacgcatcactggtaatggaagagatagtgttggtgcttctctgtatactagagttcaacctcagacagacatggaaacacaaatacatgagcttgagcaagaagcatattgttcagttcttagagcattcaaggctcaatctgatgctataacatgggaaaaagaaagtctcattactgagcttaggaaggagctacaagtatctgacaaggaacacagggagttgctaaacaaagttaatggcgatgatattattcgaagaataaggaaatggagagagtcaactggtgggcttatgattaatttggtgaataattctcagcgtacacatgaccctattcccagccctacgacatctgctcgcaagaggcaaaagatgtctcaacccattctctctgcatgtgtacctgcaccatctgctatgcattcacagcctttaactgcaccgatgcaaccatcatcttcaggagcaaaaaagggagctcaacccggcacaaaagtgaagaagaccaaaccaggccagaagatacctggtggctctgcagtcaaatctatgccatcttctgctggtcctggtgggcgaggaactattatcaataggaatatgtctgctggccttccacctgaaagttcacaattaaatccattaattggtcgtaaagtcatgactcggtggcctgacgataatagcttttatgaagctgaaataactgactatgatgcatcaaaggatatctatacactggtttatgacataaatacagcagacgagacatgggaatgggttgacttcaaggagatggcacctgaggatataagatgggatggcgaggagcctgatttaaaccttataggtcgtggtgctcccgtccatggtatgaagtcaagcagtcgtggtggccccatgtcaggtaccggaagagacagaggtccccaaaagaactcattcaagaaagattatccatcacaaaacggtattgggaagaagagtgttgactacatagaaattctccatacagagacactcataaaggaggtggagcgggttttcagttcagccaaccctgacccccttgagatggagagggctaagaaagcgctaaaggagcacgaacaatcattaattgatgcgattgcaaggcttgctgaggcgtctgatgcagatgatcgtgtgcgatctttggagtataaccgtggatggaggaaccaacatggaggaagatatgcggatgatatgaccatggacggccacatggctggagatgcagatgccatgtaaacctgccaatgtgtacacaaaattccttcattagcttattttttgcctgttgtaaaatcttgacgctaatttttctctctctagatttagccgtaggtacttctgattggtcctaaccaaagaaacagttaggatcaccactctgattgttcagcttttgtagtagaattacgcccagctcatcctttacactgtaaatttagatttggagctgattttgtcggtcgctagacatttgataagcatctgccgtggcctgtttggtttcctagtgcaaacggaaggcatttttgctaatgttgtactacctccatttttttatttgacgcaggttggttcaattttatactaaaaaaatataaaaaatcggagggagtagctagtaatgttgtgttatagcacaaagggtgtaataggatcaactatggatagctgtcgaatacagacatgactggatgctcggttacaaatactaataagaggctgtttggttatatgtttttgg

SEQ ID NO: 39653 - DNA, 2037 bp, Zea Mays
acccgttgtcgccttccctcgcctcccgcacgccagtccctgctgccctgccctcttccgccgcgtcgtcccctcctacgttcccctctccctcggtccgcctagatctcgccagggtttgccgcgtctcgtcttgatttttgctccggaaccagggctccatcggggcagagaggcaggaggggtaggccatcccggaaagtggcggatctgggtgttatcggaggaagagcatcgtgtagcgtttctgtcggtggcaggcatcgacgaggtgtgatttagaaggcatttgtgagtacggcatggactgcgtcggagctgtggacagcagcggaaccgatgatgatcttccacaatcatatcagaacagcagaggcatgaaaggcagtggacgcatcactggtaatggaagagatagtgttggtgcttctctgtatactagagttcaacctcagacagacatggaaacacaaatacatgagcttgagcaagaagcatattgttcagttcttagagcattcaaggctcaatctgatgctataacatgggaaaaagaaagtctcattactgagcttaggaaggagctacaagtatctgacaaggaacacagggagttgctaaacaaagttaatggcgatgatattattcgaagaataaggaaatggagagagtcaactggtgggcttatgattaatttggtgaataattctcagcgtacacatgaccctattcccagccctacgacatctgctcgcaagaggagcaaaaaagggagctcaacccggcacaaaagtgaagaagaccaaaccaggccagaagatacctggtggctctgcagtcaaatctatgccatcttctgctggtcctggtgggcgaggaactattatcaataggaatatgtctgctggccttccacctgaaagttcacaattaaatccattaattggtcgtaaagtcatgactcggtggcctgacgataatagcttttatgaagctgaaataactgactatgatgcatcaaagacgagacatgggaatgggttgacttcaaggagatggcacctgaggatataagatgggatggcgaggagcctgatttaaaccttataggtcgtggtgctcccgtccatggtatgaagtcaagcagtcgtggtggccccatgtcaggtaccggaagagacagaggtccccaaaagaactcattcaagaaagattatccatcacaaaacggtattgggaagaagagtgttgactacatagaaattctccatacagagacactcataaaggaggtggagcgggttttcagttcagccaaccctgacccccttgagatggagagggctaagaaagcgctaaaggagcacgaacaatcattaattgatgcgattgcaaggcttgctgaggcgtctgatgatgatcgtgtgcgatctttggagtataaccgtggatggaggaaccaacatggaggaagatatgcggatgatatgaccatggacggccacatggctggagatgcagatgccatgtaaacctgccaatgtgtacacaaaattccttcattagcttattttttgcctgttgtaaaatcttgacgctaatttttctctctctagatttagccgtaggtacttctgattggtcctaaccaaagaaacagttaggatcaccactctgattgttcagcttttgtagtagaattacgcccagctcatcctttacactgtaaatttagatttggagctgattttgtcggtcgctagacatttgataagcatctgccgtggcctgtttggtttcctagtgcaaacggaaggcatttttgctaatgttgtactacctccatttttttatttgacgcaggttggttcaattttatactaaaaaaatataaaaaatcggagggagtagctagtaatgttgtgttatagcacaaagggtgtaataggatcaactatggatagctgtcgaatacagacatgactggatgctcggttacaaatactaataagaggctgtttggttatatgtttttgg

SEQ ID NO: 39654 - DNA, 1883 bp, Zea Mays
tggaagtcttatcattcgctcctagttgcctggctggaagcaaggaaccgatgatgatcttccacaatcatatcagaacagcagaggcatgaaaggcagtggacgcatcactggtaatggaagagatagtgttggtgcttctctgtatactagagttcaacctcagacagacatggaaacacaaatacatgagcttgagcaagaagcatattgttcagttcttagagcattcaaggctcaatctgatgctataacatgggaaaaagaaagtctcattactgagcttaggaaggagctacaagtatctgacaaggaacacagggagttgctaaacaaagttaatggcgatgatattattcgaagaataaggaaatggagagagtcaactggtgggcttatgattaatttggtgaataattctcagcgtacacatgaccctattcccagccctacgacatctgctcgcaagaggcaaaagatgtctcaacccattctctctgcatgtgtacctgcaccatctgctatgcattcacagcctttaactgcaccgatgcaaccatcatcttcaggagcaaaaaagggagctcaacccggcacaaaagtgaagaagaccaaaccaggccagaagatacctggtggctctgcagtcaaatctatgccatcttctgctggtcctggtgggcgaggaactattatcaataggaatatgtctgctggccttccacctgaaagttcacaattaaatccattaattggtcgtaaagtcatgactcggtggcctgacgataatagcttttatgaagctgaaataactgactatgatgcatcaaaggatatctatacactggtttatgacataaatacagcagacgagacatgggaatgggttgacttcaaggagatggcacctgaggatataagatgggatggcgaggagcctgatttaaaccttataggtcgtggtgctcccgtccatggtatgaagtcaagcagtcgtggtggccccatgtcaggtaccggaagagacagaggtccccaaaagaactcattcaagaaagattatccatcacaaaacggtattgggaagaagagtgttgactacatagaaattctccatacagagacactcataaaggaggtggagcgggttttcagttcagccaaccctgacccccttgagatggagagggctaagaaagcgctaaaggagcacgaacaatcattaattgatgcgattgcaaggcttgctgaggcgtctgatgatgatcgtgtgcgatctttggagtataaccgtggatggaggaaccaacatggaggaagatatgcggatgatatgaccatggacggccacatggctggagatgcagatgccatgtaaacctgccaatgtgtacacaaaattccttcattagcttattttttgcctgttgtaaaatcttgacgctaatttttctctctctagatttagccgtaggtacttctgattggtcctaaccaaagaaacagttaggatcaccactctgattgttcagcttttgtagtagaattacgcccagctcatcctttacactgtaaatttagatttggagctgattttgtcggtcgctagacatttgataagcatctgccgtggcctgtttggtttcctagtgcaaacggaaggcatttttgctaatgttgtactacctccatttttttatttgacgcaggttggttcaattttatactaaaaaaatataaaaaatcggagggagtagctagtaatgttgtgttatagcacaaagggtgtaataggatcaactatggatagctgtcgaatacagacatgactggatgctcggttacaaatactaataagaggctgtttggttatatgtttttgg

SEQ ID NO: 39655 - DNA, 623 bp, Zea Mays
ccgggagttccgcgacgcacgcgcgcccgtctcctcatcgttcgagcctcttctccgccgccgcgggcctctagagccagaccatcgcgcggtcgtccttcttaacaaggcagacctagcggacccgtccgaaaccgagttaactaggtccctcctcctcagccctgcgttgtctgtgcgctgcgcactgggtggggagagttgatggctgcttctggatctcggtgcccgagggtgctcgtgctgctgcaggggtgggtggcgtacatcaagaagcagaggagctgcccttgcgtcgcggtaaactcgcacagcagggaaagcatcaaggaggtgctgaaagtcgtgcaagcaagaataagggagatcaagcatggcgacaacaattgcacgggaactgccctcctagtcggaatcccaaacgttgggaaatcggccattgttaatgcgatgcatcaaattgggaggattgcggcagcagagaaggggaagctcaagcatgcgattgtgagcagccatcctggagaaaccagagacatacatggatacttgttttccccagttagggagcttttctccgtcatgtcacttttgaagagccccatggggttgatggttggttt

SEQ ID NO: 39656 - DNA, 2809 bp, Zea Mays
gccgttaaatcgttgaagtcgctcaactcatcaatcgcatctgggtcggtcgtcgattttctattcgccatggtacaacaccgttattaaatctgttcttcaacccgccatggcgttcgtcgttctctgatcccagcccgaaccatccgtatgctcgctccttatccatcaggttttggcgtgttcgcgtttatcgtcgagtcgtcgaacctgtcatcctctgctcaaacccacctcatcagctcgctccagacataatcctgtcgttgttccgtgcgtcgggggaagacgaagctagccgagtaatattcaccgagtgcgcgaccaaaaagctcgaaccagtcgtcaatcgcctcaacaacaaccgtatccacgactcccaccgttccaataattttgccgcatcacccttcaaatccgagacctcgtccgtaggatcgtcgttgacctcgcaacttcagctcgagttaattatggtaagttgatttattattcccggcaactaaataaatggtaggattaaatagaaaaattgattgtgatgattctcttgtttattactcgatgtagagattaagttaaattttagggttatgcaataaatatattggtaaatatatataatacacaggttaaccggtaaattagtttagcaagttgatgaaagttcttctatcaattttataagtgttaggtgcctgagaattttgaagttaaaaattataagtcgtttagtgtgttctctagactaggtatgataatttatgtgttggtcaatctcatgcttggaatggatgttgattgctaccttgactgtttagctaggttgtaagaacatgattgtcgtaagtaacaatatatcgataattagtgtctgtaatgtctcgtcattaaataggttatttctcttttgcgtagcatcgtaatatttagtgttattgttccttatatgcattcatatgcataatgcatttcattcaggacgataaataatcgcgtgatgcggaaaagatgacccaagtctagcaaacttaggaatgagctaaatattcttgattctcggaattttgactgaaacattgcacacatagctcatttatatacccttgatcatatctctttcatgactacgactaatgtgttttcaagtgtatttctatgctaagtcgtagattgaaagggaaatggagtcttcggcaaagacaaggcttccactccactctaacggtatcatttaccctttgttgtctctccacactactctcaaattggtataatctttcactcatatttacttgtaccaatgggggagaaaataaaaagggctcacaaagtctccgtttttggcgattaatgccaaagggggagaaagtattagcccaaagcaaaaggaccgcaccaccaccttttgaaaaattttaattgatatattttggtatgtttactttcaaaattggtatctatcaaaacccccttgaaaactaagaggagaattttattcagggggagttttgtttagtcaaaggaaaagcatttgaaatagtgggaaaattccaaatcttgaaaatgcttcctacaatcttattcatatacatttgactatttgcaaaaagatcttgaaaagactttccaaaaagattcgcaaaaaaagcaagtggtgcaaacgtggcccaaaatgttaaaaagaaagaaagcaatccatgcatatctagtgaaatcattaaattggttcaattccaagtaacctatgcacttaccttttgcaaactagttcaattctgcacttatatatttgctttggtttgtgttggcatcaatcaccaaaaagggggagattgaaagggaaatagggtttaaccttttcctataaacaattttggtggttgaatgcccaacacaaataattggactaactagtttgctctagattacatattctacaggtgcataaaggttcaacacaaaccaataaaagatcaaagttagggttcaaaagcaaaggagcaaaggaaccgcggaaggcgcaccggactgtccggtgtgccacccgacagtgtccggtgcaccaggaccgtacaggatcaaactcacagtctcaggtttttccagtgtcgctccgctataattcaccagactatccggtgtgccacctgaaagggaaataggcttacaccttttcctaaattgattttggtggttgaattgcccaacacaaataattggactaactagtttgctctagtctataagttttacaggtgccaaaggttcacaacaagccaataaaaagaccaaagaagggttcaaataaagagagctaaagacatcccaaaggcaccctggtctggcgcaccgaacagtccggtgcgccaccggacagtgtccggtgcaccagggaacttgacgctgaactcgctaccttcgggaaaatgggaggccgctccgctataattcaccggactgtccggtgaagcaccggacagtgtccggtgtgccagcggagcaatggctacttcgcgccaactgtcgactgcaaccgcattaaatgtgctatagtgcgtgccagagtcagagcacgcgcagaaggggcaccggacagtctacaggacctgtccggtgcaccaccggacaacccagaggcctcaccagtcagagctccaacggtcagaacccaacggccggctgacgtggctggcgcaccggactgtccggtgcgccatgcgacagacagcctcccaacggccacttttggtggttggggctataaataccccaaccaccccaccattcattgcatccaagttttcca

SEQ ID NO: 39657 - DNA, 1548 bp, Zea Mays
cctaatcacactaagatgtgtcaacatcctgaaccacccaatctgaataaacaattaactatttaagcatctgccattatacttggggataagaaattcaaacccgtccagctaattactgacagaagcacggatttcccatggatataaaaagtaactaacaattcgagagctcaactcgcacaagctaaaacgtttttcaaaacaacgacgaaaataagctaaaagatccaatcatgttacaaattcgcacccacatagcgccaccagaaggaacaaatgttagccaaccaatcttttcaagaatcctcaccggcacataccgccggcgtctcgtggccgtctcagcctgctgctgctgctccccatcccctcctcccccgttagccccgttcaccggggtccacttaaacaggagaagattattcccgcgggatcctccgccagatcccatccccgtggaggacgtcgtgccaccgttggcgctggtgttggcgttggcggcggcggcggcggcggcggcgaccactggtacccactccttgcgccacttcctgacatggcccgtgaacgtcgtcgccggcccgtagcgcgccgaagtgcgccctagccgcgcgcccacaccctccatgaaaaggaatttacgtgattacggctgtagcgttaatctccggcgagccaagggcgagggtgcgggcgcggttagggccggggtttctggtacacgaattctaagcgagatctacacggaagagaagagaggcgtcatgtgtttgcctcgttgccgttcgctgacagctgggaccgaggtgcagccactgctgggccgtctggcgcgggaccattactagcctatgcaatcggtttttcggttcggttttttcggtatcgtagaagttcggtttacagatagagcagactgatctccgtgtctcacaaaagaaaaccgagctattcggttcggtgttcggtttaaactaaacatccgaaatccatcttagttagctttgtttggctgctcctgtgctatgactgtattcaaaattgaataaacagcagcaaatagccactaaccagcagcacacatgcactgataaccagcagcacaacactcaacaatgaatataagtccacaataactagtagcaagtcacaaattcaataacaaacattacaacaaatttaaatggtccagagtccagacttcaactcttcaagtcatacattacataacttcccattaatgatagtttgagattacagatcacatatttgagcttaaactttgatagcctcatattctccattcaccattcatcattcatcaaattttcatgctcaagaattggtaggggtggttgttgcctccttagaaacagtgaggtcacaaaactttgcagtaatagtaaggagtaaacaaattagtaaaatctgaaatcaataagaacatagtagaaacaattatgaaataaaaactacaaactaatttaccttcctcaagcttggacagttcttctaggttctcttcaacactaatgaaatcatatc

SEQ ID NO: 39658 - DNA, 2066 bp, Zea Mays
gacaaccttctcatccccaaccccgtcagcccgtgcggccgtgccctctgcctcctctgccactcctcgcccaaagcgccagaggcgcagcccgagcccacaggttgcctcctctccctctcctcgtggcctcgtccttctcgttcaagacgaaaccgtacgcgagcgagctggtgagggaggaagagcagggaggtgggatcaggccggctccatggacgccacgctcctcctcctccccgccaactgcacggccgccgccagcgggcggatgcggcctcgactgcctgcaggcccacatgtggcttcccctggtccctccgcgcggccaaggacctccatccgggcctcagccgtgtccgcagccctcgccgttcgtggcctcccgcaacacgcttccgtggccgggggaaccggatatagcatgtctatcacattgaaataagacaacttgcaagtagagggacatcacaacggaagaagagcgcgatgatgagtggaaggtcattttagaacttatggaaggatgggaaggacacggagcgggtgatccacgtttgcacgtgattgtagtgctcattgacaccacatagaaggttgaagacgactagacgagcgtacgattagatacaggctctctactgcttgcttatgactgagctgaccctcatgatgatgctgtgatatttgttgtagaatggagaagtactgattgcttttatgttgttctagaatggagtaaataatgatgatgttgaaaaatatttaactagaaacaaagcactggaagttatagggttggtgatgttatgaccaaaagggaagagctccatgttgtgaaaccaacaacttcagttgatgacgcccttgagatgctggtgaagcataggatctctggctttcctgttattgatgatgactggaatttggttggcgttgtgtcagattatgatttattggcactggatacaatatcaggagctggaccggctgaagcagacatatttcctgaggtggatagcacttggaagacatttcatgagatacagaagcttttgagcaaaaccaacgggaaggttattgctgatgttatgaccccagcgcctctcgtggtgcgtgaaacaactaaccttgaagatgctgcaaggttactccttgtgactaagtaccgcaggcttccagtggtcgatagctcaggcaaactggttgggatcattacaagagggaacgtcgtccaagccgccctcgaaatcaagaaaaaggttgaagggacactctgagatgactacctccaggtatcctttttgctgccacatggggggcttaggacttggacacatctctagttggcaactgatcaatcaaagcgactgtcagagtgagcgatgaaagtcgctatgtttatgaagatttgcccggagaagcacaggtgtatgtgtagtgtttgttatatatgctgatgcagtccttgctggccaaaacacaggttaccgattgttctggtttcctgggcttctttggacaccaaattcttaacctaggtcttgtttgggtgcacacgtatctagttcaacttacttgtattgaggttcattgaagtggaaaatcaactagttttcgcacttcaaaacacatgcactgtagtaaccgagcgcagccaagagattttgaaatttgacacccaatttgcaagcctttcaatatttgacaccactgtcacaatgacatgtaggaccattgtgagttattgacatgtggaccaggatgttaaatcttgaaaggcttgtgaattggatgtcaaatttcaaaatttcatgtcttacatgtgtattatggatagtcgtctggtaggatgcgtactcaaagatgcgccaaaagattatccataatacaaaatttcttgtctcgaggataatcttgaaagactattcaaaatttcttgccaagaggtgttaaatctcgaggcttgtgaattggatgtatagcgctaccccatatgtgatcaacatgaagagaccattgaacatctcctagtacatcgtgtttttgctagatagttttggttt

SEQ ID NO: 39659 - DNA, 1914 bp, Zea Mays
gacaaccttctcatccccaaccccgtcagcccgtgcggccgtgccctctgcctcctctgccactcctcgcccaaagcgccagaggcgcagcccgagcccacaggttgcctcctctccctctcctcgtggcctcgtccttctcgttcaagacgaaaccgtacgcgagcgagctggtgagggaggaagagcagggaggtgggatcaggccggctccatggacgccacgctcctcctcctccccgccaactgcacggccgccgccagcgggcggatgcggcctcgactgcctgcaggcccacatgtggcttcccctggtccctccgcgcggccaaggacctccatccgggcctcagccgtgtccgcagccctcgccgttcgtggcctcccgcaacacgcttccgtggccgggcaaagcactggaagttatagggttggtgatgttatgaccaaaagggaagagctccatgttgtgaaaccaacaacttcagttgatgacggtgccttgtttctcatatgctgcacttgtctgccttactttcgatcagtagaacgtgatcattcaattttacttttttttgcagcccttgagatgctggtgaagcataggatctctggctttcctgttattgatgatgactggaatttggttggcgttgtgtcagattatgatttattggcactggatacaatatcaggagctggaccggctgaagcagacatatttcctgaggtggatagcacttggaaggaatgctggtggggcgggttcttaatgtcactcgcctgctcgccgccgcgcaaaaaaatctttgtggctgttgcagttcagctgctaattgttgcggactgattatgctgagcttgtcaagcccgtaagaaacatttcatgagatacagaagcttttgagcaaaaccaacgggaaggttattgctgatgttatgaccccagcgcctctcgtggtgcgtgaaacaactaaccttgaagatgctgcaaggttactccttgtgactaagtaccgcaggcttccagtggtcgatagctcaggcaaactggttgggatcattacaagagggaacgtcgtccaagccgccctcgaaatcaagaaaaaggttgaagggacactctgagatgactacctccaggtatcctttttgctgccacatggggggcttaggacttggacacatctctagttggcaactgatcaatcaaagcgactgtcagagtgagcgatgaaagtcgctatgtttatgaagatttgcccggagaagcacaggtgtatgtgtagtgtttgttatatatgctgatgcagtccttgctggccaaaacacaggttaccgattgttctggtttcctgggcttctttggacaccaaattcttaacctaggtcttgtttgggtgcacacgtatctagttcaacttacttgtattgaggttcattgaagtggaaaatcaactagttttcgcacttcaaaacacatgcactgtagtaaccgagcgcagccaagagattttgaaatttgacacccaatttgcaagcctttcaatatttgacaccactgtcacaatgacatgtaggaccattgtgagttattgacatgtggaccaggatgttaaatcttgaaaggcttgtgaattggatgtcaaatttcaaaatttcatgtcttacatgtgtattatggatagtcgtctggtaggatgcgtactcaaagatgcgccaaaagattatccataatacaaaatttcttgtctcgaggataatcttgaaagactattcaaaatttcttgccaagaggtgttaaatctcgaggcttgtgaattggatgtatagcgctaccccatatgtgatcaacatgaagagaccattgaacatctcctagtacatcgtgtttttgctagatagttttggttt

SEQ ID NO: 39660 - DNA, 1618 bp, Zea Mays
gacaaccttctcatccccaaccccgtcagcccgtgcggccgtgccctctgcctcctctgccactcctcgcccaaagcgccagaggcgcagcccgagcccacaggttgcctcctctccctctcctcgtggcctcgtccttctcgttcaagacgaaaccgtacgcgagcgagctggtgagggaggaagagcagggaggtgggatcaggccggctccatggacgccacgctcctcctcctccccgccaactgcacggccgccgccagcgggcggatgcggcctcgactgcctgcaggcccacatgtggcttcccctggtccctccgcgcggccaaggacctccatccgggcctcagccgtgtccgcagccctcgccgttcgtggcctcccgcaacacgcttccgtggccgggcaaagcactggaagttatagggttggtgatgttatgaccaaaagggaagagctccatgttgtgaaaccaacaacttcagttgatgacgattatgatttattggcactggatacaatatcaggagctggaccggctgaagcagacatatttcctgaggtggatagcacttggaagacatttcatgagatacagaagcttttgagcaaaaccaacgggaaggttattgctgatgttatgaccccagcgcctctcgtggtgcgtgaaacaactaaccttgaagatgctgcaaggttactccttgtgactaagtaccgcaggcttccagtggtcgatagctcaggcaaactggttgggatcattacaagagggaacgtcgtccaagccgccctcgaaatcaagaaaaaggttgaagggacactctgagatgactacctccaggtatcctttttgctgccacatggggggcttaggacttggacacatctctagttggcaactgatcaatcaaagcgactgtcagagtgagcgatgaaagtcgctatgtttatgaagatttgcccggagaagcacaggtgtatgtgtagtgtttgttatatatgctgatgcagtccttgctggccaaaacacaggttaccgattgttctggtttcctgggcttctttggacaccaaattcttaacctaggtcttgtttgggtgcacacgtatctagttcaacttacttgtattgaggttcattgaagtggaaaatcaactagttttcgcacttcaaaacacatgcactgtagtaaccgagcgcagccaagagattttgaaatttgacacccaatttgcaagcctttcaatatttgacaccactgtcacaatgacatgtaggaccattgtgagttattgacatgtggaccaggatgttaaatcttgaaaggcttgtgaattggatgtcaaatttcaaaatttcatgtcttacatgtgtattatggatagtcgtctggtaggatgcgtactcaaagatgcgccaaaagattatccataatacaaaatttcttgtctcgaggataatcttgaaagactattcaaaatttcttgccaagaggtgttaaatctcgaggcttgtgaattggatgtatagcgctaccccatatgtgatcaacatgaagagaccattgaacatctcctagtacatcgtgtttttgctagatagttttggttt

SEQ ID NO: 39661 - DNA, 1689 bp, Zea Mays
gacaaccttctcatccccaaccccgtcagcccgtgcggccgtgccctctgcctcctctgccactcctcgcccaaagcgccagaggcgcagcccgagcccacaggttgcctcctctccctctcctcgtggcctcgtccttctcgttcaagacgaaaccgtacgcgagcgagctggtgagggaggaagagcagggaggtgggatcaggccggctccatggacgccacgctcctcctcctccccgccaactgcacggccgccgccagcgggcggatgcggcctcgactgcctgcaggcccacatgtggcttcccctggtccctccgcgcggccaaggacctccatccgggcctcagccgtgtccgcagccctcgccgttcgtggcctcccgcaacacgcttccgtggccgggcaaagcactggaagttatagggttggtgatgttatgaccaaaagggaagagctccatgttgtgaaaccaacaacttcacccttgagatgctggtgaagcataggatctctggctttcctgttattgatgatgactggaatttggttggcgttgtgtcagattatgatttattggcactggatacaatatcaggagctggaccggctgaagcagacatatttcctgaggtggatagcacttggaagacatttcatgagatacagaagcttttgagcaaaaccaacgggaaggttattgctgatgttatgaccccagcgcctctcgtggtgcgtgaaacaactaaccttgaagatgctgcaaggttactccttgtgactaagtaccgcaggcttccagtggtcgatagctcaggcaaactggttgggatcattacaagagggaacgtcgtccaagccgccctcgaaatcaagaaaaaggttgaagggacactctgagatgactacctccaggtatcctttttgctgccacatggggggcttaggacttggacacatctctagttggcaactgatcaatcaaagcgactgtcagagtgagcgatgaaagtcgctatgtttatgaagatttgcccggagaagcacaggtgtatgtgtagtgtttgttatatatgctgatgcagtccttgctggccaaaacacaggttaccgattgttctggtttcctgggcttctttggacaccaaattcttaacctaggtcttgtttgggtgcacacgtatctagttcaacttacttgtattgaggttcattgaagtggaaaatcaactagttttcgcacttcaaaacacatgcactgtagtaaccgagcgcagccaagagattttgaaatttgacacccaatttgcaagcctttcaatatttgacaccactgtcacaatgacatgtaggaccattgtgagttattgacatgtggaccaggatgttaaatcttgaaaggcttgtgaattggatgtcaaatttcaaaatttcatgtcttacatgtgtattatggatagtcgtctggtaggatgcgtactcaaagatgcgccaaaagattatccataatacaaaatttcttgtctcgaggataatcttgaaagactattcaaaatttcttgccaagaggtgttaaatctcgaggcttgtgaattggatgtatagcgctaccccatatgtgatcaacatgaagagaccattgaacatctcctagtacatcgtgtttttgctagatagttttggttt

SEQ ID NO: 39662 - DNA, 1919 bp, Zea Mays
gacaaccttctcatccccaaccccgtcagcccgtgcggccgtgccctctgcctcctctgccactcctcgcccaaagcgccagaggcgcagcccgagcccacaggttgcctcctctccctctcctcgtggcctcgtccttctcgttcaagacgaaaccgtacgcgagcgagctggtgagggaggaagagcagggaggtgggatcaggccggctccatggacgccacgctcctcctcctccccgccaactgcacggccgccgccagcgggcggatgcggcctcgactgcctgcaggcccacatgtggcttcccctggtccctccgcgcggccaaggacctccatccgggcctcagccgtgtccgcagccctcgccgttcgtggcctcccgcaacacgcttccgtggccgggcaaagcactggaagttatagggttggtgatgttatgaccaaaagggaagagctccatgttgtgaaaccaacaacttcagttgatgacgcccttgagatgctggtgaagcataggatctctggctttcctgttattgatgatgactggaatttggttggcgttgtgtcagattatgatttattggcactggatacaatatcaggagctggaccggctgaagcagacatatttcctgaggtggatagcacttggaaggaatgctggtggggcgggttcttaatgtcactcgcctgctcgccgccgcgcaaaaaaatctttgtggctgttgcagttcagctgctaattgttgcggactgattatgctgagcttgtcaagcccgtaagaagtactaccactgctgctgtcgctgtcatgttcctctcccaaaacctatcgctactgcaactgcccctggcagccctcccagccctgtagacatttcatgagatacagaagcttttgagcaaaaccaacgggaaggttattgctgatgttatgaccccagcgcctctcgtggtgcgtgaaacaactaaccttgaagatgctgcaaggttactccttgtgactaagtaccgcaggcttccagtggtcgatagctcaggcaaactggttgggatcattacaagagggaacgtcgtccaagccgccctcgaaatcaagaaaaaggttgaagggacactctgagatgactacctccaggtatcctttttgctgccacatggggggcttaggacttggacacatctctagttggcaactgatcaatcaaagcgactgtcagagtgagcgatgaaagtcgctatgtttatgaagatttgcccggagaagcacaggtgtatgtgtagtgtttgttatatatgctgatgcagtccttgctggccaaaacacaggttaccgattgttctggtttcctgggcttctttggacaccaaattcttaacctaggtcttgtttgggtgcacacgtatctagttcaacttacttgtattgaggttcattgaagtggaaaatcaactagttttcgcacttcaaaacacatgcactgtagtaaccgagcgcagccaagagattttgaaatttgacacccaatttgcaagcctttcaatatttgacaccactgtcacaatgacatgtaggaccattgtgagttattgacatgtggaccaggatgttaaatcttgaaaggcttgtgaattggatgtcaaatttcaaaatttcatgtcttacatgtgtattatggatagtcgtctggtaggatgcgtactcaaagatgcgccaaaagattatccataatacaaaatttcttgtctcgaggataatcttgaaagactattcaaaatttcttgccaagaggtgttaaatctcgaggcttgtgaattggatgtatagcgctaccccatatgtgatcaacatgaagagaccattgaacatctcctagtacatcgtgtttttgctagatagttttggttt

SEQ ID NO: 39663 - DNA, 1915 bp, Zea Mays
gacaaccttctcatccccaaccccgtcagcccgtgcggccgtgccctctgcctcctctgccactcctcgcccaaagcgccagaggcgcagcccgagcccacaggttgcctcctctccctctcctcgtggcctcgtccttctcgttcaagacgaaaccgtacgcgagcgagctggtgagggaggaagagcagggaggtgggatcaggccggctccatggacgccacgctcctcctcctccccgccaactgcacggccgccgccagcgggcggatgcggcctcgactgcctgcaggcccacatgtggcttcccctggtccctccgcgcggccaaggacctccatccgggcctcagccgtgtccgcagccctcgccgttcgtggcctcccgcaacacgcttccgtggccgggcaaagcactggaagttatagggttggtgatgttatgaccaaaagggaagagctccatgttgtgaaaccaacaacttcagttgatgacgcccttgagatgctggtgaagcataggatctctggctttcctgttattgatgatgactggaatttggttggcgttgtgtcagattatgatttattggcactggatacaatatcaggagctggaccggctgaagcagacatatttcctgaggtggatagcacttggaaggaatgctggtggggcgggttcttaatgtcactcgcctgctcgccgccgcgcaaaaaaatctttgtggctgttgcagttcagctgctaattgttgcggactgattatgctgagcttgtcaagcccgtaagaagtactaccactgctgctgtcgctgtcatgttcctctcccaaaacctatcgctactgcaactgcccctggcagccctcccagccctacatttcatgagatacagaagcttttgagcaaaaccaacgggaaggttattgctgatgttatgaccccagcgcctctcgtggtgcgtgaaacaactaaccttgaagatgctgcaaggttactccttgtgactaagtaccgcaggcttccagtggtcgatagctcaggcaaactggttgggatcattacaagagggaacgtcgtccaagccgccctcgaaatcaagaaaaaggttgaagggacactctgagatgactacctccaggtatcctttttgctgccacatggggggcttaggacttggacacatctctagttggcaactgatcaatcaaagcgactgtcagagtgagcgatgaaagtcgctatgtttatgaagatttgcccggagaagcacaggtgtatgtgtagtgtttgttatatatgctgatgcagtccttgctggccaaaacacaggttaccgattgttctggtttcctgggcttctttggacaccaaattcttaacctaggtcttgtttgggtgcacacgtatctagttcaacttacttgtattgaggttcattgaagtggaaaatcaactagttttcgcacttcaaaacacatgcactgtagtaaccgagcgcagccaagagattttgaaatttgacacccaatttgcaagcctttcaatatttgacaccactgtcacaatgacatgtaggaccattgtgagttattgacatgtggaccaggatgttaaatcttgaaaggcttgtgaattggatgtcaaatttcaaaatttcatgtcttacatgtgtattatggatagtcgtctggtaggatgcgtactcaaagatgcgccaaaagattatccataatacaaaatttcttgtctcgaggataatcttgaaagactattcaaaatttcttgccaagaggtgttaaatctcgaggcttgtgaattggatgtatagcgctaccccatatgtgatcaacatgaagagaccattgaacatctcctagtacatcgtgtttttgctagatagttttggttt

SEQ ID NO: 39664 - DNA, 3086 bp, Zea Mays
atcaaatcaaggcaaattaaacgaaaggagagcaggggaccaggccagcacggcgcggcggcctttattccggacgaagcggggcaggcccacggcgtgagctgctacaggttattgccaaaccaaagacaggtaggcccctgcccagaaccggaagaccaacaacaacaaccaaatgggcaaatggcagagtggcaggcaaggcaggcggggcttttgcacaaaccccctccgatgtcgggcggaaacgccaaggagcagaaccttctcctgcccggttgcccgccgtcgtcgcgacgtcgagcgtataattagcaggcgcagcgcgacggggcaacggccgacgacgaggaatagactataggacacgctgtcgccctcttgcaacccccccttccatgccccttggcccagcaaccccgcccccgaccccgacccaagataaaggccctcctcctcccctcgtcgtcgcgcttgcgtgcgcgcttggccggaggctggctgggaggaggatctgactccgagccgcgtcgccgtgctgggcgctgcggcgagggatcgggggccgacccgcctcccgccaccgctcggaactcgatcgtcctggaggagctgtacctgtagacttccagtcctctgcaacctacaaaatgtcagtgcgtcgtcggtcaaccagcatggaagggctgctcacgcttgatgactggaaagaacggagatcagatgtggacaactcagaggacgagcgaaggcggctatccatagggtcactgaagaaaaaggcattgaatgcatcaaacaagctcacacattcactcaagaagaggggaaaaagaaaggtggagcatcgggcatcgtccttcacaatcgaagatgttagggatgagcaagaggagcgagccgtcttcaccttccagcaaaaacttctggacatgaacttgctgcctgacaaacacaacgattatcactcgttgctgaggtttttgaaggctagaaaatttgacacagagaaagcgatccatatgtgggctgagatgctccagtggaggaaagaatctggagcagatacaatactagaggacttcagttttgaagagctagatgatgtgctatgctattatcctcagggctaccatggagttgacaggcagggaagaccagtatacattgagagattagggaaagtggaaccaaataaattgatgcacattactacagttgatcgctacatgaagtatcacgtgcaagagtttgagagagccttcagggacaggtttcctgcatgctctgttgcagcaaaaaggcatattgattctacaactactatactagatgtcgatggcgtgggtctcaagaacttcagcaaaacagcaagagatatgttaagtagaatgcagaagattgacagtgactattatccagagacgctgcatcagatgtttgttgtgaatgctggtagtggtttcaagctactatggagttctgtgaaaggctttcttgaccctaaaactgcctcgaagatacatgttttgggaacaaagtttcagaacaagcttcttgaagtaatagatgcaagtcaacttcctgaatttttgggggggacatgcacttgtgctgctgtgggaggatgtatgaggtctaacaaaggtccatggaatgatccagatattatgaagcttgcacataataaggaagcaaagtttacaagacataccagacgtttatccgagattgagcaagggcggagttcatttgctaggttacatcttttgaagggtagaaacagtgacacgtcaactgtggagtcaggatctgaaattgatgatcttggtgctccgatcatgagaagcacagtggggtgtagtcgattggccccagttcgcgaagagatgagagcacgagactctgcagcttattacagctgtgacgatcactttgttgtggtggacaaaacagttgactatggtcgaggaggatcaccgtcagataaaagcagtgcttcagaagtaagaactcatgttcggccactggatgctagcacagcagcccacgtggcaggtccctcaagtaacaggcgagctacagttgtgcctgaagaggtttcagatgaaggagtgttccgtcgctttgtcagactacttctggccttcattgtcaaagtctttgccttctttcacatagtacgtagtcagcaggaaacgagggtcaacaacctactacctcctgccgaaccagaactgatttctgacgatcatccggcagtagagactttcaatgtagaccacatcagtcctgtcatagagcgccttcagagacttgaagggaaggtcgatgagcttggcagcaagcctccagcgattcctgtggagaaagaacgatccctcttggagtcatgggataggataaaatgcatcgaatctgacctggagcgaacaaagaaggtgctgcaagccactgtgaggaagcaactggaaagcgctgagtccctagaggaagtgattagatcaagcctacctagacgaagattttgtttataacaaggaaccagtactgctgaaatcaagatacatcctgtcgcggagaaaaatatgcacaggaattcgattggtgatgtgatgaaggccgtgcattcagttgtccacattactggcagaaaagatggtgaccacggatagtgaaaaacacggtccacttatttatttttttcttgtgaccctaagaggcctgtgcatttttcatgttaacagaggatgttaggatggatggcattgcaagggctagaaaaataggagatagaaatgtggaaagtggggtggtacccgaacaactgaacaagtgcgcatattgtgatatacaggtccgcgtctatgttatctttgcaaagaattgtgcgatattactaatgttagggaaggggataaaatagacacaaatatttacgtgaaataatctcctccaatattaagaagcaaacaaccacgaggaaacagatttactatttatcgtcgagtacaagttacagggaggtcctatatttataggcgtatagaaaaaaatatttcaaaacatattctaaatatataaaa

SEQ ID NO: 39665 - DNA, 3092 bp, Zea Mays
atcaaatcaaggcaaattaaacgaaaggagagcaggggaccaggccagcacggcgcggcggcctttattccggacgaagcggggcaggcccacggcgtgagctgctacaggttattgccaaaccaaagacaggtaggcccctgcccagaaccggaagaccaacaacaacaaccaaatgggcaaatggcagagtggcaggcaaggcaggcggggcttttgcacaaaccccctccgatgtcgggcggaaacgccaaggagcagaaccttctcctgcccggttgcccgccgtcgtcgcgacgtcgagcgtataattagcaggcgcagcgcgacggggcaacggccgacgacgaggaatagactataggacacgctgtcgccctcttgcaacccccccttccatgccccttggcccagcaaccccgcccccgaccccgacccaagataaaggccctcctcctcccctcgtcgtcgcgcttgcgtgcgcgcttggccggaggctggctgggaggaggatctgactccgagccgcgtcgccgtgctgggcgctgcggcgagggatcgggggccgacccgcctcccgccaccgctcggaactcgatcgtcctggaggagctgtacctgtagacttccagtcctctgcaacctacaaaatgtcagtgcgtcgtcggtcaaccagcatggaagggctgctcacgcttgatgactggaaagaacggagatcagatgtggacaactcagaggacgagcgaaggcggctatccatagggtcactgaagaaaaaggcattgaatgcatcaaacaagctcacacattcactcaagaagaggggaaaaagaaaggtggagcatcgggcatcgtccttcacaatcgaagatgttagggatgagcaagaggagcgagccgtcttcaccttccagcaaaaacttctggacatgaacttgctgcctgacaaacacaacgattatcactcgttgctgaggtttttgaaggctagaaaatttgacacagagaaagcgatccatatgtgggctgagatgctccagtggaggaaagaatctggagcagatacaatactagaggacttcagttttgaagagctagatgatgtgctatgctattatcctcagggctaccatggagttgacaggcagggaagaccagtatacattgagagattagggaaagtggaaccaaataaattgatgcacattactacagttgatcgctacatgaagtatcacgtgcaagagtttgagagagccttcagggacaggtttcctgcatgctctgttgcagcaaaaaggcatattgattctacaactactatactagatgtcgatggcgtgggtctcaagaacttcagcaaaacagcaagagatatgttaagtagaatgcagaagattgacagtgactattatccagagacgctgcatcagatgtttgttgtgaatgctggtagtggtttcaagctactatggagttctgtgaaaggctttcttgaccctaaaactgcctcgaagatacatgttttgggaacaaagtttcagaacaagcttcttgaagtaatagatgcaagtcaacttcctgaatttttgggggggacatgcacttgtgctgctgtgggaggatgtatgaggtctaacaaaggtccatggaatgatccagatattatgaagcttgcacataataaggaagcaaagtttacaagacataccagacgtttatccgagattgagcaagggcggagttcatttgctaggttacatcttttgaagggtagaaacagtgacacgtcaactgtggagtcaggatctgaaattgatgatcttggtgctccgatcatgagaagcacagtggggtgtagtcgattggccccagttcgcgaagagatgcagatgagagcacgagactctgcagcttattacagctgtgacgatcactttgttgtggtggacaaaacagttgactatggtcgaggaggatcaccgtcagataaaagcagtgcttcagaagtaagaactcatgttcggccactggatgctagcacagcagcccacgtggcaggtccctcaagtaacaggcgagctacagttgtgcctgaagaggtttcagatgaaggagtgttccgtcgctttgtcagactacttctggccttcattgtcaaagtctttgccttctttcacatagtacgtagtcagcaggaaacgagggtcaacaacctactacctcctgccgaaccagaactgatttctgacgatcatccggcagtagagactttcaatgtagaccacatcagtcctgtcatagagcgccttcagagacttgaagggaaggtcgatgagcttggcagcaagcctccagcgattcctgtggagaaagaacgatccctcttggagtcatgggataggataaaatgcatcgaatctgacctggagcgaacaaagaaggtgctgcaagccactgtgaggaagcaactggaaagcgctgagtccctagaggaagtgattagatcaagcctacctagacgaagattttgtttataacaaggaaccagtactgctgaaatcaagatacatcctgtcgcggagaaaaatatgcacaggaattcgattggtgatgtgatgaaggccgtgcattcagttgtccacattactggcagaaaagatggtgaccacggatagtgaaaaacacggtccacttatttatttttttcttgtgaccctaagaggcctgtgcatttttcatgttaacagaggatgttaggatggatggcattgcaagggctagaaaaataggagatagaaatgtggaaagtggggtggtacccgaacaactgaacaagtgcgcatattgtgatatacaggtccgcgtctatgttatctttgcaaagaattgtgcgatattactaatgttagggaaggggataaaatagacacaaatatttacgtgaaataatctcctccaatattaagaagcaaacaaccacgaggaaacagatttactatttatcgtcgagtacaagttacagggaggtcctatatttataggcgtatagaaaaaaatatttcaaaacatattctaaatatataaaa

SEQ ID NO: 39666 - DNA, 2888 bp, Zea Mays
cacaaaccccctccgatgtcgggcggaaacgccaaggagcagaaccttctcctgcccggttgcccgccgtcgtcgcgacgtcgagcgtataattagcaggcgcagcgcgacggggcaacggccgacgacgaggaatagactataggacacgctgtcgccctcttgcaacccccccttccatgccccttggcccagcaaccccgcccccgaccccgacccaagataaaggccctcctcctcccctcgtcgtcgcgcttgcgtgcgcgcttggccggaggctggctgggaggaggatctgactccgagccgcgtcgccgtgctgggcgctgcggcgagggatcgggggccgacccgcctcccgccaccgctcggaactcgatcgtcctggaggagctgtacctgtagacttccagtcctctgcaacctacaaaatgtcagtgcgtcgtcggtcaaccagcatggaagggctgctcacgcttgatgactggaaagaacggagatcagatgtggacaactcagaggacgagcgaaggcggctatccatagggtcactgaagaaaaaggcattgaatgcatcaaacaagctcacacattcactcaagaagaggggaaaaagaaaggtggagcatcgggcatcgtccttcacaatcgaagatgttagggatgagcaagaggagcgagccgtcttcaccttccagcaaaaacttctggacatgaacttgctgcctgacaaacacaacgattatcactcgttgctgaggtttttgaaggctagaaaatttgacacagagaaagcgatccatatgtgggctgagatgctccagtggaggaaagaatctggagcagatacaatactagaggacttcagttttgaagagctagatgatgtgctatgctattatcctcagggctaccatggagttgacaggcagggaagaccagtatacattgagagattagggaaagtggaaccaaataaattgatgcacattactacagttgatcgctacatgaagtatcacgtgcaagagtttgagagagccttcagggacaggtttcctgcatgctctgttgcagcaaaaaggcatattgattctacaactactatactagatgtcgatggcgtgggtctcaagaacttcagcaaaacagcaagagatatgttaagtagaatgcagaagattgacagtgactattatccagagacgctgcatcagatgtttgttgtgaatgctggtagtggtttcaagctactatggagttctgtgaaaggctttcttgaccctaaaactgcctcgaagatacatgttttgggaacaaagtttcagaacaagcttcttgaagtaatagatgcaagtcaacttcctgaatttttgggggggacatgcacttgtgctgctgtgggaggatgtatgaggtctaacaaaggtccatggaatgatccagatattatgaagcttgcacataataaggaagcaaagtttacaagacataccagacgtttatccgagattgagcaagggcggagttcatttgctaggttacatcttttgaagggtagaaacagtgacacgtcaactgtggagtcaggatctgaaattgatgatcttggtgctccgatcatgagaagcacagtggggtgtagtcgattggccccagttcgcgaagagatgcagatgagagcacgagactctgcagcttattacagctgtgacgatcactttgttgtggtggacaaaacagttgactatggtcgaggaggatcaccgtcagataaaagcagtgcttcagaagtaagaactcatgttcggccactggatgctagcacagcagcccacgtggcaggtccctcaagtaacaggcgagctacagttgtgcctgaagaggtttcagatgaaggagtgttccgtcgctttgtcagactacttctggccttcattgtcaaagtctttgccttctttcacatagtacgtagtcagcaggaaacgagggtcaacaacctactacctcctgccgaaccagaactgatttctgacgatcatccggcagtagagactttcaatgtagaccacatcagtcctgtcatagagcgccttcagagacttgaagggaaggtcgatgagcttggcagcaagcctccagcgattcctgtggagaaagaacgatccctcttggagtcatgggataggataaaatgcatcgaatctgacctggagcgaacaaagaaggtaagtttccatcaagtgctgcaagccactgtgaggaagcaactggaaagcgctgagtccctagaggaagtgattagatcaagcctacctagacgaagattttgtttataacaaggaaccagtactgctgaaatcaagatacatcctgtcgcggagaaaaatatgcacaggaattcgattggtgatgtgatgaaggccgtgcattcagttgtccacattactggcagaaaagatggtgaccacggatagtgaaaaacacggtccacttatttatttttttcttgtgaccctaagaggcctgtgcatttttcatgttaacagaggatgttaggatggatggcattgcaagggctagaaaaataggagatagaaatgtggaaagtggggtggtacccgaacaactgaacaagtgcgcatattgtgatatacaggtccgcgtctatgttatctttgcaaagaattgtgcgatattactaatgttagggaaggggataaaatagacacaaatatttacgtgaaataatctcctccaatattaagaagcaaacaaccacgaggaaacagatttactatttatcgtcgagtacaagttacagggaggtcctatatttataggcgtatagaaaaaaatatttcaaaacatattctaaatatataaaa

SEQ ID NO: 39667 - DNA, 2863 bp, Zea Mays
cacaaaccccctccgatgtcgggcggaaacgccaaggagcagaaccttctcctgcccggttgcccgccgtcgtcgcgacgtcgagcgtataattagcaggcgcagcgcgacggggcaacggccgacgacgaggaatagactataggacacgctgtcgccctcttgcaacccccccttccatgccccttggcccagcaaccccgcccccgaccccgacccaagataaaggccctcctcctcccctcgtcgtcgcgcttgcgtgcgcgcttggccggaggctggctgggaggaggatctgactccgagccgcgtcgccgtgctgggcgctgcggcgagggatcgggggccgacccgcctcccgccaccgctcggaactcgatcgtcctggaggagctgtacctgtagacttccagtcctctgcaacctacaaaatgtcagtgcgtcgtcggtcaaccagcatggaagggctgctcacgcttgatgactggaaagaacggagatcagatgtggacaactcagaggacgagcgaaggcggctatccatagggtcactgaagaaaaaggcattgaatgcatcaaacaagctcacacattcactcaagaagaggggaaaaagaaaggtggagcatcgggcatcgtccttcacaatcgaagatgttagggatgagcaagaggagcgagccgtcttcaccttccagcaaaaacttctggacatgaacttgctgcctgacaaacacaacgattatcactcgttgctgaggtttttgaaggctagaaaatttgacacagagaaagcgatccatatgtgggctgagatgctccagtggaggaaagaatctggagcagatacaatactagaggacttcagttttgaagagctagatgatgtgctatgctattatcctcagggctaccatggagttgacaggcagggaagaccagtatacattgagagattagggaaagtggaaccaaataaattgatgcacattactacagttgatcgctacatgaagtatcacgtgcaagagtttgagagagccttcagggacaggtttcctgcatgctctgttgcagcaaaaaggcatattgattctacaactactatactagatgtcgatggcgtgggtctcaagaacttcagcaaaacagcaagagatatgttaagtagaatgcagaagattgacagtgactattatccagagacgctgcatcagatgtttgttgtgaatgctggtagtggtttcaagctactatggagttctgtgaaaggctttcttgaccctaaaactgcctcgaagatacatgttttgggaacaaagtttcagaacaagcttcttgaagtaatagatgcaagtcaacttcctgaatttttgggggggacatgcacttgtgctgctgtgggaggatgtatgaggtctaacaaaggtccatggaatgatccagatattatgaagcttgcacataataaggaagcaaagtttacaagacataccagacgtttatccgagattgagcaagggcggagttcatttgctaggttacatcttttgaagggtagaaacagtgacacgtcaactgtggagtcaggatctgaaattgatgatcttggtgctccgatcatgagaagcacagtggggtgtagtcgattggccccagttcgcgaagagatgcagatgagagcacgagactctgcagcttattacagctgtgacgatcactttgttgtggtggacaaaacagttgactatggtcgaggaggatcaccgtcagataaaagcagtgcttcagaagtaagaactcatgttcggccactggatgctagcacagcagcccacgtggcaggtccctcaagtaacaggcgagctacagttgtgcctgaagaggtttcagatgaaggagtgttccgtcgctttgtcagactacttctggccttcattgtcaaagtctttgccttctttcacatagtacgtagtcagcaggaaacgagggtcaacaacctactacctcctgccgaaccagaactgatttctgacgatcatccggcagtagagactttcaatgtagaccacatcagtcctgtcatagagcgccttcagagacttgaagggaaggtcgatgagcttggcagcaagcctccagcgattcctgtggagaaagaacgatccctcttggagtcatgggataggataaaatgcatcgaatctgacctggagcgaacaaagaagccactgtgaggaagcaactggaaagcgctgagtccctagaggaagtgattagatcaagcctacctagacgaagattttgtttataacaaggaaccagtactgctgaaatcaagatacatcctgtcgcggagaaaaatatgcacaggaattcgattggtgatgtgatgaaggccgtgcattcagttgtccacattactggcagaaaagatggtgaccacggatagtgaaaaacacggtccacttatttatttttttcttgtgaccctaagaggcctgtgcatttttcatgttaacagaggatgttaggatggatggcattgcaagggctagaaaaataggagatagaaatgtggaaagtggggtggtacccgaacaactgaacaagtgcgcatattgtgatatacaggtccgcgtctatgttatctttgcaaagaattgtgcgatattactaatgttagggaaggggataaaatagacacaaatatttacgtgaaataatctcctccaatattaagaagcaaacaaccacgaggaaacagatttactatttatcgtcgagtacaagttacagggaggtcctatatttataggcgtatagaaaaaaatatttcaaaacatattctaaatatataaaa

SEQ ID NO: 39668 - DNA, 3269 bp, Zea Mays
cacaaaccccctccgatgtcgggcggaaacgccaaggagcagaaccttctcctgcccggttgcccgccgtcgtcgcgacgtcgagcgtataattagcaggcgcagcgcgacggggcaacggccgacgacgaggaatagactataggacacgctgtcgccctcttgcaacccccccttccatgccccttggcccagcaaccccgcccccgaccccgacccaagataaaggccctcctcctcccctcgtcgtcgcgcttgcgtgcgcgcttggccggaggctggctgggaggaggatctgactccgagccgcgtcgccgtgctgggcgctgcggcgagggatcgggggccgacccgcctcccgccaccgctcggaactcgatcgtcctggaggagctgtacctgtagacttccagtcctctgcaacctacaaaatgtcagtgcgtcgtcggtcaaccagcatggaagggctgctcacgcttgatgactggaaagaacggagatcagatgtggacaactcagaggacgagcgaaggcggctatccatagggtcactgaagaaaaaggcattgaatgcatcaaacaagctcacacattcactcaagaagaggggaaaaagaaaggtggagcatcgggcatcgtccttcacaatcgaagatgttagggatgagcaagaggagcgagccgtcttcaccttccagcaaaaacttctggacatgaacttgctgcctgacaaacacaacgattatcactcgttgctgaggtttttgaaggctagaaaatttgacacagagaaagcgatccatatgtgggctgagatgctccagtggaggaaagaatctggagcagatacaatactagaggacttcagttttgaagagctagatgatgtgctatgctattatcctcagggctaccatggagttgacaggcagggaagaccagtatacattgagagattagggaaagtggaaccaaataaattgatgcacattactacagttgatcgctacatgaagtatcacgtgcaagagtttgagagagccttcagggacaggtttcctgcatgctctgttgcagcaaaaaggcatattgattctacaactactatactagatgtcgatggcgtgggtctcaagaacttcagcaaaacagcaagagatatgttaagtagaatgcagaagattgacagtgactattatccagagacgctgcatcagatgtttgttgtgaatgctggtagtggtttcaagctactatggagttctgtgaaaggctttcttgaccctaaaactgcctcgaagatacatgttttgggaacaaagtttcagaacaagcttcttgaagtaatagatgcaagtcaacttcctgaatttttgggggggacatgcacttgtgctgctgtgggaggatgtatgaggtctaacaaaggtccatggaatgatccagatattatgaagcttgcacataataaggaagcaaagtttacaagacataccagacgtttatccgagattgagcaagggcggagttcatttgctaggttacatcttttgaagggtagaaacagtgacacgtcaactgtggagtcaggatctgaaattgatgatcttggtgctccgatcatgagaagcacagtggggtgtagtcgattggccccagttcgcgaagagatgcagatgagagcacgagactctgcagcttattacagctgtgacgatcactttgttgtggtggacaaaacagttgactatggtcgaggaggatcaccgtcagataaaagcagtgcttcagaagtaagaactcatgttcggccactggatgctagcacagcagcccacgtggcaggtccctcaagtaacaggcgagctacagttgtgcctgaagaggtttcagatgaaggagtgttccgtcgctttgtcagactacttctggccttcattgtcaaagtctttgccttctttcacatagtacgtagtcagcaggaaacgagggtcaacaacctactacctcctgccgaaccagaactgatttctgacgatcatccggcagtagagactttcaatgtagaccacatcagtcctgtcatagagcgccttcagagacttgaagggaaggtcgatgagcttggcagcaagcctccagcgattcctgtggagaaagaacgatccctcttggagtcatgggataggataaaatgcatcgaatctgacctggagcgaacaaagaaggtaagtttccatcaagtatgtcagtttatctccatttgtacctggtgattccattagtactaagaatccatacaaaaattagagaatatttacaaattaaaattcctaattaaatgtaaaacggtgctatagcatcaattttactagattgttagacatggcagaagcggaaataaaggcatttgaaatgttgaaacgcaagtgttgaaacatttctgtacacaacgcaactaaaaccatcttgttttaaataaaagataaaatgaagtggcgggaatatatcattctcatgcatccgtgagaacagatgattgaagactgttcagagaaatcgctatctaaacttgctgccaatgtcaagcgaaaataaggaaaaaaaaacttattttttgtcaggtgctgcaagccactgtgaggaagcaactggaaagcgctgagtccctagaggaagtgattagatcaagcctacctagacgaagattttgtttataacaaggaaccagtactgctgaaatcaagatacatcctgtcgcggagaaaaatatgcacaggaattcgattggtgatgtgatgaaggccgtgcattcagttgtccacattactggcagaaaagatggtgaccacggatagtgaaaaacacggtccacttatttatttttttcttgtgaccctaagaggcctgtgcatttttcatgttaacagaggatgttaggatggatggcattgcaagggctagaaaaataggagatagaaatgtggaaagtggggtggtacccgaacaactgaacaagtgcgcatattgtgatatacaggtccgcgtctatgttatctttgcaaagaattgtgcgatattactaatgttagggaaggggataaaatagacacaaatatttacgtgaaataatctcctccaatattaagaagcaaacaaccacgaggaaacagatttactatttatcgtcgagtacaagttacagggaggtcctatatttataggcgtatagaaaaaaatatttcaaaacatattctaaatatataaaa

SEQ ID NO: 39669 - DNA, 2409 bp, Zea Mays
cttccattctctcattatttctgaagtgcgtcgtcggtcaaccagcatggaagggctgctcacgcttgatgactggaaagaacggagatcagatgtggacaactcagaggacgagcgaaggcggctatccatagggtcactgaagaaaaaggcattgaatgcatcaaacaagctcacacattcactcaagaagaggggaaaaagaaaggtggagcatcgggcatcgtccttcacaatcgaagatgttagggatgagcaagaggagcgagccgtcttcaccttccagcaaaaacttctggacatgaacttgctgcctgacaaacacaacgattatcactcgttgctgaggtttttgaaggctagaaaatttgacacagagaaagcgatccatatgtgggctgagatgctccagtggaggaaagaatctggagcagatacaatactagaggacttcagttttgaagagctagatgatgtgctatgctattatcctcagggctaccatggagttgacaggcagggaagaccagtatacattgagagattagggaaagtggaaccaaataaattgatgcacattactacagttgatcgctacatgaagtatcacgtgcaagagtttgagagagccttcagggacaggtttcctgcatgctctgttgcagcaaaaaggcatattgattctacaactactatactagatgtcgatggcgtgggtctcaagaacttcagcaaaacagcaagagatatgttaagtagaatgcagaagattgacagtgactattatccagagacgctgcatcagatgtttgttgtgaatgctggtagtggtttcaagctactatggagttctgtgaaaggctttcttgaccctaaaactgcctcgaagatacatgttttgggaacaaagtttcagaacaagcttcttgaagtaatagatgcaagtcaacttcctgaatttttgggggggacatgcacttgtgctgctgtgggaggatgtatgaggtctaacaaaggtccatggaatgatccagatattatgaagcttgcacataataaggaagcaaagtttacaagacataccagacgtttatccgagattgagcaagggcggagttcatttgctaggttacatcttttgaagggtagaaacagtgacacgtcaactgtggagtcaggatctgaaattgatgatcttggtgctccgatcatgagaagcacagtggggtgtagtcgattggccccagttcgcgaagagatgcagatgagagcacgagactctgcagcttattacagctgtgacgatcactttgttgtggtggacaaaacagttgactatggtcgaggaggatcaccgtcagataaaagcagtgcttcagaagtccctcaagtaacaggcgagctacagttgtgcctgaagaggtttcagatgaaggagtgttccgtcgctttgtcagactacttctggccttcattgtcaaagtctttgccttctttcacatagtacgtagtcagcaggaaacgagggtcaacaacctactacctcctgccgaaccagaactgatttctgacgatcatccggcagtagagactttcaatgtagaccacatcagtcctgtcatagagcgccttcagagacttgaagggaaggtcgatgagcttggcagcaagcctccagcgattcctgtggagaaagaacgatccctcttggagtcatgggataggataaaatgcatcgaatctgacctggagcgaacaaagaaggtgctgcaagccactgtgaggaagcaactggaaagcgctgagtccctagaggaagtgattagatcaagcctacctagacgaagattttgtttataacaaggaaccagtactgctgaaatcaagatacatcctgtcgcggagaaaaatatgcacaggaattcgattggtgatgtgatgaaggccgtgcattcagttgtccacattactggcagaaaagatggtgaccacggatagtgaaaaacacggtccacttatttatttttttcttgtgaccctaagaggcctgtgcatttttcatgttaacagaggatgttaggatggatggcattgcaagggctagaaaaataggagatagaaatgtggaaagtggggtggtacccgaacaactgaacaagtgcgcatattgtgatatacaggtccgcgtctatgttatctttgcaaagaattgtgcgatattactaatgttagggaaggggataaaatagacacaaatatttacgtgaaataatctcctccaatattaagaagcaaacaaccacgaggaaacagatttactatttatcgtcgagtacaagttacagggaggtcctatatttataggcgtatagaaaaaaatatttcaaaacatattctaaatatataaaa

SEQ ID NO: 39670 - DNA, 1141 bp, Zea Mays
ccaatattgaacaaacgccggtggtgcaatggtaatcaaggagtaaaaacagagactcaagttttcaattagaggatacccctagttgcaatcaacaagcaacaaacgttgcaactggagcaacaaaaaagactcaagtttgcaattagcggatacacctagttgcaatcaacaagcaacaaacgttgcaactggagtaacaacacacaatggttgaagtcattcataattgtagcatccttgctactgtcggcctgaggatggcaagtacacctggagtcagcgcgaccctttttgatgcactagctaaggcaaatattaatgtaagggcgatagctcaaggttgcagtgagtacaacattactattgtactgaagcaagaagactgcgtgcgggctctgagagctgcccactcaaggttcttcctctccaaaaccacactggctgttggcatcattggacctgggttgattggtcgcacactacttaatcagctgaaggatcaggtatataaaaccaaagaaagccttgtgtttctatactgcagaagaagtgcatcatgagagaatgtaaaagtatgatcttgtagaactattatattaatgtcaatatctttgggttacttcaaaagtcttctcgcattatgtttgtaggctctatgctcatttttaatgttcaattagaatctggagcagctagccatcatgtactgactagtgaaatctagttagaattaagaaccgtcgcccccctccatgtctttctcggtcacttgtgatgctcgtttccactgtgcaccgttggctctattgtgggccattattaacttactcaatgagtggtgttactgatggattactgaaacggctagatcttgattttgtcacacaaacaagcatggacacactggtgtagtgctgctgggatgatctccacagctagcctcacctttacatttatatagaaacaagtatgttacaagggtgaggagccctagtaagctactgtgctacaacttgcagcatggctgcataccaactactccccttgatgtcaacaatcaacacacagtcacacaggaacaacagcaggtggggtgtgtgggcgtccaacatagggactaaacaaagacacaattaag

SEQ ID NO: 39671 - DNA, 1126 bp, Zea Mays
ccacgccaacgtcacgggtccattctgatcctgccgctacccctccgcttccgccctctcgctttcgttgtcatgaggagcctcaccgtggcaagccgccacccgggcgccgctttctctacccgccgccgcccccttcttcaccccgccgcagccggaagggactcgaccttccagcggtgctggcgatgggaaaaaactcaggacagctccttcgggagctcactaaggaccagccgccttccaagaactgtgcacggagatattttgaagaatttgctcgcaccaactgctggtgctgtttcagttgagcaagctgaagctattgctgacctcccaaaaggtgaaatgtggtcggtgcacaagtttggtggcacatgcatggggacctctgagagaattcacaatgttgctgatatagtccttcgtgatccttctgagaggaaactggtagttgtatctgcaatgtctaaggttaccgacatgatgtataatcttgtaaacaaggctcaatcaagggatgattcttacattgctgtactggatgaagtttttgataagcatatgacaacagcaaaggatttgcttgctggagaagaccttgcaagattcctgtctcagttacatgcagacatcagtaacctaaaagcaatgcttcgggccatatatatagctgggcatgcaacagagtctttctctgattttgttgttggtcatggagagttatggtctgctcaaatgttatcatatgcaatacagaagtctggaacaccatgcagttggatggatacaagggaagttctagttgtgaatccgtcaggagccaaccaggtagatcctgactatttggaatctgaaaaacgacttgaaaaatggttttctcgatgtccggctgagacaataattgctactgggtttattgcgagtacacctgaaaacatcccaacaaccttaaaaagagatggaagtgatttctctgcagccataattggttcccttgttaaggctcgccaggtgaccatctggactgatgttgatggggtatttagtgcagatcccagaaaaggtggaggaatcttatttccaatttgctggctacttcctcgactcaaatattattaaatgg

SEQ ID NO: 39672 - DNA, 1150 bp, Zea Mays
cacgggtccattctgatcctgccgctacccctccgcttccgccctctcgctttcgttgtcatgaggagcctcaccgtggcaagccgccacccgggcgccgctttctctacccgccgccgcccccttcttcaccccgccgcagccggaagggactcgaccttccagcggtgctggcgatgggaaaaaactcaggacagctccttcgggagctcactaaggaccagccgccttccaagaactgtgcacggagatattttgaagaatttgctcgcaccaactgctggtgctgtttcagttgagcaagctgaagctattgctgacctcccaaaaggtgaaatgtggtcggtgcacaagtttggtggcacatgcatggggacctctgagagaattcacaatgttgctgatatagtccttcgtgatccttctgagaggaaactggtagttgtatctgcaatgtctaaggttaccgacatgatgtataatcttgtaaacaaggctcaatcaagggatgattcttacattgctgtactggatgaagtttttgataagcatatgacaacagcaaaggatttgcttgctggagaagaccttgcaagattcctgtctcagttacatgcagacatcagtaacctaaaagcaatgcttcgggccatatatatagctgggcatgcaacagagtctttctctgattttgttgttggtcatggagagttatggtctgctcaaatgttatcatatgcaatacagaagtctggaacaccatgcagttggatggatacaagggaagttctagttgtgaatccgtcaggagccaaccaggtagatcctgactatttggaatctgaaaaacgacttgaaaaatggttttctcgatgtccggctgagacaataattgctactgggtttattgcgagtacacctgaaaacatcccaacaaccttaaaaagagatggaagtgatttctctgcagccataattggttcccttgttaaggctcgccaggtgaccatctggactgatgttgatggggtatttagtgcagatcccagaaaagttcatgctgccagctagaatctctacaatggctgtctatttgcagtacattaaggaatactgaatgatcctgcaactaaagatctgcatattcaag

SEQ ID NO: 39673 - DNA, 977 bp, Zea Mays
cacgggtccattctgatcctgccgctacccctccgcttccgccctctcgctttcgttgtcatgaggagcctcaccgtggcaagccgccacccgggcgccgctttctctacccgccgccgcccccttcttcaccccgccgcagccggaagctgtttcagttgagcaagctgaagctattgctgacctcccaaaaggtgaaatgtggtcggtgcacaagtttggtggcacatgcatggggacctctgagagaattcacaatgttgctgatatagtccttcgtgatccttctgagaggaaactggtagttgtatctgcaatgtctaaggttaccgacatgatgtataatcttgtaaacaaggctcaatcaagggatgattcttacattgctgtactggatgaagtttttgataagcatatgacaacagcaaaggatttgcttgctggagaagaccttgcaagattcctgtctcagttacatgcagacatcagtaacctaaaagcaatgcttcgggccatatatatagctgggcatgcaacagagtctttctctgattttgttgttggtcatggagagttatggtctgctcaaatgttatcatatgcaatacagaagtctggaacaccatgcagttggatggatacaagggaagttctagttgtgaatccgtcaggagccaaccaggtagatcctgactatttggaatctgaaaaacgacttgaaaaatggttttctcgatgtccggctgagacaataattgctactgggtttattgcgagtacacctgaaaacatcccaacaaccttaaaaagagatggaagtgatttctctgcagccataattggttcccttgttaaggctcgccaggtgaccatctggactgatgttgatggggtatttagtgcagatcccagaaaaggtggaggaatcttatttccaatttgctggctacttcctcgactcaaatattattaaatgg

SEQ ID NO: 39674 - DNA, 1106 bp, Zea Mays
cacgggtccattctgatcctgccgctacccctccgcttccgccctctcgctttcgttgtcatgaggagcctcaccgtggcaagccgccacccgggcgccgctttctctacccgccgccgcccccttcttcaccccgccgcagccggaagggactcgaccttccagcggtgctggcgatgggaaaaaactcaggacagctccttcgggagctcactaaggaccagccgccttccaagaactgtgcacggagatattttgaagaatttgctcgcaccaactgctggtggtattacatctatcttctgtttcagttgagcaagctgaagctattgctgacctcccaaaaggtgaaatgtggtcggtgcacaagtttggtggcacatgcatggggacctctgagagaattcacaatgttgctgatatagtccttcgtgatccttctgagaggaaactggtagttgtatctgcaatgtctaaggttaccgacatgatgtataatcttgtaaacaaggctcaatcaagggatgattcttacattgctgtactggatgaagtttttgataagcatatgacaacagcaaaggatttgcttgctggagaagaccttgcaagattcctgtctcagttacatgcagacatcagtaacctaaaagcaatgcttcgggccatatatatagctgggcatgcaacagagtctttctctgattttgttgttggtcatggagagttatggtctgctcaaatgttatcatatgcaatacagaagtctggaacaccatgcagttggatggatacaagggaagttctagttgtgaatccgtcaggagccaaccaggtagatcctgactatttggaatctgaaaaacgacttgaaaaatggttttctcgatgtccggctgagacaataattgctactgggtttattgcgagtacacctgaaaacatcccaacaaccttaaaaagagatggaagtgatttctctgcagccataattggttcccttgttaaggctcgccaggtgaccatctggactgatgttgatggggtatttagtgcagatcccagaaaagggagctgattagacatcgcagaggtttgaggcaagg

SEQ ID NO: 39675 - DNA, 1061 bp, Zea Mays
cacgggtccattctgatcctgccgctacccctccgcttccgccctctcgctttcgttgtcatgaggagcctcaccgtggcaagccgccacccgggcgccgctttctctacccgccgccgcccccttcttcaccccgccgcagccggaagggactcgaccttccagcggtgctggcgatgggaaaaaactcaggacagctccttcgggagctcactaaggaccagccgccttccaagaactgtgcacggagatattttgaagaatttgctcgcaccaactgctggtgctgtttcagttgagcaagctgaagctattgctgacctcccaaaaggtgaaatgtggtcggtgcacaagtttggtggcacatgcatggggacctctgagagaattcacaatgttgctgatatagtccttcgtgatccttctgagaggaaactggtagttgtatctgcaatgtctaaggttaccgacatgatgtataatcttgtaaacaaggctcaatcaagggatgattcttacattgctgtactggatgaagtttttgataagcatatgacaacagcaaaggatttgcttgctggagaagaccttgcaagattcctgtctcagttacatgcagacatcagtaacctaaaagcaatgcttcgggccatatatatagctgggcatgcaacagagtctttctctgattttgttgttggtcatggagagttatggtctgctcaaatgttatcatatgcaatacagaagtctggaacaccatgcagttggatggatacaagggaagttctagttgtgaatccgtcaggagccaaccaggtagatcctgactatttggaatctgaaaaacgacttgaaaaatggttttctcgatgtccggctgagacaataattgctactgggtttattgcgagtacacctgaaaacatcccaacaaccttaaaaagagatggaagtgatttctctgcagccataattggttcccttgttaaggctcgccaggtgaccatctggactgatgttgatggggtatttagtgcagatcccagaaaagtagtgag

SEQ ID NO: 39676 - DNA, 1743 bp, Zea Mays
cacgggtccattctgatcctgccgctacccctccgcttccgccctctcgctttcgttgtcatgaggagcctcaccgtggcaagccgccacccgggcgccgctttctctacccgccgccgcccccttcttcaccccgccgcagccggaagcggtgctggcgatgggaaaaaactcaggacagctccttcgggagctcactaaggaccagccgccttccaagaactgtgcacggagatattttgaagaatttgctcgcaccaactgctggtgctgtttcagttgagcaagctgaagctattgctgacctcccaaaaggtgaaatgtggtcggtgcacaagtttggtggcacatgcatggggacctctgagagaattcacaatgttgctgatatagtccttcgtgatccttctgagaggaaactggtagttgtatctgcaatgtctaaggttaccgacatgatgtataatcttgtaaacaaggctcaatcaagggatgattcttacattgctgtactggatgaagtttttgataagcatatgacaacagcaaaggatttgcttgctggagaagaccttgcaagattcctgtctcagttacatgcagacatcagtaacctaaaagcaatgcttcgggccatatatatagctgggcatgcaacagagtctttctctgattttgttgttggtcatggagagttatggtctgctcaaatgttatcatatgcaatacagaagtctggaacaccatgcagttggatggatacaagggaagttctagttgtgaatccgtcaggagccaaccaggtagatcctgactatttggaatctgaaaaacgacttgaaaaatggttttctcgatgtccggctgagacaataattgctactgggtttattgcgagtacacctgaaaacatcccaacaaccttaaaaagagatggaagtgatttctctgcagccataattggttcccttgttaaggctcgccaggtgaccatctggactgatgttgatggggtatttagtgcagatcccagaaaagttagtgaggctgtaatcttaagcacattgtcgtatcaggaggcctgggaaatgtcatattttggggcaaatgtcttgcatccacgtactattatacctgtgatgaaatataatatccctattgttataaggaacatattcaatacttctgcccctggaactatgatctgtcaacagcctgctaatgaaaacggtgatttggaggcttgtgtcaaagcttttgcaactatagataaattggctttggttaatgtcgaagggactggaatggctggtgtcccaggtacagcaaatgccatatttggtgctgtgaaggatgttggagcaaatgttatcatgatatcacagcaagcgacatgggaagtggcagttggaagtggtcgtcccagggcgcttgcaggagatggagcagcagcactgccaggcgtggtggcaggactgcttggaccatctggggcggtcgagtgctgcactggtgggcgacacgtgaagacctggccgaaccgttgtggcacagacggggcgccgagcggtgctgatgcaggagtgccggggacaccaggagagtcattgggagaccctggtgaggtcggcgcgactggggtagaggaaccaggcaacactaggggcgtacgaacgtcgggtactgcaggcgcgtcgagagcagcgtttggagctgttggggcactgggggcagtggcgcctg

SEQ ID NO: 39677 - DNA, 1744 bp, Zea Mays
cacgggtccattctgatcctgccgctacccctccgcttccgccctctcgctttcgttgtcatgaggagcctcaccgtggcaagccgccacccgggcgccgctttctctacccgccgccgcccccttcttcaccccgccgcagccggaagggactcgaccttccagcggtgctggcgatgggaaaaaactcaggacagctccttcgggagctcactaaggaccagccgccttccaagaactgtgcacggagatattttgaagaatttgctcgcaccaactgctggtgctgtttcagttgagcaagctgaagctattgctgacctcccaaaaggtgaaatgtggtcggtgcacaagtttggtggcacatgcatggggacctctgagagaattcacaatgttgctgatatagtccttcgtgatccttctgagaggaaactggtagttgtatctgcaatgtctaaggttaccgacatgatgtataatcttgtaaacaaggctcaatcaagggatgattcttacattgctgtactggatgaagtttttgataagcatatgacaacagcaaaggatttgcttgctggagaagaccttgcaagattcctgtctcagttacatgcagacatcagtaacctaaaagcaatgcttcgggccatatatatagagtctttctctgattttgttgttggtcatggagagttatggtctgctcaaatgttatcatatgcaatacagaagtctggaacaccatgcagttggatggatacaagggaagttctagttgtgaatccgtcaggagccaaccaggtagatcctgactatttggaatctgaaaaacgacttgaaaaatggttttctcgatgtccggctgagacaataattgctactgggtttattgcgagtacacctgaaaacatcccaacaaccttaaaaagagatggaagtgatttctctgcagccataattggttcccttgttaaggctcgccaggtgaccatctggactgatgttgatggggtatttagtgcagatcccagaaaagttagtgaggctgtaatcttaagcacattgtcgtatcaggaggcctgggaaatgtcatattttggggcaaatgtcttgcatccacgtactattatacctgtgatgaaatataatatccctattgttataaggaacatattcaatacttctgcccctggaactatgatctgtcaacagcctgctaatgaaaacggtgatttggaggcttgtgtcaaagcttttgcaactatagataaattggctttggttaatgtcgaagggactggaatggctggtgtcccaggtacagcaaatgccatatttggtgctgtgaaggatgttggagcaaatgttatcatgatatcacagcaagcgacatgggaagtggcagttggaagtggtcgtcccagggcgcttgcaggagatggagcagcagcactgccaggcgtggtggcaggactgcttggaccatctggggcggtcgagtgctgcactggtgggcgacacgtgaagacctggccgaaccgttgtggcacagacggggcgccgagcggtgctgatgcaggagtgccggggacaccaggagagtcattgggagaccctggtgaggtcggcgcgactggggtagaggaaccaggcaacactaggggcgtacgaacgtcgggtactgcaggcgcgtcgagagcagcgtttggagctgttggggcactgggggcagtggcgcctg

SEQ ID NO: 39678 - DNA, 1753 bp, Zea Mays
cacgggtccattctgatcctgccgctacccctccgcttccgccctctcgctttcgttgtcatgaggagcctcaccgtggcaagccgccacccgggcgccgctttctctacccgccgccgcccccttcttcaccccgccgcagccggaagggactcgaccttccagcggtgctggcgatgggaaaaaactcaggacagctccttcgggagctcactaagccgccttccaagaactgtgcacggagatattttgaagaatttgctcgcaccaactgctggtgctgtttcagttgagcaagctgaagctattgctgacctcccaaaaggtgaaatgtggtcggtgcacaagtttggtggcacatgcatggggacctctgagagaattcacaatgttgctgatatagtccttcgtgatccttctgagaggaaactggtagttgtatctgcaatgtctaaggttaccgacatgatgtataatcttgtaaacaaggctcaatcaagggatgattcttacattgctgtactggatgaagtttttgataagcatatgacaacagcaaaggatttgcttgctggagaagaccttgcaagattcctgtctcagttacatgcagacatcagtaacctaaaagcaatgcttcgggccatatatatagctgggcatgcaacagagtctttctctgattttgttgttggtcatggagagttatggtctgctcaaatgttatcatatgcaatacagaagtctggaacaccatgcagttggatggatacaagggaagttctagttgtgaatccgtcaggagccaaccaggtagatcctgactatttggaatctgaaaaacgacttgaaaaatggttttctcgatgtccggctgagacaataattgctactgggtttattgcgagtacacctgaaaacatcccaacaaccttaaaaagagatggaagtgatttctctgcagccataattggttcccttgttaaggctcgccaggtgaccatctggactgatgttgatggggtatttagtgcagatcccagaaaagttagtgaggctgtaatcttaagcacattgtcgtatcaggaggcctgggaaatgtcatattttggggcaaatgtcttgcatccacgtactattatacctgtgatgaaatataatatccctattgttataaggaacatattcaatacttctgcccctggaactatgatctgtcaacagcctgctaatgaaaacggtgatttggaggcttgtgtcaaagcttttgcaactatagataaattggctttggttaatgtcgaagggactggaatggctggtgtcccaggtacagcaaatgccatatttggtgctgtgaaggatgttggagcaaatgttatcatgatatcacagcaagcgacatgggaagtggcagttggaagtggtcgtcccagggcgcttgcaggagatggagcagcagcactgccaggcgtggtggcaggactgcttggaccatctggggcggtcgagtgctgcactggtgggcgacacgtgaagacctggccgaaccgttgtggcacagacggggcgccgagcggtgctgatgcaggagtgccggggacaccaggagagtcattgggagaccctggtgaggtcggcgcgactggggtagaggaaccaggcaacactaggggcgtacgaacgtcgggtactgcaggcgcgtcgagagcagcgtttggagctgttggggcactgggggcagtggcgcctg

SEQ ID NO: 39679 - DNA, 1894 bp, Zea Mays
ccccgttgtcgtcccctccatcctccccctcgccccctaactgatgggtaccatcccaagtcaactaggaaggcctctttcttctcctttgcaacataggcagcagggtcttcttggggagaggtctaagatttctgagtacactgaacaagaacattgtatccagtcaaccgccccttgtttcatcatctgctgatttgactattccaaagacaactgctacaccgttgttactagcttcacctcatcagtctaccaatgtgtcaacgagtttgcatactggatttctgcgttctcgaagtacctcaggattgcctaggcaaccttcatatactactggatttgggactgctttaaatatagagacacttgttgctgccgtggaacaaagagatacaccaattgagacacctccacctaaagttcaggacaagattctttttatgatcaacaatatatccatctcaaatatggaagctaaggcaaaggaatttaatgaggtcatacaggaacaatattatccttggtttgcacaatacatggtcatgaaaagggcaagcattgaaccaaatttccatgatctgtatatgaatttctttgataaagtaaactcaaaatccttgaacaaggaaatattgaaagccacatatgagaactgcaaggtcttgttaagatcagaccttatcaaatctagttccgaggagcgctccttgctaaaaaacctaggcagttggttgggaaagttcaccattggtaggaatcaggcactaagggctaaaaagattgatccaaaatctcttatcgtggaggcatgtgagaaaggattgatgattgcggtcataccattcacttcaaagatccttgaaccttgccagtcaagtattgcaaatcgacctccaaatccctggaccatgggaattctaagtctacttgctgaaatttataatcttccaaacctcaagatgaatctgaaatttgatattgaggtgctatttaagaaccttactgttgacataaaggatgtgaaaccaacttccctgctcaaagatcatctgcgcgaagtcgagggaaatctagatttttcaaataaagatgttactgcatctcaaacccctgtggttgcagaagtcccttcagggaccatcccttcactaactcatatggaacaacaacctgagatcaatatcacatcccgagctatgatccttccaaatatacttaatcagtatgctgctcctgtccgtctacctacaaacagcacggtagaagatgacaaagttgctctgatgatgcctgagcaagtgccctcgttgacccaggtttcgccagcacaaacacaatcaacatcaccatctccattttctgttaaccagcttatggtggctattccacgtgaagagatacgtttcaaaataaatccaaagctcggctcccttggtccacaactgcaatatagcaaaattatggatttggctttggataaggctaacagggagataatactccctgttattcaaagaagtgtgaccatagcaagccgaactacaaaagaacttattctgaaggattatgcactggagtctgataacaatacgataactcgatccgcacatttgatggttggaacattagccggaagtctggcacatgttacttgcaaggaacctcttcgtgttgcactatattctaatcttcggaatctcattcagaaccttatgagcgatttaaaagcttaaggtttacaatctcggattgtttttacaattctaatggaattgtcagttttctggacatctgacaatgattactcaaagataaactatatagtgttaaaggctagttgggtactaccactgtcctgaaatgtaatcgatttgagtttgtcctaagtaac

SEQ ID NO: 39680 - DNA, 1173 bp, Zea Mays
agatgcataagcgccaagacatgttttccagtttgaagtctaaagcaaagcagatggcgacaagtttcaacatgtcaaactttgctaacagggaggatctgcttggtcagagtaaaaaggcagatgacatgagcagagttgctgggttagataaccaagggattgttgtccttcagaggcaaattatgaaaggtattgtttttttgtggtttgttcagtagtgttttcttgatgaaccttactaaaagggtgctgtttgcatgagatcatgtagcactgtttcttcacaccatttgcatttcatatttggttggtacagatctaggtttcttggaaatggcagttgtgggagcaagaaccatttcatggcgctttatttatttgagttgtgtatcaatattttgcagagcaagatgagggtcttgagaaactggaagagacagtgctgagcacaaagcatattgcattagcagtcaatgaagaacttaccctgcacacaagattgatagatgaccttgaagatcatgttgatgttacaaattcacgtcttcagattgtaagttctggatacactatgtgactatgtctagatacatagcaacagttatatagcatgtacttcaaaaacccagaacgacatacaatttggaacagagtactatgtagaattttttactgcaacatgctatttaaacttctcaagtttgcaatggaacactgatacataattctcttttgtcagcgcgtgcaaaagaggcttgcaattctgagcaagcgcaccaaaggtggctgctcatgtatgtgcctgcttctatctgttgtcgccatcgtgattcttgcagtcatagtttggcttctcgtcaagtatctgtaaaggaaagaaagaagcagccggcctaccctgcagacctcactcgaaatgacccttatgtgtgtgcagccttcgcttaaaaagtcccttctgtgttactaccattgaaatgtgcatccctttgaaaataatatatatacggtggtttcatcttccctttcgtgagtggaatggttatggagtaatgtacattacatcgaatttgacacatacatgatcatcatctgcatcttgtgtatggtgtttgtcagtttgccgtgacaagtgttggatttattctgtgccgtaagcactttatctct

SEQ ID NO: 39681 - DNA, 3533 bp, Zea Mays
agttagtctgtaaggttgtgatggtcatcaagcaccaaaatcaattagagaaaatgattaaggctattttcctttcaggtgcgcagggcgtgcagatcgtgacgacggggagcgcaggggcgccagcgttgcttgggaagatgggtctgccgtgggggagtccaggcatgctacagatgagcacaggcgcgccgtggggtagagcaaaccaccgtcgtcgttgctgatggggaggccggtggtcaccatgaccgcagggccggtgctggggagggcagggccacaacggggcctgtgggtccgacgaagaaggcctactggggacgttgttactgttgaatccccccgttccccaggccaggccacatggtgatgtgactgatctaggggttgtaggagggccaggcgggagcgggtgcctgttcggcttgggtgcgctgcgtctagagggaagcatcgccaaggttgaccatggagcagattagagctgctagggggcctggcggctatgctaggaaggaaaacgaaaacgatagggaaaatctaggtctctagatacataccatgacagaatgagctgccagatattggattaatggtagaggtacaagggggtataatatataggcatggattgtctaaggtttatagaaagcatgcaatcaatagaaatccttgcataatctaaagcacccaatcaatgaagatctttgtgtaatctatgatttgttctcgaaagcgtaggagagctacacatcatatatataaagaagaaaaaggtctaaaataggccaatacaaaaaactggaaaaaaaacagtggccaagaccagctcatggcggccgaaagcaacaaaacataaaaacatccaacattacagctaggagagactaaatccgcggcaactaccataaacatcaaggcacatatggcagacatgatcaatctaattacatagtctaacactactatgtactaattattgctcaaaagataacatacgatatacacatttttgttcttttcttctcatctttgtttgtttgggattcctacggaagggcctctagctgtgttggttaggtggtccgagtagcactcctcagatcctgggttggactccccgtggaagcgaattttaggctgtggttaaaaaatgtcctcgtttgtcccatgccaaagcacaggtctaaggcccagctccggccgtggtcgttctcacatggactacggtgccgctgtgtacgcgtggggcttatggcgtagctttagcgtcgctaaagcgataaggcgagcgtggaggcataaggcgtcttgtcgccttgcctgcgagagtaagggcggcagcgcgtgtcgcatatctcccgccggcggcgcgcagggaggagagctatggagagggagaagctgctgctatcggctaagggacaatctgctgctagcagctgagaaggtaaccctaaaattgttggactgggttgactggttatgggcttcttcttttgttctttttctttttcctgattctctcgtctactaggccgaaataggcctattaaggccttacagttgtgctatcttttttattacttccaaattagtgatatataaataaaacgagggtggagggctagcgcagaggccgagtgaggatggaggcgggggaggcgtgcacgtgcgctgagggggagtcgggggcatgggtgtgcgcactctagcagcgcggaaggggaggtggccgtagccatattagcgccaggcgcccacactacgttcttaatagaatagtatagatgtgatctaatttttaataattatatatataattgaggtgtcgcctcgcctctcttaaaagttaaaaagggggcgctcgcctttacttgccttaccgccttaataactatgggtggggcaggggttcgagagtttattcgacctgcgtgagaagatcttctcaatataatgccgtggggccggtcttaccccgcaggtccagtttggattttggtaatactcagtgttattaaaactacatttaaacgtcgtttaaactacgtttaaacgtcaaaaccctaattagaggttgaaaccgcgttttagtattttggcattctaaactgtaaaacgcagtgtttcatgcgttttagaccattagctacttttgggcctagtctgttatttacttttggggtccaattcaactcatgggtgaagttttggtaagccactcatttctttgttttggtatttaactccataatattgtctaaaattatgatatattggtatttttctatgttgtttaaaactacgtttaaactttgtttaaacgtttaaaagtcaaaatttcacccatgagtgtttcgacattttatcgttttaataaccttgttaatactacaatgtttttgcttaaactataggtgctagagatgttgacaaagaagatgatatgtttgtcctcattgctccacaaaatgctgttggaaactgcataattgatgatatgagagctatgactgatgctgctggtgatagacctgtgattcttgtaaatcctcgcctaaaggatatgcctgcatcaagtggtgttatgcaagatggcttatccaaataaatatgagatttatcgaagggttgacactctcaatggaaaagagaactatattcttatagctgaattcacgaacaagccaactcctgatgagatcaccagtgctttcaaaggacaaaaaagggaagaaaaggcatcttctggattctggtaacttatgctcctggtttttgtttctccattccaatactaacttcctaccaacatgaatatgggttactaaacatttcaatccttgtgtaggggtttcttaagtggtttattttaagtcaagcgatctgctgtacggcgatgcaatcctccttgtatatttttatctgataatggatgtaatatggttcggaaaatatccgttcggatcaggattcgaagatggtgaacactggttcagatggaattttcggatatccggacttttttcggataacggatacgaatacgaatattttgttcggatatcgaattcgaatacaatatgtctgatattcgtcggatatcgaatatctggatattttctcggataaatcttctcggatatccggatatcttatctggatagctgtgtgcattttgttgattgtttgtagaaagaaattaataatacacaaatagcctcaaaaattcatgaaaatttatggaggcataccatatgtccacatataatcctccaaaatatttggaccataaaatccacaatattgtagtgtttctttcatttcactttcacttgtgtgaattacatgagaaatcactctaattatccaagttcactttatcattttcatatggagacttgaggttatattcttatagaatgtttattagttttggtaacttatttgcattttaatgattttatacaaaataaattaataacacgcatataggctaaaaattcatgttttttacaaaaaaaaaa

SEQ ID NO: 39682 - DNA, 3119 bp, Zea Mays
atgattaaggctattttcctttcaggtgcgcagggcgtgcagatcgtgacgacggggagcgcaggggcgccagcgttgcttgggaagatgggtctgccgtgggggagtccaggcatgctacagatgagcacaggcgcgccgtggggtagagcaaaccaccgtcgtcgttgctgatggggaggccggtggtcaccatgaccgcagggccggtgctggggagggcagggccacaacggggcctgtgggtccgacgaagaaggcctactggggacgttgttactgttgaatccccccgttccccaggccaggccacatggtgatgtgactgatctaggggttgtaggagggccaggcgggagcgggtgcctgttcggcttgggtgcgctgcgtctagagggaagcatcgccaaggttgaccatggagcagattagagctgctagggggcctggcggctatgctaggaaggaaaacgaaaacgatagggaaaatctaggtctctagatacataccatgacagaatgagctgccagatattggattaatggtagaggtacaagggggtataatatataggcatggattgtctaaggtttatagaaagcatgcaatcaatagaaatccttgcataatctaaagcacccaatcaatgaagatctttgtgtaatctatgatttgttctcgaaagcgtaggagagctacacatcatatatataaagaagaaaaaggtctaaaataggccaatacaaaaaactggaaaaaaaacagtggccaagaccagctcatggcggccgaaagcaacaaaacataaaaacatccaacattacagctaggagagactaaatccgcggcaactaccataaacatcaaggcacatatggcagacatgatcaatctaattacatagtctaacactactatgtactaattattgctcaaaagataacatacgatatacacatttttgttcttttcttctcatctttgtttgtttgggattcctacggaagggcctctagctgtgttggttaggtggtccgagtagcactcctcagatcctgggttggactccccgtggaagcgaattttaggctgtggttaaaaaatgtcctcgtttgtcccatgccaaagcacaggtctaaggcccagctccggccgtggtcgttctcacatggactacggtgccgctgtgtacgcgtggggcttatggcgtagctttagcgtcgctaaagcgataaggcgagcgtggaggcataaggcgtcttgtcgccttgcctgcgagagtaagggcggcagcgcgtgtcgcatatctcccgccggcggcgcgcagggaggagagctatggagagggagaagctgctgctatcggctaagggacaatctgctgctagcagctgagaaggtaaccctaaaattgttggactgggttgactggttatgggcttcttcttttgttctttttctttttcctgattctctcgtctactaggccgaaataggcctattaaggccttacagttgtgctatcttttttattacttccaaattagtgatatataaataaaacgagggtggagggctagcgcagaggccgagtgaggatggaggcgggggaggcgtgcacgtgcgctgagggggagtcgggggcatgggtgtgcgcactctagcagcgcggaaggggaggtggccgtagccatattagcgccaggcgcccacactacgttcttaatagaatagtatagatgtgatctaatttttaataattatatatataattgaggtgtcgcctcgcctctcttaaaagttaaaaagggggcgctcgcctttacttgccttaccgccttaataactatgggtggggcaggggttcgagagtttattcgacctgcgtgagaagatcttctcaatataatgccgtggggccggtcttaccccgcaggtccagtttggattttggtaatactcagtgttattaaaactacatttaaacgtcgtttaaactacgtttaaacgtcaaaaccctaattagaggttgaaaccgcgttttagtattttggcattctaaactgtaaaacgcagtgtttcatgcgttttagaccattagctacttttgggcctagtctgttatttacttttggggtccaattcaactcatgggtgaagttttggtaagccactcatttctttgttttggtatttaactccataatattgtctaaaattatgatatattggtatttttctatgttgtttaaaactacgtttaaactttgtttaaacgtttaaaagtcaaaatttcacccatgagtgtttcgacattttatcgttttaataaccttgttaatactacaatgtttttgcttaaactataggtgctagagatgttgacaaagaagatgatatgtttgtcctcattgctccacaaaatgctgttggaaactgcataattgatgatatgagagctatgactgatgctgctggtgatagacctgtgattcttgtaaatcctcgcctaaaggatatgcctgcatcaagtggtgttatgcaagatggcttatccaaataaatatgagatttatcgaagggttgacactctcaatggaaaagagaactatattcttatagctgaattcacgaacaagccaactcctgatgagatcaccagtgctttcaaaggacaaaaaagggaagaaaaggcatcttctggattctggtaacttatgctcctggtttttgtttctccattccaatactaacttcctaccaacatgaatatgggttactaaacatttcaatccttgtgtaggggtttcttaagtggtttattttaagtcaagcgatctgctgtacggcgatgcaatcctccttgtatatttttatctgataatggtttggtgccgtgacccacagcgacaaggtaaagcaccttggcgccgagatctcaggcctgcgttgtgggtgactgggtgtggcctggtaacttggcactgatgttgtgggaccttggctccacaggccgtgacgttgagtttggcaaatgctttaaaagatgttgtttaagagcaaatccaaaagactctttaattgatataaatatagatttttgtaataagggttaatt

SEQ ID NO: 39683 - DNA, 3094 bp, Zea Mays
atcgtgacgacggggagcgcaggggcgccagcgttgcttgggaagatgggtctgccgtgggggagtccaggcatgctacagatgagcacaggcgcgccgtggggtagagcaaaccaccgtcgtcgttgctgatggggaggccggtggtcaccatgaccgcagggccggtgctggggagggcagggccacaacggggcctgtgggtccgacgaagaaggcctactggggacgttgttactgttgaatccccccgttccccaggccaggccacatggtgatgtgactgatctaggggttgtaggagggccaggcgggagcgggtgcctgttcggcttgggtgcgctgcgtctagagggaagcatcgccaaggttgaccatggagcagattagagctgctagggggcctggcggctatgctaggaaggaaaacgaaaacgatagggaaaatctaggtctctagatacataccatgacagaatgagctgccagatattggattaatggtagaggtacaagggggtataatatataggcatggattgtctaaggtttatagaaagcatgcaatcaatagaaatccttgcataatctaaagcacccaatcaatgaagatctttgtgtaatctatgatttgttctcgaaagcgtaggagagctacacatcatatatataaagaagaaaaaggtctaaaataggccaatacaaaaaactggaaaaaaaacagtggccaagaccagctcatggcggccgaaagcaacaaaacataaaaacatccaacattacagctaggagagactaaatccgcggcaactaccataaacatcaaggcacatatggcagacatgatcaatctaattacatagtctaacactactatgtactaattattgctcaaaagataacatacgatatacacatttttgttcttttcttctcatctttgtttgtttgggattcctacggaagggcctctagctgtgttggttaggtggtccgagtagcactcctcagatcctgggttggactccccgtggaagcgaattttaggctgtggttaaaaaatgtcctcgtttgtcccatgccaaagcacaggtctaaggcccagctccggccgtggtcgttctcacatggactacggtgccgctgtgtacgcgtggggcttatggcgtagctttagcgtcgctaaagcgataaggcgagcgtggaggcataaggcgtcttgtcgccttgcctgcgagagtaagggcggcagcgcgtgtcgcatatctcccgccggcggcgcgcagggaggagagctatggagagggagaagctgctgctatcggctaagggacaatctgctgctagcagctgagaaggtaaccctaaaattgttggactgggttgactggttatgggcttcttcttttgttctttttctttttcctgattctctcgtctactaggccgaaataggcctattaaggccttacagttgtgctatcttttttattacttccaaattagtgatatataaataaaacgagggtggagggctagcgcagaggccgagtgaggatggaggcgggggaggcgtgcacgtgcgctgagggggagtcgggggcatgggtgtgcgcactctagcagcgcggaaggggaggtggccgtagccatattagcgccaggcgcccacactacgttcttaatagaatagtatagatgtgatctaatttttaataattatatatataattgaggtgtcgcctcgcctctcttaaaagttaaaaagggggcgctcgcctttacttgccttaccgccttaataactatgggtggggcaggggttcgagagtttattcgacctgcgtgagaagatcttctcaatataatgccgtggggccggtcttaccccgcaggtccagtttggattttggtaatactcagtgttattaaaactacatttaaacgtcgtttaaactacgtttaaacgtcaaaaccctaattagaggttgaaaccgcgttttagtattttggcattctaaactgtaaaacgcagtgtttcatgcgttttagaccattagctacttttgggcctagtctgttatttacttttggggtccaattcaactcatgggtgaagttttggtaagccactcatttctttgttttggtatttaactccataatattgtctaaaattatgatatattggtatttttctatgttgtttaaaactacgtttaaactttgtttaaacgtttaaaagtcaaaatttcacccatgagtgtttcgacattttatcgttttaataaccttgttaatactacaatgtttttgcttaaactataggtgctagagatgttgacaaagaagatgatatgtttgtcctcattgctccacaaaatgctgttggaaactgcataattgatgatatgagagctatgactgatgctgctggtgatagacctgtgattcttgtaaatcctcgcctaaaggatatgcctgcatcaagtggtgttatgcaaacaatgggaagggatattaggctgaagtatgctgcatcatttgagacatgctattcattccgtcttctctactacgctggttcattctatcctattatgggagctttaaggatggcttatccaaataaatatgagatttatcgaagggttgacactctcaatggaaaagagaactatattcttatagctgaattcacgaacaagccaactcctgatgagatcaccagtgctttcaaaggacaaaaaagggaagaaaaggcatcttctggattctggggtttcttaagtggtttattttaagtcaagcgatctgctgtacggcgatgcaatcctccttgtatatttttatctgataatggtttggtgccgtgacccacagcgacaaggtaaagcaccttggcgccgagatctcaggcctgcgttgtgggtgactgggtgtggcctggtaacttggcactgatgttgtgggaccttggctccacaggccgtgacgttgagtttggcaaatgctttaaaagatgttgtttaagagcaaatccaaaagactctttaattgatataaatatagatttttgtaataagggttaatt

SEQ ID NO: 39684 - DNA, 1040 bp, Zea Mays
gggtctgccgtgggggagtccaggtgctagagatgttgacaaagaagatgatatgtttgtcctcattgctccacaaaatgctgttggaaactgcataattgatgatatgagagctatgactgatgctgctggtgatagacctgtgattcttgtaaatcctcgcctaaaggatatgcctgcatcaagtggtgttatgcaagatggcttatccaaataaatatgagatttatcgaagggttgacactctcaatggaaaagagaactatattcttatagctgaattcacgaacaagccaactcctgatgagatcaccagtgctttcaaaggacaaaaaagggaagaaaaggcatcttctggattctggggtttcttaagtggtttattttaagtcaagcgatctgctgtacggcgatgcaatcctccttgtatatttttatctgataatggatgtaatatggttcggaaaatatccgttcggatcaggattcgaagatggtgaacactggttcagatggaattttcggatatccggacttttttcggataacggatacgaatacgaatattttgttcggatatcgaattcgaatacaatatgtctgatattcgtcggatatcgaatatctggatattttctcggataaatcttctcggatatccggatatcttatctggatagctgtgtgcattttgttgattgtttgtagaaagaaattaataatacacaaatagcctcaaaaattcatgaaaatttatggaggcataccatatgtccacatataatcctccaaaatatttggaccataaaatccacaatattgtagtgtttctttcatttcactttcacttgtgtgaattacatgagaaatcactctaattatccaagttcactttatcattttcatatggagacttgaggttatattcttatagaatgtttattagttttggtaacttatttgcattttaatgattttatacaaaataaattaataacacgcatataggctaaaaattcatgttttttacaaaaaaaaaa

SEQ ID NO: 39685 - DNA, 2109 bp, Zea Mays
gcaaaccaccgtcgtcgttgctgatggggaggccggtggtcaccatgaccgcagggccggtgctggggagggcagggccacaacggggcctgtgggtccgacgaagaaggcctactggggacgttgttactgttgaatccccccgttccccaggccaggccacatggtgatgtgactgatctaggggttgtaggagggccaggcgggagcgggtgcctgttcggcttgggtgcgctgcgtctagagggaagcatcgccaaggttgaccatggagcagattagagctgctagggggcctggcggctatgctaggaaggaaaacgaaaacgatagggaaaatctaggtctctagatacataccatgacagaatgagctgccagatattggattaatggtagaggtacaagggggtataatatataggcatggattgtctaaggtttatagaaagcatgcaatcaatagaaatccttgcataatctaaagcacccaatcaatgaagatctttgtgtaatctatgatttgttctcgaaagcgtaggagagctacacatcatatatataaagaagaaaaaggtctaaaataggccaatacaaaaaactggaaaaaaaacagtggccaagaccagctcatggcggccgaaagcaacaaaacataaaaacatccaacattacagctaggagagactaaatccgcggcaactaccataaacatcaaggcacatatggcagacatgatcaatctaattacatagtctaacactactatgtactaattattgctcaaaagataacatacgatatacacatttttgttcttttcttctcatctttgtttgtttgggattcctacggaagggcctctagctgtgttggttaggtggtccgagtagcactcctcagatcctgggttggactccccgtggaagcgaattttaggctgtggttaaaaaatgtcctcgtttgtcccatgccaaagcacaggtctaaggcccagctccggccgtggtcgttctcacatggactacggtgccgctgtgtacgcgtggggcttatggcgtagctttagcgtcgctaaagcgataaggcgagcgtggaggcataaggcgtcttgtcgccttgcctgcgagagtaagggcggcagcgcgtgtcgcatatctcccgccggcggcgcgcagggaggagagctatggagagggagaagctgctgctatcggctaagggacaatctgctgctagcagctgagaaggtgctagagatgttgacaaagaagatgatatgtttgtcctcattgctccacaaaatgctgttggaaactgcataattgatgatatgagagctatgactgatgctgctggtgatagacctgtgattcttgtaaatcctcgcctaaaggatatgcctgcatcaagtggtgttatgcaaacaatgggaagggatattaggctgaagtatgctgcatcatttgagacatgctattcattccgtcttctctactacgctggttcattctatcctattatgggagctttaaggatggcttatccaaataaatatgagatttatcgaagggttgacactctcaatggaaaagagaactatattcttatagctgaattcacgaacaagccaactcctgatgagatcaccagtgctttcaaaggacaaaaaagggaagaaaaggcatcttctggattctggtaacttatgctcctggtttttgtttctccattccaatactaacttcctaccaacatgaatatgggttactaaacatttcaatccttgtgtaggggtttcttaagtggtttattttaagtcaagcgatctgctgtacggcgatgcaatcctccttgtatatttttatctgataatggtttggtgccgtgacccacagcgacaaggtaaagcaccttggcgccgagatctcaggcctgcgttgtgggtgactgggtgtggcctggtaacttggcactgatgttgtgggaccttggctccacaggccgtgacgttgagtttggcaaatgctttaaaagatgttgtttaagagcaaatccaaaagactctttaattgatataaatatagatttttgtaataagggttaatt

SEQ ID NO: 39686 - DNA, 2379 bp, Zea Mays
gcaaaccaccgtcgtcgttgctgatggggaggccggtggtcaccatgaccgcagggccggtgctggggagggcagggccacaacggggcctgtgggtccgacgaagaaggcctactggggacgttgttactgttgaatccccccgttccccaggccaggccacatggtgatgtgactgatctaggggttgtaggagggccaggcgggagcgggtgcctgttcggcttgggtgcgctgcgtctagagggaagcatcgccaaggttgaccatggagcagattagagctgctagggggcctggcggctatgctaggaaggaaaacgaaaacgatagggaaaatctaggtctctagatacataccatgacagaatgagctgccagatattggattaatggtagaggtacaagggggtataatatataggcatggattgtctaaggtttatagaaagcatgcaatcaatagaaatccttgcataatctaaagcacccaatcaatgaagatctttgtgtaatctatgatttgttctcgaaagcgtaggagagctacacatcatatatataaagaagaaaaaggtctaaaataggccaatacaaaaaactggaaaaaaaacagtggccaagaccagctcatggcggccgaaagcaacaaaacataaaaacatccaacattacagctaggagagactaaatccgcggcaactaccataaacatcaaggcacatatggcagacatgatcaatctaattacatagtctaacactactatgtactaattattgctcaaaagataacatacgatatacacatttttgttcttttcttctcatctttgtttgtttgggattcctacggaagggcctctagctgtgttggttaggtggtccgagtagcactcctcagatcctgggttggactccccgtggaagcgaattttaggctgtggttaaaaaatgtcctcgtttgtcccatgccaaagcacaggtctaaggcccagctccggccgtggtcgttctcacatggactacggtgccgctgtgtacgcgtggggcttatggcgtagctttagcgtcgctaaagcgataaggcgagcgtggaggcataaggcgtcttgtcgccttgcctgcgagagtaagggcggcagcgcgtgtcgcatatctcccgccggcggcgcgcagggaggagagctatggagagggagaagctgctgctatcggctaagggacaatctgctgctagcagctgagaaggtgctagagatgttgacaaagaagatgatatgtttgtcctcattgctccacaaaatgctgttggaaactgcataattgatgatatgagagctatgactgatgctgctggtgatagacctgtgattcttgtaaatcctcgcctaaaggatatgcctgcatcaagtggtgttatgcaagatggcttatccaaataaatatgagatttatcgaagggttgacactctcaatggaaaagagaactatattcttatagctgaattcacgaacaagccaactcctgatgagatcaccagtgctttcaaaggacaaaaaagggaggaacactagaggaaggacctcgagcaagaaccattggaggaaaggagcgcacgacaatgctaagagaagaggagagaggagggtagtagatttctaatgattgaaaagggaagaaaaggcatcttctggattctggggtttcttaagtggtttattttaagtcaagcgatctgctgtacggcgatgcaatcctccttgtatatttttatctgataatggatgtaatatggttcggaaaatatccgttcggatcaggattcgaagatggtgaacactggttcagatggaattttcggatatccggacttttttcggataacggatacgaatacgaatattttgttcggatatcgaattcgaatacaatatgtctgatattcgtcggatatcgaatatctggatattttctcggataaatcttctcggatatccggatatcttatctggatagctgtgtgcattttgttgattgtttgtagaaagaaattaataatacacaaatagcctcaaaaattcatgaaaatttatggaggcataccatatgtccacatataatcctccaaaatatttggaccataaaatccacaatattgtagtgtttctttcatttcactttcacttgtgtgaattacatgagaaatcactctaattatccaagttcactttatcattttcatatggagacttgaggttatattcttatagaatgtttattagttttggtaacttatttgcattttaatgattttatacaaaataaattaataacacgcatataggctaaaaattcatgttttttacaaaaaaaaaa

SEQ ID NO: 39687 - DNA, 2267 bp, Zea Mays
gcaaaccaccgtcgtcgttgctgatggggaggccggtggtcaccatgaccgcagggccggtgctggggagggcagggccacaacggggcctgtgggtccgacgaagaaggcctactggggacgttgttactgttgaatccccccgttccccaggccaggccacatggtgatgtgactgatctaggggttgtaggagggccaggcgggagcgggtgcctgttcggcttgggtgcgctgcgtctagagggaagcatcgccaaggttgaccatggagcagattagagctgctagggggcctggcggctatgctaggaaggaaaacgaaaacgatagggaaaatctaggtctctagatacataccatgacagaatgagctgccagatattggattaatggtagaggtacaagggggtataatatataggcatggattgtctaaggtttatagaaagcatgcaatcaatagaaatccttgcataatctaaagcacccaatcaatgaagatctttgtgtaatctatgatttgttctcgaaagcgtaggagagctacacatcatatatataaagaagaaaaaggtctaaaataggccaatacaaaaaactggaaaaaaaacagtggccaagaccagctcatggcggccgaaagcaacaaaacataaaaacatccaacattacagctaggagagactaaatccgcggcaactaccataaacatcaaggcacatatggcagacatgatcaatctaattacatagtctaacactactatgtactaattattgctcaaaagataacatacgatatacacatttttgttcttttcttctcatctttgtttgtttgggattcctacggaagggcctctagctgtgttggttaggtggtccgagtagcactcctcagatcctgggttggactccccgtggaagcgaattttaggctgtggttaaaaaatgtcctcgtttgtcccatgccaaagcacaggtctaaggcccagctccggccgtggtcgttctcacatggactacggtgccgctgtgtacgcgtggggcttatggcgtagctttagcgtcgctaaagcgataaggcgagcgtggaggcataaggcgtcttgtcgccttgcctgcgagagtaagggcggcagcgcgtgtcgcatatctcccgccggcggcgcgcagggaggagagctatggagagggagaagctgctgctatcggctaagggacaatctgctgctagcagctgagaaggtgctagagatgttgacaaagaagatgatatgtttgtcctcattgctccacaaaatgctgttggaaactgcataattgatgatatgagagctatgactgatgctgctggtgatagacctgtgattcttgtaaatcctcgcctaaaggatatgcctgcatcaagtggtgttatgcaagatggcttatccaaataaatatgagatttatcgaagggttgacactctcaatggaaaagagaactatattcttatagctgaattcacgaacaagccaactcctgatgagatcaccagtgctttcaaaggacaaaaaagggaagaaaaggcatcttctggattctggggtttcttaagtggtttattttaagtcaagcgatctgctgtacggcgatgcaatcctccttgtatatttttatctgataatggatgtaatatggttcggaaaatatccgttcggatcaggattcgaagatggtgaacactggttcagatggaattttcggatatccggacttttttcggataacggatacgaatacgaatattttgttcggatatcgaattcgaatacaatatgtctgatattcgtcggatatcgaatatctggatattttctcggataaatcttctcggatatccggatatcttatctggatagctgtgtgcattttgttgattgtttgtagaaagaaattaataatacacaaatagcctcaaaaattcatgaaaatttatggaggcataccatatgtccacatataatcctccaaaatatttggaccataaaatccacaatattgtagtgtttctttcatttcactttcacttgtgtgaattacatgagaaatcactctaattatccaagttcactttatcattttcatatggagacttgaggttatattcttatagaatgtttattagttttggtaacttatttgcattttaatgattttatacaaaataaattaataacacgcatataggctaaaaattcatgttttttacaaaaaaaaaa

SEQ ID NO: 39688 - DNA, 2377 bp, Zea Mays
gcaaaccaccgtcgtcgttgctgatggggaggccggtggtcaccatgaccgcagggccggtgctggggagggcagggccacaacggggcctgtgggtccgacgaagaaggcctactggggacgttgttactgttgaatccccccgttccccaggccaggccacatggtgatgtgactgatctaggggttgtaggagggccaggcgggagcgggtgcctgttcggcttgggtgcgctgcgtctagagggaagcatcgccaaggttgaccatggagcagattagagctgctagggggcctggcggctatgctaggaaggaaaacgaaaacgatagggaaaatctaggtctctagatacataccatgacagaatgagctgccagatattggattaatggtagaggtacaagggggtataatatataggcatggattgtctaaggtttatagaaagcatgcaatcaatagaaatccttgcataatctaaagcacccaatcaatgaagatctttgtgtaatctatgatttgttctcgaaagcgtaggagagctacacatcatatatataaagaagaaaaaggtctaaaataggccaatacaaaaaactggaaaaaaaacagtggccaagaccagctcatggcggccgaaagcaacaaaacataaaaacatccaacattacagctaggagagactaaatccgcggcaactaccataaacatcaaggcacatatggcagacatgatcaatctaattacatagtctaacactactatgtactaattattgctcaaaagataacatacgatatacacatttttgttcttttcttctcatctttgtttgtttgggattcctacggaagggcctctagctgtgttggttaggtggtccgagtagcactcctcagatcctgggttggactccccgtggaagcgaattttaggctgtggttaaaaaatgtcctcgtttgtcccatgccaaagcacaggtctaaggcccagctccggccgtggtcgttctcacatggactacggtgccgctgtgtacgcgtggggcttatggcgtagctttagcgtcgctaaagcgataaggcgagcgtggaggcataaggcgtcttgtcgccttgcctgcgagagtaagggcggcagcgcgtgtcgcatatctcccgccggcggcgcgcagggaggagagctatggagagggagaagctgctgctatcggctaagggacaatctgctgctagcagctgagaaggtgctagagatgttgacaaagaagatgatatgtttgtcctcattgctccacaaaatgctgttggaaactgcataattgatgatatgagagctatgactgatgctgctggtgatagacctgtgattcttgtaaatcctcgcctaaaggatatgcctgcatcaagtggtgttatgcaaacaatgggaagggatattaggctgaagtatgctgcatcatttgagacatgctattcattccgtcttctctactacgctggttcattctatcctattatgggagctttaaggatggcttatccaaataaatatgagatttatcgaagggttgacactctcaatggaaaagagaactatattcttatagctgaattcacgaacaagccaactcctgatgagatcaccagtgctttcaaaggacaaaaaagggaagaaaaggcatcttctggattctggggtttcttaagtggtttattttaagtcaagcgatctgctgtacggcgatgcaatcctccttgtatatttttatctgataatggatgtaatatggttcggaaaatatccgttcggatcaggattcgaagatggtgaacactggttcagatggaattttcggatatccggacttttttcggataacggatacgaatacgaatattttgttcggatatcgaattcgaatacaatatgtctgatattcgtcggatatcgaatatctggatattttctcggataaatcttctcggatatccggatatcttatctggatagctgtgtgcattttgttgattgtttgtagaaagaaattaataatacacaaatagcctcaaaaattcatgaaaatttatggaggcataccatatgtccacatataatcctccaaaatatttggaccataaaatccacaatattgtagtgtttctttcatttcactttcacttgtgtgaattacatgagaaatcactctaattatccaagttcactttatcattttcatatggagacttgaggttatattcttatagaatgtttattagttttggtaacttatttgcattttaatgattttatacaaaataaattaataacacgcatataggctaaaaattcatgttttttacaaaaaaaaaa

SEQ ID NO: 39689 - DNA, 2710 bp, Zea Mays
gaatggatgaagacgttctagatatagagaagtagttttggtgtaatatagtaaaatgtgatagaaagtatatataggataaaaaaaatatgaggaaaatgattggagataagtctctgcccacccaagatcctgaaacgacactcgacacctgcccccagtcgcttgccagaacgccaagcacagccccagcactagacgtgcacacaggagcttgcgctcagctctgctcgccgatccaccataccaaaagcgctctccttcgtctccaaccccaccctccctcacaccctcaccagtcacctccacaaacgagagaataaaggtgaaaggacccctcggattcacaacgaaggcagagcaggaaaggaatttcggaagggacgggtacagcccgcagcgccaccacaagggagcacctggaccaggagcctccaagcgcaagcaaccaagcgcagcgcagagcacaacccgacgcccagcacaaccagcagccagggcagcataaagcaatgcagccgggaggcgcggcttccagtaccgccaccggtggacggaggcgcgtgtcggtgcagtccaccaggagcgccggcgccacaccggcgtcgtcggtgtgggaggcgcggatgaagatggacgaggtcaggggcggcgtcaaggtcttcagcgccggcgccgccgacgagccggcggacgaggagggcgtgcgggtctaccgccgcctgcgccgcaaccagagcgagggcggcggcgccggtgccgcggacaccgccgccaagaagaggcgcagctggaaggcttccaagccggtcaccgcgatcggggacctccgcaagtcgcgctccgacgccgccgccgccgtgacgacggccaccaccaccgccactgcggtggttgctaggcgggccgtggcgcgggtatccatgcccgagaagaaggtggcgccggcgccagcggccgccgccggcgaggtcaaggaggtggtggtcgtggaagtgcacaaggctgcggcggcagacgcgaagaacgtggcgcgaggaccagatgaggagttggacgacgacgacgacgaccacgacgacggcgcggagggtgaattgttggacgaggagcaggagacagacgaggaggaagaaaaagagatgctggatctgcaggatcacatggccattgacgacgacgagcaaactgctccgcaccaagtggacgacgacgacgagcaagatcttgagccaccgacaaaagggattaagcccacgctgtcggtggaagaagagagagcgaccaacccagagccggtgaagccgccgcctccagggaagaaactagcctcggtggtcgatctccgagcggtcaatccggaacccatgacccctgctcctccgccagtcgagaagaaggcgacaccgatagtggttcaccgcatgaccaacttcgagctggcacaatcttttccagagaagaaagctttgccggcggtgggtccccggattccgaagacagagcctgccagcagtcctcctggtggtgaggagtatgaggagatccaaggaagaccatctcaaccgagcagaagtcaagcgagaatgcagaacattgtgaatctggtgatgtggaccgacgtgtcaaaatccgcgctggtgttcggactagggactttcttgctcgtctcctcctcctacgccaaagacctaaacttcaacacgatcacggcggcgtcgtatgcaggcctgatctacctcggtctacgcttcctgcgcaagtccatactgagcaggggtgaaagtgtggagtgcgacgatgatggaggcgtcggcggcgataggtgctgctacctggtcggggaggaggatgccgtgtggctgctgaggctggtgctgccgtacgtcaacgaggtgctgctaaacctgaggtctctcttctccggcgagcctgcgaccaccatgaagctggcgctgatactgttcgcgatggcccggtgcggcaactttgtcaccctctggacgctggccaaactggtgttctttggggtcttcatcatccccaaggtgtgctcctcttactccacgcagctggcacgatacggcaggttctggctggagaggctgagggacgcctgggagtcgtgcacccacaagaaggccgtggtggcggccgccttcacgctggtctggaacgtctcgtccacggcgtcgcgcgtctgggcggtgttcatgctggcggtggccgtcaagtgctaccaccagcgcgtcggggagttcggctggagcagcagcagcgcgggggcgcaggaacagccagcggacgacgacgacgagccgccgccgccgccgccgaagcacagggcccaggacgagtcgtcgtcgccgcggcaggagttcggggcgccgccgcggcacaggcgggcgccggtctccggcgagttcgcccgcgagaggctcagggctcggggcggcatccagcctcggtgacggttggggttgcatttagaggctgcatgaggctttgatctgttgcggtcctgctcctgcgatcggcaggcaataacgagggatcccatacacgcagacgcagtgtgttcgcgctaaacgcctcgaccaaaccactcgagcccactgctaatgagccacgaatggagttggttggggggatggttcgttctagtggttcgttgaaacaatagagtggttctgctttcgtatttggttca

SEQ ID NO: 39690 - DNA, 2783 bp, Zea Mays
gaatggatgaagacgttctagatatagagaagtagttttggtgtaatatagtaaaatgtgatagaaagtatatataggataaaaaaaatatgaggaaaatgattggagataagtctctgcccacccaagatcctgaaacgacactcgacacctgcccccagtcgcttgccagaacgccaagcacagccccagcactagacgtgcacacaggagcttgcgctcagctctgctcgccgatccaccataccaaaagcgctctccttcgtctccaaccccaccctccctcacaccctcaccagtcacctccacaaacgagagaataaaggtgaaaggacccctcggattcacaacggtaaagcctgcggcaccctgctccttacagcccactcaccactctcgctccaactccgagtttgagtgcagcagaaggcagagcaggaaaggaatttcggaagggacgggtacagcccgcagcgccaccacaagggagcacctggaccaggagcctccaagcgcaagcaaccaagcgcagcgcagagcacaacccgacgcccagcacaaccagcagccagggcagcataaagcaatgcagccgggaggcgcggcttccagtaccgccaccggtggacggaggcgcgtgtcggtgcagtccaccaggagcgccggcgccacaccggcgtcgtcggtgtgggaggcgcggatgaagatggacgaggtcaggggcggcgtcaaggtcttcagcgccggcgccgccgacgagccggcggacgaggagggcgtgcgggtctaccgccgcctgcgccgcaaccagagcgagggcggcggcgccggtgccgcggacaccgccgccaagaagaggcgcagctggaaggcttccaagccggtcaccgcgatcggggacctccgcaagtcgcgctccgacgccgccgccgccgtgacgacggccaccaccaccgccactgcggtggttgctaggcgggccgtggcgcgggtatccatgcccgagaagaaggtggcgccggcgccagcggccgccgccggcgaggtcaaggaggtggtggtcgtggaagtgcacaaggctgcggcggcagacgcgaagaacgtggcgcgaggaccagatgaggagttggacgacgacgacgacgaccacgacgacggcgcggagggtgaattgttggacgaggagcaggagacagacgaggaggaagaaaaagagatgctggatctgcaggatcacatggccattgacgacgacgagcaaactgctccgcaccaagtggacgacgacgacgagcaagatcttgagccaccgacaaaagcagggattaagcccacgctgtcggtggaagaagagagagcgaccaacccagagccggtgaagccgccgcctccagggaagaaactagcctcggtggtcgatctccgagcggtcaatccggaacccatgacccctgctcctccgccagtcgagaagaaggcgacaccgatagtggttcaccgcatgaccaacttcgagctggcacaatcttttccagagaagaaagctttgccggcggtgggtccccggattccgaagacagagcctgccagcagtcctcctggtggtgaggagtatgaggagatccaaggaagaccatctcaaccgagcagaagtcaagcgagaatgcagaacattgtgaatctggtgatgtggaccgacgtgtcaaaatccgcgctggtgttcggactagggactttcttgctcgtctcctcctcctacgccaaagacctaaacttcaacacgatcacggcggcgtcgtatgcaggcctgatctacctcggtctacgcttcctgcgcaagtccatactgagcaggggtgaaagtgtggagtgcgacgatgatggaggcgtcggcggcgataggtgctgctacctggtcggggaggaggatgccgtgtggctgctgaggctggtgctgccgtacgtcaacgaggtgctgctaaacctgaggtctctcttctccggcgagcctgcgaccaccatgaagctggcgctgatactgttcgcgatggcccggtgcggcaactttgtcaccctctggacgctggccaaactggtgttctttggggtcttcatcatccccaaggtgtgctcctcttactccacgcagctggcacgatacggttctggctggagaggctgagggacgcctgggagtcgtgcacccacaagaaggccgtggtggcggccgccttcacgctggtctggaacgtctcgtccacggcgtcgcgcgtctgggcggtgttcatgctggcggtggccgtcaagtgctaccaccagcgcgtcggggagttcggctggagcagcagcagcgcgggggcgcaggaacagccagcggacgacgacgacgagccgccgccgccgccgccgaagcacagggcccaggacgagtcgtcgtcgccgcggcaggagttcggggcgccgccgcggcacaggcgggcgccggtctccggcgagttcgcccgcgagaggctcagggctcggggcggcatccagcctcggtgacggttggggttgcatttagaggctgcatgaggctttgatctgttgcggtcctgctcctgcgatcggcaggcaataacgagggatcccatacacgcagacgcagtgtgttcgcgctaaacgcctcgaccaaaccactcgagcccactgctaatgagccacgaatggagttggttggggggatggttcgttctagtggttcgttgaaacaatagagtggttctgctttcgtatttggttca

SEQ ID NO: 39691 - DNA, 2713 bp, Zea Mays
gaatggatgaagacgttctagatatagagaagtagttttggtgtaatatagtaaaatgtgatagaaagtatatataggataaaaaaaatatgaggaaaatgattggagataagtctctgcccacccaagatcctgaaacgacactcgacacctgcccccagtcgcttgccagaacgccaagcacagccccagcactagacgtgcacacaggagcttgcgctcagctctgctcgccgatccaccataccaaaagcgctctccttcgtctccaaccccaccctccctcacaccctcaccagtcacctccacaaacgagagaataaaggtgaaaggacccctcggattcacaacgcagaaggcagagcaggaaaggaatttcggaagggacgggtacagcccgcagcgccaccacaagggagcacctggaccaggagcctccaagcgcaagcaaccaagcgcagcgcagagcacaacccgacgcccagcacaaccagcagccagggcagcataaagcaatgcagccgggaggcgcggcttccagtaccgccaccggtggacggaggcgcgtgtcggtgcagtccaccaggagcgccggcgccacaccggcgtcgtcggtgtgggaggcgcggatgaagatggacgaggtcaggggcggcgtcaaggtcttcagcgccggcgccgccgacgagccggcggacgaggagggcgtgcgggtctaccgccgcctgcgccgcaaccagagcgagggcggcggcgccggtgccgcggacaccgccgccaagaagaggcgcagctggaaggcttccaagccggtcaccgcgatcggggacctccgcaagtcgcgctccgacgccgccgccgccgtgacgacggccaccaccaccgccactgcggtggttgctaggcgggccgtggcgcgggtatccatgcccgagaagaaggtggcgccggcgccagcggccgccgccggcgaggtcaaggaggtggtggtcgtggaagtgcacaaggctgcggcggcagacgcgaagaacgtggcgcgaggaccagatgaggagttggacgacgacgacgacgaccacgacgacggcgcggagggtgaattgttggacgaggagcaggagacagacgaggaggaagaaaaagagatgctggatctgcaggatcacatggccattgacgacgacgagcaaactgctccgcaccaagtggacgacgacgacgagcaagatcttgagccaccgacaaaagggattaagcccacgctgtcggtggaagaagagagagcgaccaacccagagccggtgaagccgccgcctccagggaagaaactagcctcggtggtcgatctccgagcggtcaatccggaacccatgacccctgctcctccgccagtcgagaagaaggcgacaccgatagtggttcaccgcatgaccaacttcgagctggcacaatcttttccagagaagaaagctttgccggcggtgggtccccggattccgaagacagagcctgccagcagtcctcctggtggtgaggagtatgaggagatccaaggaagaccatctcaaccgagcagaagtcaagcgagaatgcagaacattgtgaatctggtgatgtggaccgacgtgtcaaaatccgcgctggtgttcggactagggactttcttgctcgtctcctcctcctacgccaaagacctaaacttcaacacgatcacggcggcgtcgtatgcaggcctgatctacctcggtctacgcttcctgcgcaagtccatactgagcaggggtgaaagtgtggagtgcgacgatgatggaggcgtcggcggcgataggtgctgctacctggtcggggaggaggatgccgtgtggctgctgaggctggtgctgccgtacgtcaacgaggtgctgctaaacctgaggtctctcttctccggcgagcctgcgaccaccatgaagctggcgctgatactgttcgcgatggcccggtgcggcaactttgtcaccctctggacgctggccaaactggtgttctttggggtcttcatcatccccaaggtgtgctcctcttactccacgcagctggcacgatacggcaggttctggctggagaggctgagggacgcctgggagtcgtgcacccacaagaaggccgtggtggcggccgccttcacgctggtctggaacgtctcgtccacggcgtcgcgcgtctgggcggtgttcatgctggcggtggccgtcaagtgctaccaccagcgcgtcggggagttcggctggagcagcagcagcgcgggggcgcaggaacagccagcggacgacgacgacgagccgccgccgccgccgccgaagcacagggcccaggacgagtcgtcgtcgccgcggcaggagttcggggcgccgccgcggcacaggcgggcgccggtctccggcgagttcgcccgcgagaggctcagggctcggggcggcatccagcctcggtgacggttggggttgcatttagaggctgcatgaggctttgatctgttgcggtcctgctcctgcgatcggcaggcaataacgagggatcccatacacgcagacgcagtgtgttcgcgctaaacgcctcgaccaaaccactcgagcccactgctaatgagccacgaatggagttggttggggggatggttcgttctagtggttcgttgaaacaatagagtggttctgctttcgtatttggttca

SEQ ID NO: 39692 - DNA, 2713 bp, Zea Mays
gaatggatgaagacgttctagatatagagaagtagttttggtgtaatatagtaaaatgtgatagaaagtatatataggataaaaaaaatatgaggaaaatgattggagataagtctctgcccacccaagatcctgaaacgacactcgacacctgcccccagtcgcttgccagaacgccaagcacagccccagcactagacgtgcacacaggagcttgcgctcagctctgctcgccgatccaccataccaaaagcgctctccttcgtctccaaccccaccctccctcacaccctcaccagtcacctccacaaacgagagaataaaggtgaaaggacccctcggattcacaacgaaggcagagcaggaaaggaatttcggaagggacgggtacagcccgcagcgccaccacaagggagcacctggaccaggagcctccaagcgcaagcaaccaagcgcagcgcagagcacaacccgacgcccagcacaaccagcagccagggcagcataaagcaatgcagccgggaggcgcggcttccagtaccgccaccggtggacggaggcgcgtgtcggtgcagtccaccaggagcgccggcgccacaccggcgtcgtcggtgtgggaggcgcggatgaagatggacgaggtcaggggcggcgtcaaggtcttcagcgccggcgccgccgacgagccggcggacgaggagggcgtgcgggtctaccgccgcctgcgccgcaaccagagcgagggcggcggcgccggtgccgcggacaccgccgccaagaagaggcgcagctggaaggcttccaagccggtcaccgcgatcggggacctccgcaagtcgcgctccgacgccgccgccgccgtgacgacggccaccaccaccgccactgcggtggttgctaggcgggccgtggcgcgggtatccatgcccgagaagaaggtggcgccggcgccagcggccgccgccggcgaggtcaaggaggtggtggtcgtggaagtgcacaaggctgcggcggcagacgcgaagaacgtggcgcgaggaccagatgaggagttggacgacgacgacgacgaccacgacgacggcgcggagggtgaattgttggacgaggagcaggagacagacgaggaggaagaaaaagagatgctggatctgcaggatcacatggccattgacgacgacgagcaaactgctccgcaccaagtggacgacgacgacgagcaagatcttgagccaccgacaaaagcagggattaagcccacgctgtcggtggaagaagagagagcgaccaacccagagccggtgaagccgccgcctccagggaagaaactagcctcggtggtcgatctccgagcggtcaatccggaacccatgacccctgctcctccgccagtcgagaagaaggcgacaccgatagtggttcaccgcatgaccaacttcgagctggcacaatcttttccagagaagaaagctttgccggcggtgggtccccggattccgaagacagagcctgccagcagtcctcctggtggtgaggagtatgaggagatccaaggaagaccatctcaaccgagcagaagtcaagcgagaatgcagaacattgtgaatctggtgatgtggaccgacgtgtcaaaatccgcgctggtgttcggactagggactttcttgctcgtctcctcctcctacgccaaagacctaaacttcaacacgatcacggcggcgtcgtatgcaggcctgatctacctcggtctacgcttcctgcgcaagtccatactgagcaggggtgaaagtgtggagtgcgacgatgatggaggcgtcggcggcgataggtgctgctacctggtcggggaggaggatgccgtgtggctgctgaggctggtgctgccgtacgtcaacgaggtgctgctaaacctgaggtctctcttctccggcgagcctgcgaccaccatgaagctggcgctgatactgttcgcgatggcccggtgcggcaactttgtcaccctctggacgctggccaaactggtgttctttggggtcttcatcatccccaaggtgtgctcctcttactccacgcagctggcacgatacggcaggttctggctggagaggctgagggacgcctgggagtcgtgcacccacaagaaggccgtggtggcggccgccttcacgctggtctggaacgtctcgtccacggcgtcgcgcgtctgggcggtgttcatgctggcggtggccgtcaagtgctaccaccagcgcgtcggggagttcggctggagcagcagcagcgcgggggcgcaggaacagccagcggacgacgacgacgagccgccgccgccgccgccgaagcacagggcccaggacgagtcgtcgtcgccgcggcaggagttcggggcgccgccgcggcacaggcgggcgccggtctccggcgagttcgcccgcgagaggctcagggctcggggcggcatccagcctcggtgacggttggggttgcatttagaggctgcatgaggctttgatctgttgcggtcctgctcctgcgatcggcaggcaataacgagggatcccatacacgcagacgcagtgtgttcgcgctaaacgcctcgaccaaaccactcgagcccactgctaatgagccacgaatggagttggttggggggatggttcgttctagtggttcgttgaaacaatagagtggttctgctttcgtatttggttca

SEQ ID NO: 39693 - DNA, 1288 bp, Zea Mays
gcgtcgcgtcacaaaaaccatcacaacatttgaatcgatcgctgaactttaatttttgaaggcgaggaattttaagttgactcatcaaaagccttcgactaattgactgccggccggccgcccggccgtgtgtgaaattccattggagacttgtcttaatctacggaaagtcagatctgtcgcgtcgagtatcgatgagcttgacaacgagaactgatgactcgaagttgtgttcggtttatgtggcagtagtttatggacttggtgaataatgcttgtcatggttttttacagagtggagcctaggctgtaaataatgcttgtatagttttaggcctgattttctttttttaaatgaatcgattctttattttttcttcttaggttccgtttgtttggttggaattaaattccattccaataatcataatttagacacaaactaattaagttattatatttgtatatgtaatttatttgtatattagcttaaattatatgagagaaatagttatacactgtaggatgttgctggacatctataaaaaacaagtagaaaagtgtattataagttgtatattagaaaagtagcatgtaaatctatagaatcagtttctatatgtcacccataaatttgagatatgtttatatataaacgttgaaaagttatgaaatatcaaattctaaaaaaatagactacttcattaattagttttcaattcctcaaaatcaaggtaaacaaacgggcccttatactaatatatgccggaacaaaacgttctcagatctttataaaaacataacgtagagtgagccgttgatctggacctcatgggctgatagttgtcttgtctgctgccagccgccagtctttgcaacacacattcatggagtggtcaaagcttatccctctatgactatggtccatgccatgagccccccaaagttgaccataccattgtggcttatcaaaagggtaaagggttgaatgcagcgtacctactgtcgactggactagaagggtcaaaagggttgcttgagtcgaccaaaccactacctcctctttacccaacgcgtcatatgagggatttgtactacgccgaggaaaattgttgtcaaagttttagcggttaatatgaggtatgtattatacggttacccgtgacagtagatggcaataaaaaaaagacgaagcaagcactgatctagaattttccggtagggttttgagatttgtcgaacactctgaacgacaagaacacggaagcaagcggttacctgcaatgag

SEQ ID NO: 39694 - DNA, 772 bp, Zea Mays
cttagataatccattctcacaaaagctgttctgacagccctacataggatatgttcgcctttccaaaggaaaaacagagatagaatcctacctatctagcatggcgaccggcgacgagtcggagacggcggtgcgggcgtctgaggagttgcgggactggtccgacatgacgccagtgtgtcttgccgaagcgttctcgcggctggcgctggaggacctgtggcgcggcgccatgccgtgctgtcgctcctggcgggacgccgcgcgctcgcgcccgggactcttcgcggtgcttgacctcgagcccgggtttgctgagtccacacctggcgccgaggcggcagcgtggtggacgccctccttccagcgccgtgtcgacgccatggtgcgctccgccgccacgttcgccgtgggggagctgtgtgagatccatgtccgccactgttccgacgacgcgctcgccttcgccgccgagaggagaatcagattatctgaaatgatgcgtatgcaattggatgcacctccctaagcaaaatttctggttaagttgtttaaattgcagaggcaattctatgtgtgcatctttctgcttgaggtttcgaaattttatcttttcatacaaagtagcgaattccctagagaacccaaaattccaagttctggtcctcgttcatgtgatggtaatggcttgctgcatactctcatttcatgactttttaggcagtggcttgctaggactaatgaattgacagacatgtttatggtaatttga

SEQ ID NO: 39695 - DNA, 604 bp, Zea Mays
cttagataatccattctcacaaaagctgttctgacagccctacataggatatgttcgcctttccaaaggaaaaacagagatagaatcctacctatctagcatggcgaccggcgacgagtcggagacggcggtgcgggcgtctgaggagttgcgggactggtccgacatgacgccagtgtgtcttgccgaagcgttctcgcggctggcgctggaggacctgtggcgcggcgccatgccgtgctgtcgctcctggcgggacgccgcgcgctcgcgcccgggactcttcgcggtgcttgacctcgagcccgggtttgctgagtccacacctggcgccgaggcggcagcgtggtggacgccctccttccagcgccgtgtcgacgccatggtgcgctccgccgccacgttcgccgtgggggagctgtgtgagatccatgtccgccactgttccgacgacgcgctcgccttcgccgccgagaggatcgcaaaacaggggatgtgattgggactgaccgtcgccgtaaatcttcgcctcgcctttacatcttggacaccttgcgccttccttcatcccctacaactacacctcatgtgctcgctgcttcgg

SEQ ID NO: 39696 - DNA, 1250 bp, Zea Mays
acaaaaccaaacgccgtcacttcccatctttcagtccaccccagatggccctcaaagccgccgtctccgtcaccccgttgctgccgtcgcctcccctccgccgtctcctgctctccccctctcctagctccgcggcggctcgtaggatcgcgagggtttccgcggcgatggcgacgacagaggtgcacccagccgtggtggtgggcggcggccgcgtaggccaggcgctcgtgtccatgggcccgccgggaggtgacgtcctcgtgggccgcggagagaaggtacccgacgatgcgcctggaccgatactggtgtgcacgcgcaacgacgacctcgacgccgtgctcgaggccacccccaagtcgcgctggcgcgaatggaatgctggatccatggtttaagatcaagggcctagtgggtgcaaaccaggtgttggcctacttcgctgtatcaaaggttggagagccaccagtcgatgggattactgataccaacccagaggggttgactgctgcatttggcagctgggctcctgcagtggctgcccgcctgcaaaatggtggacttacctgcaaggtgcttgaaaaggaagcctttcagaagcagatgctagagaagttgatatggatttcagctttcatgcttgttggtgctcggcatccaggggctactgttggtgtggtggaaaagaattaccgatctgaggttgcgagcctgatagctgaattagcatcggctgcggctgcagaggagcagctcacattcgccgaaggcatggaggatcggctctgtgcttactccagggctgtggcacacttccctacagctgtgaaagagttcaagtggaggaatggctggttttactccctcaccgagaaggcgcttgcagcaggaaagccagatccttgcccactacacacagcttggctcaaggagattagggtcatataaattgttttcatgtacatgagcttcgttagaagcatgaaacagttgcatgttgcctatatagagaaaattgcttttgccacgttaaccttttggtatcgtgtgtcaaaacaaaatgcctgaaaggtttgctgccatccgtgtcgaaaggtcgaatcaaactgggactacacatgtattaaaccacatcatagaggccatgtaagagtatctccatgtaacacctcgttcaatctcggaccggcgatatttacttctggcagccctttaagatcatatattgtccctcataaactaacata

SEQ ID NO: 39697 - DNA, 1021 bp, Zea Mays
aatttccatcatccgctcatcaacatcacagtgaatcaacaggtttcaggggaagacaggagcatgtggaatcccgtggtgaattcagaggtggtccttctagaccatctggtgatgttcatcagcattcataccattctcatcagaatggaatgctggatccatggtttaagatcaagggcctagtgggtgcaaaccaggtgttggcctacttcgctgtatcaaaggttggagagccaccagtcgatgggattactgataccaacccagaggggttgactgctgcatttggcagctgggctcctgcagtggctgcccgcctgcaaaatggtggacttacctgcaaggtgcttgaaaaggaagcctttcagaagcagatgctagagaagttgatatggatttcagctttcatgcttgttggtgctcggcatccaggggctactgttggtgtggtggaaaagaattaccgatctgaggttgcgagcctgatagctgaattagcatcggctgcggctgcagaggagcagctcacattcgccgaaggcatggaggatcggctctgtgcttactccagggctgtggcacacttccctacagctgtgaaagagttcaagtggaggaatggctggttttactccctcaccgagaaggcgcttgcagcaggaaagccagatccttgcccactacacacagcttggctcaaggagattagggtcatataaattgttttcatgtacatgagcttcgttagaagcatgaaacagttgcatgttgcctatatagagaaaattgcttttgccacgttaaccttttggtatcgtgtgtcaaaacaaaatgcctgaaaggtttgctgccatccgtgtcgaaaggtcgaatcaaactgggactacacatgtattaaaccacatcatagaggccatgtaagagtatctccatgtaacacctcgttcaatctcggaccggcgatatttacttctggcagccctttaagatcatatattgtccctcataaactaacata

SEQ ID NO: 39698 - DNA, 3181 bp, Zea Mays
attaaatgcaagcttgatctctgggcatcagaaactcgaaagaaatagcccagacagcccacgatcggcccagtctcatcgcaaacgcacgcgcacgtcgccgtcgccccgctgtaaccctacctgccccccgaagcttccccgtccttctccttgcggcggccgcgggcggcgcggccagtcggcggccacccgcccccatctcctactttagcctcccaacctcaccgccgctgctcgcctctcccccgcccccttccccactccgccccgtatttcttctccttggcgctcaggaggacccctcaatccacctggtgggatctgatcgcaatcggatccctctcttccgccgcggccgcctctccggggaggagccccgggctcgaagagacggaggcgagggtagacgacggaggcgaggaggacgacgaggcggaggaggggaagcccatgccggccgccggttcccgccgattcactcgcgtcttcatgcccaaggcccccaagccgccgcaatcccaggaccaggccgaccgcgccacccgggtccttcgctccgaaaacggcgccgccggaggcaccccaccgctgaggttgtccccgaggacgaggacggcatcaggaggtttgggatagtatacaccaggaagaagggcaagcgatccaaggtcagccctctcctgctcccgcaagagccagaggccccctgtgacctcgccgctgcgattccatgctcctcctcccgggagtttgcttcacgaactggcttcttggatgcccatttctcggccctggtagatggtgtctccactcactctggggttcagacgctcgttgtccttgttgatacgtcttgctctgggagctctcaccggctccttggatttcttctacccgtgctgtggtggatgcgccacagtaggcagcggggaaagttccagaaccttgccactttcattttgtctgctggtgtggcggttgcgtttgcatcccacggggtgcactttgtcaagctccagagtgcctctgcattgttacataggcctcttgcgcattgtgggtggtgtgcgcttcatggttccacgaaatctgaaccacttttgtcagtcgatttctcagcacttccttcatacttttggagcttgcattatgccgtagctcttgattcgatgtatctgccacctatgattcggcacagctggctgctggttgggggatctgaagaaatctatcctcacactcctttgtatgtggattctggggctcagagcagtggttttgccactacgaacatggacagcaatgaaccttgcagagtggttccaaactacatgccccttgaacagggtgctggtctagtggttcatggtctgaggctaaagaagcatcaaaggcggaggagaactatgaggcatccccaaaattggcggtgtcttatagcaagattaccttacaatggaattgggatgaagcagagcacgtctgccatgcaaacaggagtaaagctgcggtcaagcaggcaagaatctcctgtggagcctgtccaacctaaagcagcattaggaatttctcttgatttgcttgaaaacatggacgaaagtgatgtttcaactcccatgggatcaactaggagaaagagatctttgaagagccctgttgagagaatgaatgaaaagctggccttggctgaggtgagacaggacatagattctgttcacagcaaagcaaaccttttagtttttcaagctgataggtgctggagggaggaaggtgccgaagttatgctagaactatcagaaaccaataagtggtgtatagttgtgaagatacaaggtgttactaggtacttgcttaaaccttcagatatgaggtcatatgtcattaatcgtcatactcaagcctacatgtggacagttgatgatgcatggaagcttgagttcactgataggtgggactggctgttattcaaagagttgcatgttgtgggctgtgagcgtaattctcagggaaaggcaatcccaattcctggggtacatgaagtttctggtgagatggaagggattgttacagatcctttcttacgccctgtgccagactatatcaggatggtggatgatgaagttgggcgagctctctcaagggattctatttatgacatggactcagaagatgaacaatggctcattcagttgaaccattcagattctgatccaaacagctctcaaaggaatcatatctcttacgaagactttgaagtgttaataagcatatttgaaaaggatgcctacaacaatccccaagggaaaaatgatttgagcgagcttctttccagatatcctgctttactaaaggatgataacgtgcatgctgtgtatgggtattggacgagtaagaggtccaagagagctgcaccattgctaagggtatttcagggcgcacccataaggcgaggacatctaccacaaaagtctgccatgaagcgaaagagatctttcaagagacaaaaaagccgagctggccgtggaaagcatgaagctttattgcaagacaatgctgaagatgaggcagctttgcagagagttgcccaagctgatcgtgcagcaaaacgggctctagaaacagctattcaactgcgcaacagagcccagtctctcatgacaaacgcagagctcgcagcatacaaatccatcatggctctcaggatcgctgaggctgctaggatatctgactcttcccgagatattgtttgtacaatcctcgactaaagatggatatgggctgatcgatttgtgtggagggcatggggaatactctttttttttctttggttgcatcattgcccatgatgttggcttttcgacaagctgtggggctattttttcgccctcccctcgggttgtcaactttgtcaagccaattttgaggtggaatgcttgaactgaaaactgtaattccttgtataaattaaagtagctagctaggttctgtatcttatgggatctgatatgtagaaatgatgaaaggaaaaggtaaaaaaaatgcatgagatgaagcgaaatcaagcatctgtttgcatcctttttgtgtgtgtgtgtgtgtctatatatatatatatatatatatatatatatatatatatatatataagcaaaataaagcttatatttgtattggataa

SEQ ID NO: 39699 - DNA, 3332 bp, Zea Mays
ccgaagcttccccgtccttctccttgcggcggccgcgggcggcgcggccagtcggcggccacccgcccccatctcctactttagcctcccaacctcaccgccgctgctcgcctctcccccgcccccttccccactccgccccgtatttcttctccttggcgctcaggaggacccctcaatccacctggtgggatctgatcgcaatcggatccctctcttccgccgcggccgcctctccggggaggagccccgggctcgaagagacggaggcgagggtagacgacggaggcgaggaggacgacgaggcggaggaggggaagcccatgccggccgccggttcccgccgattcactcgcgtcttcatgcccaaggcccccaagccgccgcaatcccaggaccaggccgaccgcgccacccgggtccttcgctccggtaagcgcctagccgccgacaggatccgctgggacgccaaggaggccgcagcctttcacgtcgacatcaaccacggccacgtccagaagcgccaaaaagaggattttcccaaaccgggattgccacctctgacgaagtccttcggtatcgtgtacagaagaaaacggcgccgccggaggcaccccaccgctgaggttgtccccgaggacgaggacggcatcaggaggtttgggatagtatacaccaggaagaagggcaagcgatccaaggtcagccctctcctgctcccgcaagagccagaggccccctgtgacctcgccgctgcgattccatgctcctcctcccgggagtttgcttcacgaactggcttcttggatgcccatttctcggccctggtagatggtgtctccactcactctggggttcagacgctcgttgtccttgttgatacgtcttgctctgggagctctcaccggctccttggatttcttctacccgtgctgtggtggatgcgccacagtaggcagcggggaaagttccagaaccttgccactttcattttgtctgctggtgtggcggttgcgtttgcatcccacggggtgcactttgtcaagctccagagtgcctctgcattgttacataggcctcttgcgcattgtgggtggtgtgcgcttcatggttccacgaaatctgaaccacttttctggctgctggttgggggatctgaagaaatctatcctcacactcctttgtatgtggattctggggctcagagcagtggttttgccactacgaacatggacagcaatgaaccttgcagagtggttccaaactacatgccccttgaacagggtgctggtctagtggttcatggtctgaggctaaagaagcatcaaaggcggaggagaactatgaggcatccccaaaattggcggtgtcttatagcaagattaccttacaatggaattgggatgaagcagagcacgtctgccatgcaaacaggagtaaagctgcggtcaagcaggcaagaatctcctgtggagcctgtccaacctaaagcagcattaggaatttctcttgatttgcttgaaaacatggacgaaagtgatgtttcaactcccatgggatcaactaggagaaagagatctttgaagagccctgttgagagaatgaatgaaaagctggccttggctgaggtgagacaggacatagattctgttcacagcaaagcaaaccttttagtttttcaagctgataggtgctggagggaggaaggtgccgaagttatgctagaactatcagaaaccaataagtggtgtatagttgtgaagatacaaggtgttactaggtacttgcttaaaccttcagatatgaggtcatatgtcattaatcgtcatactcaagcctacatgtggacagttgatgatgcatggaagcttgagttcactgataggtgggactggctgttattcaaagagttgcatgttgtgggctgtgagcgtaattctcagggaaaggcaatcccaattcctggggtacatgaagtttctggtgagatggaagggattgttacagatcctttcttacgccctgtgccagactatatcaggatggtggatgatgaagttgggcgagctctctcaagggattctatttatgacatggactcagaagatgaacaatggctcattcagttgaaccattcagattctgatccaaacagctctcaaaggaatcatatctcttacgaagactttgaagtgttaataagcatatttgaaaaggatgcctacaacaatccccaagggaaaaatgatttgagcgagcttctttccagatatcctgctttactaaaggatgataacgtgcatgctgtgtatgggtattggacgagtaagaggtccaagagagctgcaccattgctaagggtatttcaggtaattttgtggggtttgtcatacccatttccatgctcatcgatactttgttatatcgtttcccttttctactgtctagccttgtttacaccatctaactgataccagttacctaataccaaagattaattctttttacagctattccctgttgtttctctttttgtcaagttttcatttattgtatattatctaattgatagtgtttaaatcttagggcgcacccataaggcgaggacatctaccacaaaagtctgccatgaagcgaaagagatctttcaagagacaaaaaagccgagctggccgtggaaagcatgaagctttattgcaagacaatgctgaagatgaggcagctttgcagagagttgcccaagctgatcgtgcagcaaaacgggctctagaaacagctattcaactgcgcaacagagcccagtctctcatgacaaacgcagagctcgcagcatacaaatccatcatggctctcaggatcgctgaggctgctaggatatctgactcttcccgagatattgtttgtacaatcctcgactaaagatggatatgggctgatcgatttgtgtggagggcatggggaatactctttttttttctttggttgcatcattgcccatgatgttggcttttcgacaagctgtggggctattttttcgccctcccctcgggttgtcaactttgtcaagccaattttgaggtggaatgcttgaactgaaaactgtaattccttgtataaattaaagtagctagctaggttctgtatcttatgggatctgatatgtagaaatgatgaaaggaaaaggtaaaaaaaatgcatgagatgaagcgaaatcaagcatctgtttgcatcctttttgtgtgtgtgtgtgtgtctatatatatatatatatatatatatatatatatatatatatatataagcaaaataaagcttatatttgtattggataa

SEQ ID NO: 39700 - DNA, 1997 bp, Zea Mays
aaactagtaagttatatagaaatataaatatagagaaaaccgttacaacaccgttacaacagtcttatttcttgagcatacatgtacaccacttatgttcatcaactaccaacacccataaatcattgtattaaccctatatataaacatgagctgcatactaactttacaattttaattattttaaaaacaaaaccacatataagcatctgagtatttttttaattgcttaagatttacaaaatccatgggaacagttgcagttcggatttccgtccatttcccaggttctcaccggttcctcaaaccctaaaacctccaaaccccagcaatggcggattccccttcgttccgtcgctacccgctcgcctcctccgtcgacctcgtccgctggctcccttcctcctccatctccccttccggtcgcctcctcgccgccgccgtccacgatcccacctccggctccttcgcctccagcatccgccttctccccctctccgaccctgtctcccggctcgcctccgtcccgctcccgtcccgcgccacggcactccgctgctccaatgctgcgctcgccgctgccacctcctcgggctcgctccacttcgttccctcctcattcgactcggacgccgcagtgtccgtccccggcggcgcgggcttccatgtcggtcctgtccggggcctcgactgcggcggggaggagtgggtcacagcgggagaagacggaagagtgcatgtggtcggcggtgtagctgacgggagagtggtaacgaggagggtgtgggacgggaaaggaatgtcagggtatgaagctgccagatgggcttcgccggtggagtttgccacgggtggagccggatgtggtgttcagtggtgggatcggaggaaaggggacgccatcgtggcgcagtgtaacggcatctgtacaggggccgtggcatagttactggcatggtgcattccattgacattcatccatcaagaaagcatatctgcgtggtgggaggttcatcggggaccgtatttgcctgggatctgcggcagccacaggagccgataccaatctctgttctaggtcttaatgaaacagctgagcctgtgtgtgaaagtgaggtttgggaggttcttttcgacacttacactaagtcttccgatatcatctcatctgcatctgcaagaatattgccagtgatgatgtgttcagaggatgggatccttgcagtcgtcgaacaagataagagaccccttgaattgcttgctgaatcttgtgccatcaactccttcgacatagatcctcagaacccctctgatgttgtttgcgcattagaatgggaatcggtcggtgtcctaactcgtggtagagatgcaatgtcagaagaatgaaaattttcatcacccagggatctcaatcagatttttttccaaggtggatgaaactgctatcagaaagaatcttctgaattctgagggcttccatattcagtcaccattctaatgcccgtgaccatgggcaacggtagaaggaataaagcgtgcatgacgaatgccttttcctgtctttgcatactaaccaacactgtcttgtaccgttggaagttttactctgttgtcatgggtagttgcagattgcagaaaccttttctgggctagcttcaagatgtgtaattgctcttggatgccaactgctgacagtttgaaggagtggtcacaaacaattcaatccttttagctgggggctgatgaactgaagctataattagtttcataatgtttgcttgtggtattaaattggctcctgaacaatatggactccgatacatattttatttatctggcttaccatttagattccattagatttttaactctagagtctagactaccttaacttgtttgagacaagttgggataaaaggttttgttattaatatgtttttttataacctcagataaagatggtttttatatgaaaattgtaacctttgatgagattt

SEQ ID NO: 39701 - DNA, 1602 bp, Zea Mays
ctattcataagctctggtgcagagttcggtttattgtgcatctctatcaattttggtttggattgtgcactaccaaagatgctttcagtactgtttggtgcatgcctgttaatatcaaaaatactttctggatggtttgatgcatgtctgttactgtctttgttctgaactgattaatgggactgtcatttaattttattgtcgttgtgcaatagtagtcgctgcttggttcattccactctcaccgactatgcttttatgtgagtttgttagatattgatgacatctgtaaattatgattaaaagaaaatctggtgtatgaaaaacatgcttattctccgaaactcatgtcatgcgttagaggtttccggtccatacacagaaagtttgtttacattgatccattgaggcgaaatttatagatttgaatttgttttcaactggtggctgaaccatgtattctacaagatcgaagtagttcggtattttggttgaaaatcccagctctggtggcctcctgtaactgcgctctttaaagggccgtggcatagttactggcatggtgcattccattgacattcatccatcaagaaagcatatctgcgtggtgggaggttcatcggggaccgtatttgcctgggatctgcggcagccacaggagccgataccaatctctgttctaggtcttaatgaaacagctgagcctgtgtgtgaaagtgaggtttgggaggttcttttcgacacttacactaagtcttccgatatcatctcatctgcatctgcaagaatattgccagtgatgatgtgttcagaggatgggatccttgcagtcgtcgaacaagataagagaccccttgaattgcttgctgaatcttgtgccatcaactccttcgacatagatcctcagaacccctctgatgttgtttgcgcattagaatgggaatcggtcggtgtcctaactcgtggtagagatgcaatgtcagaagaatgaaaattttcatcacccagggatctcaatcagatttttttccaaggtggatgaaactgctatcagaaagaatcttctgaattctgagggcttccatattcagtcaccattctaatgcccgtgaccatgggcaacggtagaaggaataaagcgtgcatgacgaatgccttttcctgtctttgcatactaaccaacactgtcttgtaccgttggaagttttactctgttgtcatgggtagttgcagattgcagaaaccttttctgggctagcttcaagatgtgtaattgctcttggatgccaactgctgacagtttgaaggagtggtcacaaacaattcaatccttttagctgggggctgatgaactgaagctataattagtttcataatgtttgcttgtggtattaaattggctcctgaacaatatggactccgatacatattttatttatctggcttaccatttagattccattagatttttaactctagagtctagactaccttaacttgtttgagacaagttgggataaaaggttttgttattaatatgtttttttataacctcagataaagatggtttttatatgaaaattgtaacctttgatgagattt

SEQ ID NO: 39702 - DNA, 869 bp, Zea Mays
gctgcggcgcgaggccagaagatgcgcgagcagagggtcgtgagagtcgcgcggggtatgcagccgcggcggcgcgccgggaggaagaggaggagcctgctgctggcggcgggcggcggcggcaggtgcgccgcaatggcggcggccaggaggatggtgagggcgaggctgcgggtgctgaggagcctcgtgccgggagcggaggccatgcgtggcctctccctgctctccgagacgctggactacgtcgcgtgcctcaagacgcaggtggagctcatgcaatgcctgtgcaaaggaccctgttccctgctgcgctgaggtcttcatctcatctcacatctcagggggatggagcagctagcaactgggcagactgcaggtgcagagccgcacgagaggtgtgagaggattcaaggaaaatccttggccaccaggctcatttcatcgatgcacataaggctaggaccgcaagcagctgaatctatctggatgggccatggccatggagagctccgatgaattgtatactatagctaatagttagctagcggtactagcagtaccagtgtaatgtaactattatatattgtgcaggtacatgtcagtgcgaacatggacctggttttgctgtattctcctcacagcataggatgaacacaggccatcatccatttggtgaaacaagttttgttgttaaataactagcaaattttggtttattgggtgggggaaaactataatgtgcttgtaatgtggagtatccagtcttgatgagaagggccgggaccttatctttcagatctaagactctgtttgtgttattgtgctgttcatttatgagagattttcccttttattttcatattggg

SEQ ID NO: 39703 - DNA, 1864 bp, Zea Mays
ccggagcagggagagcattcgccatttggcagagacgagacggacacctctgcggcgccgcctcgggcctcggcagacgacagcaatcacagcagcggctctacaagaaagaagagaaactgcagaaaccgcgagggcaggcgcggcagcgggcaggcagtccatccccatgtgtccaagcatcatggggctcttaggtatgatgggcgactcttttggttgctcggcgactggggagcgacttgtgtctgctgcaagagatggagacatccaggaggccagggctctcttagaactcaatccccgccttgctcggtactccacgttcgggatccggaattcgcctctccattactcggcagcaaagggccaccatgagattgtctccctcctaatcgagtccggtgttaatattaaccttagaaattgcagagggcagactgctctgatgcaagcttgtctatatggtcactggaaagttgtacagattctagttctttttaaagctaatattcacaggagagattgttttagcggcgcgaccgctattcattttgccgcgctaaaaggtcatactcgctgcattcggcttcttgtggctgattatgtgcctagcttgtcagagttttggaccattatgcgtggaaagtccacagatgaaatgaaaaagggtgcctttgatgccgcgtctctccagagactagttaatggaaagtctgatggtggtgtcacccccgcttcacttggcagcccttcatggacatgctgagagtgtacagttgctgctagaccttggagcctctgtctctgaggtgactgtcaatgatggttcaacaattgacctcattggttcggggagcacacccctccattacgcggcgtgtggtggaagtgctgtttgctgccaacttctcattgcagcaggagcaaacatgggagctcaaaatgttaacgggttgactcctttattggtggctcgttcgtggcacaagactagcatcgaaggtattctaagcaagcaaccagaaaaccgaatgcgtattcttccttcaccatacctttgcttaccactgatgagcattgtcaaaattgccagggaatgtggatggaggaaaacttccgcctcatccacttgtcaggatccatgtgtcatatgtttggaggtggaatgcactgtagctgcagaaggttgcggccatgagttctgcaccaaatgtgcactctacttgtgctccaccactagcagctcaacatccacccgtggagttcctggctccatatcatgccctctgtgtcgccatgccatcgtctccttcatgaggctcaccagcactaccccgataaaggagcttccatggacaagcgcgtcactagctctatgtgcagcgggctcaaacactggccgccctgaacatggcgggtccttgcatcgaaggcctgacctgcgtcgactgcgctccatctcagttcagctgggatgctcttcttttagatccattggctctgggaagctgtcgtccatgaagctgaactgcacaggagctgaagaggcggtgccttgcctcgtcagctgcctcaggcccgatgtgcagcgttcatcgtcgtacaggggaagaattaggagatattcagagttttgaaaggatggttttgtggcgtccttcctgcgagtttttagggtttgggaatttaaacctgtgtcgtcatgttcctcttcgtttgtttccctgttgtttaatatgcatgcagtcctcgttgtgaagatctatttgtgtacatggcccgtttgtcttcattacttttacttatatgtgaattatataccatctctgttttgcaattaccgacaagttaatactccctt

SEQ ID NO: 39704 - DNA, 2255 bp, Zea Mays
ccggagcagggagagcattcgccatttggcagagacgagacggacacctctgcggcgccgcctcgggcctcggcagacgacagcaatcacagcagcggctctacaagaaagaagagaaactgcagaaaccgcgagggcaggcgcggcagcgggcaggcagtccatccccatgtgtttgtgactttgtgctcgtcctcatacccccctccagctcccgtctcctcgtgctctccactgctgcatgcgcctcttgtcctgtccccctccccaccttgttcctcccatcccgcgccgtctctgcacgaagcagagcgccggtccaccgacaaggacagctacaactacgacgcgcaggcagagccatcgctcatctggggctgccctcggttactcctcccctccgccgctgcccctgccttgtccacagctgttgttaattccttcatgagttggcgtcggcgccagcggggcggaggggaaggaggcggggcttcagcttccccggcgccggccgccgcctgaagatcccttcttctcctgtagtcctgtcgtcgggcgggcgaggtccaagcatcatggggctcttaggtatgatgggcgactcttttggttgctcggcgactggggagcgacttgtgtctgctgcaagagatggagacatccaggaggccagggctctcttagaactcaatccccgccttgctcggtactccacgttcgggatccggaattcgcctctccattactcggcagcaaagggccaccatgagattgtctccctcctaatcgagtccggtgttaatattaaccttagaaattgcagagggcagactgctctgatgcaagcttgtctatatggtcactggaaagttgtacagattctagttctttttaaagctaatattcacaggagagattgttttagcggcgcgaccgctattcattttgccgcgctaaaaggtcatactcgctgcattcggcttcttgtggctgattatgtgcctagcttgtcagagttttggaccattatgcgtggaaagtccacagatgaaatgaaaaagggtgcctttgatgccgcgtctctccagagactagttaatggaaagtctgatggtggtgtcacccccgcttcacttggcagcccttcatggacatgctgagagtgtacagttgctgctagaccttggagcctctgtctctgaggtgactgtcaatgatggttcaacaattgacctcattggttcggggagcacacccctccattacgcggcgtgtggtggaagtgctgtttgctgccaacttctcattgcagcaggagcaaacatgggagctcaaaatgttaacgggttgactcctttattggtggctcgttcgtggcacaagactagcatcgaaggtattctaagcaagcaaccagaaaaccgaatgcgtattcttccttcaccatacctttgcttaccactgatgagcattgtcaaaattgccagggaatgtggatggaggaaaacttccgcctcatccacttgtcaggatccatgtgtcatatgtttggaggtggaatgcactgtagctgcagaaggttgcggccatgagttctgcaccaaatgtgcactctacttgtgctccaccactagcagctcaacatccacccgtggagttcctggctccatatcatgccctctgtgtcgccatgccatcgtctccttcatgaggctcaccagcactaccccgataaaggagcttccatggacaagcgcgtcactagctctatgtgcagcgggctcaaacactggccgccctgaacatggcgggtccttgcatcgaaggcctgacctgcgtcgactgcgctccatctcagttcagctgggatgctcttcttttagatccattggctctgggaagctgtcgtccatgaagctgaactgcacaggagctgaagaggcggtgccttgcctcgtcagctgcctcaggcccgatgtgcagcgttcatcgtcgtacaggggaagaattaggagatattcagagttttgaaaggatggttttgtggcgtccttcctgcgagtttttagggtttgggaatttaaacctgtgtcgtcatgttcctcttcgtttgtttccctgttgtttaatatgcatgcagtcctcgttgtgaagatctatttgtgtacatggcccgtttgtcttcattacttttacttatatgtgaattatataccatctctgttttgcaattaccgacaagttaatactccctt

SEQ ID NO: 39705 - DNA, 2243 bp, Zea Mays
ccggagcagggagagcattcgccatttggcagagacgagacggacacctctgcggcgccgcctcgggcctcggcagacgacagcaatcacagcagcggctctacaagaaagaagagaaactgcagaaaccgcgagggcaggcgcggcagcgggcaggcagtccatccccatgtgtttgtgactttgtgctcgtcctcatacccccctccagctcccgtctcctcgtgctctccactgctgcatgcgcctcttgtcctgtccccctccccaccttgttcctcccatcccgcgccgtctctgcacgaagcagagcgccggtccaccgacaaggacagctacaactacgacgcgcaggcagagccatcgctcatctggggctgccctcggttactcctcccctccgccgctgcccctgccttgtccacagctgttgttaattccttcatgagttggcgtcggcgccagcggggcggaggggaaggaggcggggcttcagcttccccggcgccggccgccgcctgaagatcccttcttctcctgtagtcctgtcgtcgggcgggcgaggtccaagcatcatggggctcttaggtatgatgggcgactcttttggttgctcggcgactggggagcgacttgtgtctgctgcaagagatggagacatccaggaggccagggctctcttagaactcaatccccgccttgctcggtactccacgttcgggatccggaattcgcctctccattactcggcagcaaagggccaccatgagattgtctccctcctaatcgagtccggtgttaatattaaccttagaaattgcagagggcagactgctctgatgcaagcttgtctatatggtcactggaaagttgtacagattctagttctttttaaagctaatattcacaggagagattgttttagcggcgcgaccgctattcattttgccgcgctaaaaggtcatactcgctgcattcggcttcttgtggctgattatgtgcctagcttgtcagagttttggaccattatgcgtggaaagtccacagatgaaatgaaaaagggtgcctttgatgccgcgtctctccagagactagttaatggaaagtctgatggtggtgtcacccccgcttcacttggcagcccttcatggacatgctgagagtgtacagttgctgctagaccttggagcctctgtctctgaggtgactgtcaatgatggttcaacaattgacctcattgaatttaagcaatttgccaacccccatctactgatatctgctaaacagcttctcattgcagcaggagcaaacatgggagctcaaaatgttaacgggttgactcctttattggtggctcgttcgtggcacaagactagcatcgaaggtattctaagcaagcaaccagaaaaccgaatgcgtattcttccttcaccatacctttgcttaccactgatgagcattgtcaaaattgccagggaatgtggatggaggaaaacttccgcctcatccacttgtcaggatccatgtgtcatatgtttggaggtggaatgcactgtagctgcagaaggttgcggccatgagttctgcaccaaatgtgcactctacttgtgctccaccactagcagctcaacatccacccgtggagttcctggctccatatcatgccctctgtgtcgccatgccatcgtctccttcatgaggctcaccagcactaccccgataaaggagcttccatggacaagcgcgtcactagctctatgtgcagcgggctcaaacactggccgccctgaacatggcgggtccttgcatcgaaggcctgacctgcgtcgactgcgctccatctcagttcagctgggatgctcttcttttagatccattggctctgggaagctgtcgtccatgaagctgaactgcacaggagctgaagaggcggtgccttgcctcgtcagctgcctcaggcccgatgtgcagcgttcatcgtcgtacaggggaagaattaggagatattcagagttttgaaaggatggttttgtggcgtccttcctgcgagtttttagggtttgggaatttaaacctgtgtcgtcatgttcctcttcgtttgtttccctgttgtttaatatgcatgcagtcctcgttgtgaagatctatttgtgtacatggcccgtttgtcttcattacttttacttatatgtgaattatataccatctctgttttgcaattaccgacaagttaatactccctt

SEQ ID NO: 39706 - DNA, 2218 bp, Zea Mays
ccggagcagggagagcattcgccatttggcagagacgagacggacacctctgcggcgccgcctcgggcctcggcagacgacagcaatcacagcagcggctctacaagaaagaagagaaactgcagaaaccgcgagggcaggcgcggcagcgggcaggcagtccatccccatgtgtttgtgactttgtgctcgtcctcatacccccctccagctcccgtctcctcgtgctctccactgctgcatgcgcctcttgtcctgtccccctccccaccttgttcctcccatcccgcgccgtctctgcacgaagcagagcgccggtccaccgacaaggacagctacaactacgacgcgcaggcagagccatcgctcatctggggctgccctcggttactcctcccctccgccgctgcccctgccttgtccacagctgttgttaattccttcatgagttggcgtcggcgccagcggggcggaggggaaggaggcggggcttcagcttccccggcgccggccgccgcctgaagatcccttcttctcctgtagtcctgtcgtcgggcgggcgaggtatgatgggcgactcttttggttgctcggcgactggggagcgacttgtgtctgctgcaagagatggagacatccaggaggccagggctctcttagaactcaatccccgccttgctcggtactccacgttcgggatccggaattcgcctctccattactcggcagcaaagggccaccatgagattgtctccctcctaatcgagtccggtgttaatattaaccttagaaattgcagagggcagactgctctgatgcaagcttgtctatatggtcactggaaagttgtacagattctagttctttttaaagctaatattcacaggagagattgttttagcggcgcgaccgctattcattttgccgcgctaaaaggtcatactcgctgcattcggcttcttgtggctgattatgtgcctagcttgtcagagttttggaccattatgcgtggaaagtccacagatgaaatgaaaaagggtgcctttgatgccgcgtctctccagagactagttaatggaaagtctgatggtggtgtcacccccgcttcacttggcagcccttcatggacatgctgagagtgtacagttgctgctagaccttggagcctctgtctctgaggtgactgtcaatgatggttcaacaattgacctcattggttcggggagcacacccctccattacgcggcgtgtggtggaagtgctgtttgctgccaacaggagcaaacatgggagctcaaaatgttaacgggttgactcctttattggtggctcgttcgtggcacaagactagcatcgaaggtattctaagcaagcaaccagaaaaccgaatgcgtattcttccttcaccatacctttgcttaccactgatgagcattgtcaaaattgccagggaatgtggatggaggaaaacttccgcctcatccacttgtcaggatccatgtgtcatatgtttggaggtggaatgcactgtagctgcagaaggttgcggccatgagttctgcaccaaatgtgcactctacttgtgctccaccactagcagctcaacatccacccgtggagttcctggctccatatcatgccctctgtgtcgccatgccatcgtctccttcatgaggctcaccagcactaccccgataaaggagcttccatggacaagcgcgtcactagctctatgtgcagcgggctcaaacactggccgccctgaacatggcgggtccttgcatcgaaggcctgacctgcgtcgactgcgctccatctcagttcagctgggatgctcttcttttagatccattggctctgggaagctgtcgtccatgaagctgaactgcacaggagctgaagaggcggtgccttgcctcgtcagctgcctcaggcccgatgtgcagcgttcatcgtcgtacaggggaagaattaggagatattcagagttttgaaaggatggttttgtggcgtccttcctgcgagtttttagggtttgggaatttaaacctgtgtcgtcatgttcctcttcgtttgtttccctgttgtttaatatgcatgcagtcctcgttgtgaagatctatttgtgtacatggcccgtttgtcttcattacttttacttatatgtgaattatataccatctctgttttgcaattaccgacaagttaatactccctt

SEQ ID NO: 39707 - DNA, 1742 bp, Zea Mays
ggaatgcgcctttcttcccccatcagatgtcaaaagggaatgtttgtactggtccaagcatcatggggctcttaggtatgatgggcgactcttttggttgctcggcgactggggagcgacttgtgtctgctgcaagagatggagacatccaggaggccagggctctcttagaactcaatccccgccttgctcggtactccacgttcgggatccggaattcgcctctccattactcggcagcaaagggccaccatgagattgtctccctcctaatcgagtccggtgttaatattaaccttagaaattgcagagggcagactgctctgatgcaagcttgtctatatggtcactggaaagttgtacagattctagttctttttaaagctaatattcacaggagagattgttttagcggcgcgaccgctattcattttgccgcgctaaaaggtcatactcgctgcattcggcttcttgtggctgattatgtgcctagcttgtcagagttttggaccattatgcgtggaaagtccacagatgaaatgaaaaagggtgcctttgatgccgcgtctctccagagactagttaatggaaagtctgatggtggtgtcacccccgcttcacttggcagcccttcatggacatgctgagagtgtacagttgctgctagaccttggagcctctgtctctgaggtgactgtcaatgatggttcaacaattgacctcattggttcggggagcacacccctccattacgcggcgtgtggtggaagtgctgtttgctgccaacttctcattgcagcaggagcaaacatgggagctcaaaatgttaacgggttgactcctttattggtggctcgttcgtggcacaagactagcatcgaaggtattctaagcaagcaaccagaaaaccgaatgcgtattcttccttcaccatacctttgcttaccactgatgagcattgtcaaaattgccagggaatgtggatggaggaaaacttccgcctcatccacttgtcaggatccatgtgtcatatgtttggaggtggaatgcactgtagctgcagaaggttgcggccatgagttctgcaccaaatgtgcactctacttgtgctccaccactagcagctcaacatccacccgtggagttcctggctccatatcatgccctctgtgtcgccatgccatcgtctccttcatgaggctcaccagcactaccccgataaaggagcttccatggacaagcgcgtcactagctctatgtgcagcgggctcaaacactggccgccctgaacatggcgggtccttgcatcgaaggcctgacctgcgtcgactgcgctccatctcagttcagctgggatgctcttcttttagatccattggctctgggaagctgtcgtccatgaagctgaactgcacaggagctgaagaggcggtgccttgcctcgtcagctgcctcaggcccgatgtgcagcgttcatcgtcgtacaggggaagaattaggagatattcagagttttgaaaggatggttttgtggcgtccttcctgcgagtttttagggtttgggaatttaaacctgtgtcgtcatgttcctcttcgtttgtttccctgttgtttaatatgcatgcagtcctcgttgtgaagatctatttgtgtacatggcccgtttgtcttcattacttttacttatatgtgaattatataccatctctgttttgcaattaccgacaagttaatactccctt

SEQ ID NO: 39708 - DNA, 2443 bp, Zea Mays
gttcttcttcccgtttgctgttcctgtttttttcttcgcttgtccaaggtcaatctgcgggctcaatgccggcgctggtagttgtgccattcctccttgggccaacggggccggtggccgttggcatcctccctgagaggcacaggggggacagcgacgtgtctctgctgatgtttcttccgcccccattactgcgccggcccctcgcctccgtctgaccatatcgccttgcagtctacacaatagtagggaagtagttaaaaaaagagggggttgcccagctcgttagatcctgcggcttaccatttcttggatcagttaggggaggatagactcttcatttggattcatgtccttcccggtcaatttgggtcagtttgtttaccatagaaaggtggcatcttttggcttctgctctttggtctatgtggatccagtgccaaattggaccgaccgaagctgattcttgctggcagaaagtgcccaactgtgctaccatttatttccaatgaatccttggctatctactcaaataaacaccgagtccgtgaggccatttcgtctctgcttatgtaggattcttatgttcatgtggacatgtggcgcattgcctggcctttcgcaaatcagtttcttctggagtgcccaagtggttcttctcttcccatatcgatataaggctaacaccgtgtgatgcctgcctcaatacatcttggccccaagaacactctgattctgtgcagttccatacggtccaagcatcatggggctcttaggtatgatgggcgactcttttggttgctcggcgactggggagcgacttgtgtctgctgcaagagatggagacatccaggaggccagggctctcttagaactcaatccccgccttgctcggtactccacgttcgggatccggaattcgcctctccattactcggcagcaaagggccaccatgagattgtctccctcctaatcgagtccggtgttaatattaaccttagaaattgcagagggcagactgctctgatgcaagcttgtctatatggtcactggaaagttgtacagattctagttctttttaaagctaatattcacaggagagattgttttagcggcgcgaccgctattcattttgccgcgctaaaaggtcatactcgctgcattcggcttcttgtggctgattatgtgcctagcttgtcagagttttggaccattatgcgtggaaagtccacagatgaaatgaaaaagggtgcctttgatgccgcgtctctccagagactagttaatggaaagtctgatggtggtgtcacccccgcttcacttggcagcccttcatggacatgctgagagtgtacagttgctgctagaccttggagcctctgtctctgaggtgactgtcaatgatggttcaacaattgacctcattggttcggggagcacacccctccattacgcggcgtgtggtggaagtgctgtttgctgccaacttctcattgcagcaggagcaaacatgggagctcaaaatgttaacgggttgactcctttattggtggctcgttcgtggcacaagactagcatcgaaggtattctaagcaagcaaccagaaaaccgaatgcgtattcttccttcaccatacctttgcttaccactgatgagcattgtcaaaattgccagggaatgtggatggaggaaaacttccgcctcatccacttgtcaggatccatgtgtcatatgtttggaggtggaatgcactgtagctgcagaaggttgcggccatgagttctgcaccaaatgtgcactctacttgtgctccaccactagcagctcaacatccacccgtggagttcctggctccatatcatgccctctgtgtcgccatgccatcgtctccttcatgaggctcaccagcactaccccgataaaggagcttccatggacaagcgcgtcactagctctatgtgcagcgggctcaaacactggccgccctgaacatggcgggtccttgcatcgaaggcctgacctgcgtcgactgcgctccatctcagttcagctgggatgctcttcttttagatccattggctctgggaagctgtcgtccatgaagctgaactgcacaggagctgaagaggcggtgccttgcctcgtcagctgcctcaggcccgatgtgcagcgttcatcgtcgtacaggggaagaattaggagatattcagagttttgaaaggatggttttgtggcgtccttcctgcgagtttttagggtttgggaatttaaacctgtgtcgtcatgttcctcttcgtttgtttccctgttgtttaatatgcatgcagtcctcgttgtgaagatctatttgtgtacatggcccgtttgtcttcattacttttacttatatgtgaattatataccatctctgttttgcaattaccgacaagttaatactccctt

SEQ ID NO: 39709 - DNA, 2160 bp, Zea Mays
gcggcttaccatttcttggatcagttaggggaggatagactcttcatttggattcatgtccttcccggtcaatttgggtcagtttgtttaccatagaaaggtggcatcttttggcttctgctctttggtctatgtggatccagtgccaaattggaccgaccgaagctgattcttgctggcagaaagtgcccaactgtgctaccatttatttccaatgaatccttggctatctactcaaataaacaccgagtccgtgaggccatttcgtctctgcttatgtaggattcttatgttcatgtggacatgtggcgcattgcctggcctttcgcaaatcagtttcttctggagtgcccaagtggttcttctcttcccatatcgatataaggctaacaccgtgtgatgcctgcctcaatacatcttggccccaagaacactctgattctgtgcagttccatacggtgctcaacaagtccaagcatcatggggctcttaggtatgatgggcgactcttttggttgctcggcgactggggagcgacttgtgtctgctgcaagagatggagacatccaggaggccagggctctcttagaactcaatccccgccttgctcggtactccacgttcgggatccggaattcgcctctccattactcggcagcaaagggccaccatgagattgtctccctcctaatcgagtccggtgttaatattaaccttagaaattgcagagggcagactgctctgatgcaagcttgtctatatggtcactggaaagttgtacagattctagttctttttaaagctaatattcacaggagagattgttttagcggcgcgaccgctattcattttgccgcgctaaaaggtcatactcgctgcattcggcttcttgtggctgattatgtgcctagcttgtcagagttttggaccattatgcgtggaaagtccacagatgaaatgaaaaagggtgcctttgatgccgcgtctctccagagactagttaatggaaagtctgatggtggtgtcacccccgcttcacttggcagcccttcatggacatgctgagagtgtacagttgctgctagaccttggagcctctgtctctgaggtgactgtcaatgatggttcaacaattgacctcattggttcggggagcacacccctccattacgcggcgtgtggtggaagtgctgtttgctgccaacttctcattgcagcaggagcaaacatgggagctcaaaatgttaacgggttgactcctttattggtggctcgttcgtggcacaagactagcatcgaaggtattctaagcaagcaaccagaaaaccgaatgcgtattcttccttcaccatacctttgcttaccactgatgagcattgtcaaaattgccagggaatgtggatggaggaaaacttccgcctcatccacttgtcaggatccatgtgtcatatgtttggaggtggaatgcactgtagctgcagaaggttgcggccatgagttctgcaccaaatgtgcactctacttgtgctccaccactagcagctcaacatccacccgtggagttcctggctccatatcatgccctctgtgtcgccatgccatcgtctccttcatgaggctcaccagcactaccccgataaaggagcttccatggacaagcgcgtcactagctctatgtgcagcgggctcaaacactggccgccctgaacatggcgggtccttgcatcgaaggcctgacctgcgtcgactgcgctccatctcagttcagctgggatgctcttcttttagatccattggctctgggaagctgtcgtccatgaagctgaactgcacaggagctgaagaggcggtgccttgcctcgtcagctgcctcaggcccgatgtgcagcgttcatcgtcgtacaggggaagaattaggagatattcagagttttgaaaggatggttttgtggcgtccttcctgcgagtttttagggtttgggaatttaaacctgtgtcgtcatgttcctcttcgtttgtttccctgttgtttaatatgcatgcagtcctcgttgtgaagatctatttgtgtacatggcccgtttgtcttcattacttttacttatatgtgaattatataccatctctgttttgcaattaccgacaagttaatactccctt

SEQ ID NO: 39710 - DNA, 2220 bp, Zea Mays
gcggcttaccatttcttggatcagttaggggaggatagactcttcatttggattcatgtccttcccggtcaatttgggtcagtttgtttaccatagaaaggtggcatcttttggcttctgctctttggtctatgtggatccagtgccaaattggaccgaccgaagctgattcttgctggcagaaagtgcccaactgtgctaccatttatttccaatgaatccttggctatctactcaaataaacaccgagtccgtgaggccatttcgtctctgcttatgtaggattcttatgttcatgtggacatgtggcgcattgcctggcctttcgcaaatcagtttcttctggagtgcccaagtggttcttctcttcccatatcgatataaggctaacaccgtgtgatgcctgcctcaatacatcttggccccaagaacactctgattctgtgcagttccatacggtgctcaacaagtgatatccagtatttggagggtctttgcaagaagcgttgctctgttgctcttgctcatattttgtgttctgataggtccaagcatcatggggctcttaggtatgatgggcgactcttttggttgctcggcgactggggagcgacttgtgtctgctgcaagagatggagacatccaggaggccagggctctcttagaactcaatccccgccttgctcggtactccacgttcgggatccggaattcgcctctccattactcggcagcaaagggccaccatgagattgtctccctcctaatcgagtccggtgttaatattaaccttagaaattgcagagggcagactgctctgatgcaagcttgtctatatggtcactggaaagttgtacagattctagttctttttaaagctaatattcacaggagagattgttttagcggcgcgaccgctattcattttgccgcgctaaaaggtcatactcgctgcattcggcttcttgtggctgattatgtgcctagcttgtcagagttttggaccattatgcgtggaaagtccacagatgaaatgaaaaagggtgcctttgatgccgcgtctctccagagactagttaatggaaagtctgatggtggtgtcacccccgcttcacttggcagcccttcatggacatgctgagagtgtacagttgctgctagaccttggagcctctgtctctgaggtgactgtcaatgatggttcaacaattgacctcattggttcggggagcacacccctccattacgcggcgtgtggtggaagtgctgtttgctgccaagagcaaacatgggagctcaaaatgttaacgggttgactcctttattggtggctcgttcgtggcacaagactagcatcgaaggtattctaagcaagcaaccagaaaaccgaatgcgtattcttccttcaccatacctttgcttaccactgatgagcattgtcaaaattgccagggaatgtggatggaggaaaacttccgcctcatccacttgtcaggatccatgtgtcatatgtttggaggtggaatgcactgtagctgcagaaggttgcggccatgagttctgcaccaaatgtgcactctacttgtgctccaccactagcagctcaacatccacccgtggagttcctggctccatatcatgccctctgtgtcgccatgccatcgtctccttcatgaggctcaccagcactaccccgataaaggagcttccatggacaagcgcgtcactagctctatgtgcagcgggctcaaacactggccgccctgaacatggcgggtccttgcatcgaaggcctgacctgcgtcgactgcgctccatctcagttcagctgggatgctcttcttttagatccattggctctgggaagctgtcgtccatgaagctgaactgcacaggagctgaagaggcggtgccttgcctcgtcagctgcctcaggcccgatgtgcagcgttcatcgtcgtacaggggaagaattaggagatattcagagttttgaaaggatggttttgtggcgtccttcctgcgagtttttagggtttgggaatttaaacctgtgtcgtcatgttcctcttcgtttgtttccctgttgtttaatatgcatgcagtcctcgttgtgaagatctatttgtgtacatggcccgtttgtcttcattacttttacttatatgtgaattatataccatctctgttttgcaattaccgacaagttaatactccctt

SEQ ID NO: 39711 - DNA, 896 bp, Zea Mays
gtaatgctcgggggctgtcttaaccctcgtaggtcgagtttttttctctggcatcaagttttatgggtgattctgtttatctgttataatctgcacccgattactcccatttgcagtttttgcccatcggtatggttgtgctgcaatttaatgcttaagggcgggcctagtacagcgatagagcctaccgtctataatcggaaggtcccgggttcgagccccagcctctgcatattatgcgggtaaggcttgacgcttaaagatacccttccccagaccccgcacagtgcgggaagcctacggcactgggctcctaaaaggaaacgcagtgcagagtttaatgactgccatgatcaatgtacatttggatgggaatgagccatttgctggtaaaccatggcacctgctactgttgatgttgcctcatccgacctggaagatatatctgtaaattcaggctgaagctcaggtggttattgtatcaacaagccctggcacaaaaggcttcgtttgtaacaaactaacaataaagcatcgattgacctgtttgctgaatgtgtgatacggtacttccaatactaggtcagcatcagtccagaagctgtaccctgaacaaagattctggatggcttcttgtgccagctaggaacaatgtaaaattgatgtaagcgtctgtgcgcactcctgatccatgtacaactaagttaaaattttaaactgttatagattgttgtatggatagctctcaattgctactgttctcccctcatgttttatgtttgattgtaaaaaaaacttaaattgtcactcattaaggcagaaatacatgaataaaatagaggatcgaaagacgccagaattttgaaaaacttaagaattttcaaaaacataggaat

SEQ ID NO: 39712 - DNA, 597 bp, Zea Mays
ggccttacaggctcctaaaaggaaacgcagtgcagagtttaatgactgccatgatcaatgtacatttggatgggaatgagccatttgctggtaaaccatggcacctgctactgttgatgttgcctcatccgacctggaagatatatctgtaaattcaggctgaagctcaggtggttattgtatcaacaagccctggcacaaaaggcttcgtttgtaacaaactaacaataaagcatcgattgacctgtttgctgaatgtgtgatacggtacttccaatactaggtcagcatcagtccagaagctgtaccctgaacaaagattctggatggcttcttgtgccagctaggaacaatgtaaaattgatgtaagcgtctgtgcgcactcctgatccatgtacaactaagttaaaattttaaactgttatagattgttgtatggatagctctcaattgctactgttctcccctcatgttttatgtttgattgtaaaaaaaacttaaattgtcactcattaaggcagaaatacatgaataaaatagaggatcgaaagacgccagaattttgaaaaacttaagaattttcaaaaacataggaat

SEQ ID NO: 39713 - DNA, 686 bp, Zea Mays
ggacaaacatcttgtcacacttggaaaatcgaaattatgcaaacagtgagattgtggtggacaaggccatggattgcaaaggtgcagttgtacttactggctcctaaaaggaaacgcagtgcagagtttaatgactgccatgatcaatgtacatttggatgggaatgagccatttgctggtaaaccatggcacctgctactgttgatgttgcctcatccgacctggaagatatatctgtaaattcaggctgaagctcaggtggttattgtatcaacaagccctggcacaaaaggcttcgtttgtaacaaactaacaataaagcatcgattgacctgtttgctgaatgtgtgatacggtacttccaatactaggtcagcatcagtccagaagctgtaccctgaacaaagattctggatggcttcttgtgccagctaggaacaatgtaaaattgatgtaagcgtctgtgcgcactcctgatccatgtacaactaagttaaaattttaaactgttatagattgttgtatggatagctctcaattgctactgttctcccctcatgttttatgtttgattgtaaaaaaaacttaaattgtcactcattaaggcagaaatacatgaataaaatagaggatcgaaagacgccagaattttgaaaaacttaagaattttcaaaaacataggaat

SEQ ID NO: 39714 - DNA, 2045 bp, Zea Mays
gtgattcctctcatggcagggctgttgctgatgcaaggctttcaaaagattaacagtctcaattgatgcaaaagcaacacaatcacactaaaggtttggattagacatttcagagcatgggttcgcggtttccatcccaccagctaagcaatggcttgtatgtctcgggccgacctgagcaacctaaagagaagtctccagtcatttgctcctcggctatgccgtacactggtggggacataaagaaatctggggagcttggaaagatgtttgatctccatagaaaatctggtccattgggtaatcaaacttcaaggaatacttcctttggtggtgctgcctccaactctggaccagtttctaatgctgtcggtcgctccaactactctggttctatttcgtctgcaattcctaacactggaggatcttctaggacaaaaactaattctggacctctcaataagcatggagaaccaacaaagaggtcatctggcccccaatctggtggagtaaccccgatggcccgtcagaactctggccctctgcctcctgtacttcctacaactgggctaatcacatcaggtcctatcacctctggtcagttaaattcatctggtgctcaacgcaaagtatcagggcctcttgattctagtgtatcaatgaagatgcgtaccacatcttttgcacacaacccagctgtcacaaatctcaatgtgggagatggttactcgattaagggcagcattccgaccacaataatctggttggtcgcgttgctctttttggttgggtttgtagctggtggcttcattctcgctgctattcataatcctatcttgcttatagtcgtggtggtgatatttggctttgttgctgcacttgtgacctggaacatctgctggggaacaagaggtgtgattgattttatcggtcgctattctgatgtagaccttagaactgcaaaagatggagagtatgttaaggttactggggttgttacttgtggaaatttgccccttgagtcctcattccaacgggtgccacgatgtgtgtacacttcaacttgcttgtacgagtacaggggttgggactcgaaagccgcaaacgccacacaccgacggtttacttggggtctcaggtcaatggaacggcacgcggtggacttctacatctccgatttccagtccgggctgcgagcactggtcagggcaggatccggcgcgcgcgtgaccccatacgtggacgagtccgtcgctatcgacgtaaacccagacaacaaggacatgtcgcctgagttcctccggtggctccgcggaaggaatctgtcgagcgacgaccggactatgcgcctcaaagaaggatacatcaaggagggcagcaccgtgagcgtgatgggcgtcgttcagaggaacgagaacgtgctgatgatcgttcctccagccgagcccatctccactggctgccagtggggcaagtgtgtcctcccgaccagcctcgagggccttgtcctgagatgcgaggacacgtctggcctggacgtgataccggtctagctagagaggttggttctggcgaatcctctggcgcggaaagggagtagaaaaaaaaagatgccttgacgtttggtttggtctccgtgggttgttagggttggaaggatgtgcaaatgcagggtgtgattattgggctaagtaagtaagtacaatatgagtggtcggtcggttacctggagcttgatcgtgatagtatatggtatgtaatttcctcttctcttcttttggctgagccatggatggtgtgcttgtaacaaggatggcttgatgtcagtatactaccctaccataccatggagcatgtttggagattcagtgggttccagtccgtattatgctcctgtttttttttgttgtagggttccaacaatgccttgaagcctgcaatttccttgtgtacccagatctccatagaaatctatttgcctaaacatggactatagcaggtgtattttcgatggtgagaaatcgatgtgattgattcctcctagc

SEQ ID NO: 39715 - DNA, 2143 bp, Zea Mays
ttggcatgtacctgtcaagttctttgccgaagctttaagctataatcatgatctgatggagtgatggtgtcggtggcgcggtggttgttttatctactgcccgtactggtcgaaatcatttgttgctgatgcaaggctttcaaaagattaacagtctcaattgatgcaaaagcaacacaatcacactaaaggtttggattagacatttcagagcatgggttcgcggtttccatcccaccagctaagcaatggcttgtatgtctcgggccgacctgagcaacctaaagagaagtctccagtcatttgctcctcggctatgccgtacactggtggggacataaagaaatctggggagcttggaaagatgtttgatctccatagaaaatctggtccattgggtaatcaaacttcaaggaatacttcctttggtggtgctgcctccaactctggaccagtttctaatgctgtcggtcgctccaactactctggttctatttcgtctgcaattcctaacactggaggatcttctaggacaaaaactaattctggacctctcaataagcatggagaaccaacaaagaggtcatctggcccccaatctggtggagtaaccccgatggcccgtcagaactctggccctctgcctcctgtacttcctacaactgggctaatcacatcaggtcctatcacctctggtcagttaaattcatctggtgctcaacgcaaagtatcagggcctcttgattctagtgtatcaatgaagatgcgtaccacatcttttgcacacaacccagctgtcacaaatctcaatgtgggagatggttactcgattaagggcagcattccgaccacaataatctggttggtcgcgttgctctttttggttgggtttgtagctggtggcttcattctcgctgctattcataatcctatcttgcttatagtcgtggtggtgatatttggctttgttgctgcacttgtgacctggaacatctgctggggaacaagaggtgtgattgattttatcggtcgctattctgatgtagaccttagaactgcaaaagatggagagtatgttaaggttactggggttgttacttgtggaaatttgccccttgagtcctcattccaacgggtgccacgatgtgtgtacacttcaacttgcttgtacgagtacaggggttgggactcgaaagccgcaaacgccacacaccgacggtttacttggggtctcaggtcaatggaacggcacgcggtggacttctacatctccgatttccagtccgggctgcgagcactggtcagggcaggatccggcgcgcgcgtgaccccatacgtggacgagtccgtcgctatcgacgtaaacccagacaacaaggacatgtcgcctgagttcctccggtggctccgcggaaggaatctgtcgagcgacgaccggactatgcgcctcaaagaaggatacatcaaggagggcagcaccgtgagcgtgatgggcgtcgttcagaggaacgagaacgtgctgatgatcgttcctccagccgagcccatctccactggctgccagtggggcaagtgtgtcctcccgaccagcctcgagggccttgtcctgagatgcgaggacacgtctggcctggacgtgataccggtctagctagagaggttggttctggcgaatcctctggcgcggaaagggagtagaaaaaaaaagatgccttgacgtttggtttggtctccgtgggttgttagggttggaaggatgtgcaaatgcagggtgtgattattgggctaagtaagtaagtacaatatgagtggtcggtcggttacctggagcttgatcgtgatagtatatggtatgtaatttcctcttctcttcttttggctgagccatggatggtgtgcttgtaacaaggatggcttgatgtcagtatactaccctaccataccatggagcatgtttggagattcagtgggttccagtccgtattatgctcctgtttttttttgttgtagggttccaacaatgccttgaagcctgcaatttccttgtgtacccagatctccatagaaatctatttgcctaaacatggactatagcaggtgtattttcgatggtgagaaatcgatgtgattgattcctcctagc

SEQ ID NO: 39716 - DNA, 2020 bp, Zea Mays
ttcacctcattgctgatgcaaggctttcaaaagattaacagtctcaattgatgcaaaagcaacacaatcacactaaaggtttggattagacatttcagagcatgggttcgcggtttccatcccaccagctaagcaatggcttgtatgtctcgggccgacctgagcaacctaaagagaagtctccagtcatttgctcctcggctatgccgtacactggtggggacataaagaaatctggggagcttggaaagatgtttgatctccatagaaaatctggtccattgggtaatcaaacttcaaggaatacttcctttggtggtgctgcctccaactctggaccagtttctaatgctgtcggtcgctccaactactctggttctatttcgtctgcaattcctaacactggaggatcttctaggacaaaaactaattctggacctctcaataagcatggagaaccaacaaagaggtcatctggcccccaatctggtggagtaaccccgatggcccgtcagaactctggccctctgcctcctgtacttcctacaactgggctaatcacatcaggtcctatcacctctggtcagttaaattcatctggtgctcaacgcaaagtatcagggcctcttgattctagtgtatcaatgaagatgcgtaccacatcttttgcacacaacccagctgtcacaaatctcaatgtgggagatggttactcgattaagggcagcattccgaccacaataatctggttggtcgcgttgctctttttggttgggtttgtagctggtggcttcattctcgctgctattcataatcctatcttgcttatagtcgtggtggtgatatttggctttgttgctgcacttgtgacctggaacatctgctggggaacaagaggtgtgattgattttatcggtcgctattctgatgtagaccttagaactgcaaaagatggagagtatgttaaggttactggggttgttacttgtggaaatttgccccttgagtcctcattccaacgggtgccacgatgtgtgtacacttcaacttgcttgtacgagtacaggggttgggactcgaaagccgcaaacgccacacaccgacggtttacttggggtctcagcggcacgcggtggacttctacatctccgatttccagtccgggctgcgagcactggtcagggcaggatccggcgcgcgcgtgaccccatacgtggacgagtccgtcgctatcgacgtaaacccagacaacaaggacatgtcgcctgagttcctccggtggctccgcggaaggaatctgtcgagcgacgaccggactatgcgcctcaaagaaggatacatcaaggagggcagcaccgtgagcgtgatgggcgtcgttcagaggaacgagaacgtgctgatgatcgttcctccagccgagcccatctccactggctgccagtggggcaagtgtgtcctcccgaccagcctcgagggccttgtcctgagatgcgaggacacgtctggcctggacgtgataccggtctagctagagaggttggttctggcgaatcctctggcgcggaaagggagtagaaaaaaaaagatgccttgacgtttggtttggtctccgtgggttgttagggttggaaggatgtgcaaatgcagggtgtgattattgggctaagtaagtaagtacaatatgagtggtcggtcggttacctggagcttgatcgtgatagtatatggtatgtaatttcctcttctcttcttttggctgagccatggatggtgtgcttgtaacaaggatggcttgatgtcagtatactaccctaccataccatggagcatgtttggagattcagtgggttccagtccgtattatgctcctgtttttttttgttgtagggttccaacaatgccttgaagcctgcaatttccttgtgtacccagatctccatagaaatctatttgcctaaacatggactatagcaggtgtattttcgatggtgagaaatcgatgtgattgattcctcctagc

SEQ ID NO: 39717 - DNA, 1784 bp, Zea Mays
atttcgcctgcgattgccgatccagatgaattttcaggtatgacacccctgatgtttgcattacatcatgagggaaacaaagccattgttaagtatcttatcaacaaccacgctgatccaaacaaaggagccaactctggaattgctccactccacattgcggcaactgaaggttactatgaaattgtagagtacttgttgtcaagaggagctgatgttgaccccttaagtcaagatggcgaatcaccgttgttctgtgctgttttccacggacatgaaagaatagtgacactccttttgaagcatggtgcagattataacagagtttcaaatctaatggtaacaccactcctcgtgtcccttcatggttcttcattagattgcttagagatactaattgaggctggtgctgatataaatggggctggctgttctgtacctccagtagcgctagctgcttataaaggcttagatggttgcatccagtgtttgttgagaaatggtgctaatcccaacgtgcctgatgaagacaataatatcccaatacaaattgctgcattcaaaggatgggagaaatgcgtggagattcttctccctcacgcaccccatttgccacaatatgaaggcctgagcatctctgaaataatccactgggaaagaaccgagcgcttccgcagaagcagtagtgcaattgaacagggagatgttgcgtactggaaaaaagaacatgatattgcgttgagattctacaatgaagctgctcaggttggtcacgaggtcgcaaccttgtatgcaaagaagagtctttgctatctgcatctgcgtgatccagcaaaatttatcgatgaagcaattaactacataaatatggtgcagccagatttatcgacacttaaccctgagtctgatgctaagaaattggtgctggaatttggtagaacctggaaagcaccggggtctagttcgaggcaggattctggaagtagcccgactaacaaaactggcgaaacatccagcagggagcatcagtgaacatgtggtgttgataagtgctaccgttaggagatcagcacgtgcattgaagtggtaacaagctgggcttccacggaacccttgtggcattgataagtgctaccgttaggagatcagcacatatgctaggagtataggtccagacttggcatcctttgtttttggaggcgagacttattgaactcagttctcttcatttcacgcttttgggcccttttctttcgaggttggttttgcattcaaccagaaagaaccctagtgcttgcaaatacgtttatgtctgagattttggcgaggggatcgcgattcaccactacactggactcaaaatcgtcatccatccatgacccggaacatctgaaaggggtgacgtctatccacttctctctccagggaaaacaaaaggaaaaatatctctacattatcttgcattttcgagcctctgacagagcttcttccccttatcccagccacaaccagcatatgctcaggttggcatataaggtggcatcaagcgggcctttctgtctgtgcttcctgccattaaccatcagagagagctcaatatctcttgatttcctggggttgagctaactggttgtgtggagcatgacactatcatcttgcattagcttaagtgaaacattaacttttcttcttctcttctttaaaagaatgagttgttggttggttggttctatacaggaggaatttctgttgtgtatgcaatatattctctatggacagttgtg

SEQ ID NO: 39718 - DNA, 3349 bp, Zea Mays
aaaagacttatcaacatatttcatttcctaccgtcaggcagcatacaatgcactgaaatagcagacaagtgaaatactacgaagatagcagacaagtaaaattgcagacaagtggaatagcatataattgtcctcagtttacacaagaaagagcagacaagtaatgtcttgcagcagtcgcatagaagcaccattattataggtttcattacaggacaagtaatccatccaatgcactgaaatgccctacgcttaaagagttcatgacatgcacaattgtttatgcatgaccaggccttgcacacatggccagcagcaagcagcaatcgttgttgtcgtggtaaaagtagcaagcagtagcaggcggtcgtcagcaacaaggagcaatgcatcatcaccattcactggcacaagtgaaacattgaacataagtgaaagatagcagatctgcagaaaaacaagtgaaagactgaatttactgccaacgatttgaaaatttcaggctccatcctgaacgttacccaacagttcttcaaatgaccttgaagcaactcttgaacatgttcttggccacttaactttgatgtatgccttcgcttcttttcccttgctatgtttgaactaaagcccaatatatgtagcataggaaaaaaacagcatcatatcatcatcatcctcatcccttctctttctaaggcgatctcttagtgtcacatccattgctaactaaaaagaaatccataacagaaaataaacaccaacaaaaacagaacatgatgtaataaagaacatataggacataacaagtacgtaaaggagagggtgtagggtcccaagatggtggaagttcgtcttctccaactcgaaccgatgcagggataatctagaaatataataggtttttgttagaaatacatagacaactaattggaaataaatgagatttgtgaaaaatacatttctgtttattagctaccataagttgtttattagctagcatgacgtttctatttctccatgcgccctttatttcaaaacaaaactctaaacttgcattgcataatgaaactggctttctacatgcagttacatggcatgtgctccttctcctcgtcacatgattctagtgccaactaatcctatgcttgtatagatggacaaacgttaaatattcagatatgagaaaatactagtattgtcttgcacattcaaactattattactgtcttgcacattcaaactactccaggtaaagcaaatatatgatgccataatagagaattactctgctcagtgtatctaatttttttaaattactctgctcagtatatagagaattactctactcaaggtatgcaaatatatgatttgtattggacaattgcctcctacatcgatacagtgacacacgcctagcctctccatcatcgatgaccatactccattctactgagctagatactgcagtttggactggtgctcaagttcttagtatctgaatctgttttgcatataaatatgatttcagtcatgtgaccttattaggtgcatgcctttatgaatctgtgaatgtgtccagttagttgcctattaatactaactgcaaatcagtgaatgcgtattgtcagttatatagcataactaattcataaatatattgtcagttatatagcataactaggcaggtaaatgaatagtggttagtccataaatgtattgtcagttatatattgtgctttggtataactttgcgactaaactacataaactaattctaagtatcagaaaggtatagatgctaaagctgagcgtagacagtagttcattattgcaatctcaataccttgaacaagtaaacaaatatccagttctaacacattagagatgtgaacgtgataaagattctagtgagatgactgtgttgtcacggcctcacactcaaagcctccctattctgttcgcaatggccatcggtcatttgggtctctcagcaggacatgagctacgagacagccatcacgaccaccagggccacggccgtcacggcaacagtgtccgctccagtggcctgctgctcgggctcgtcgacggtagagaccaaggatagagccccaagaattaaaagaggtggaatgcaggatccaataaacaacaagtgagatcttgggaactagcgagacctagcgagatctggaaatggaatcgggatggcaagtgcgtactagcgaggagttagaggaggacggcgtgagtaccggcgaaaatttgttgttctccacgccggtcgccgtgtcgtgcgtatgcgtcgatgtagccaccgccgctagccaccgccgccacctcgcgctgagcactctcgctcgcgggttctttccacgacggggtgacgagggatgtttcccgacccgggttgagctcggaatagtcagggtgggccggagttgaaacccggacggggtgaaacgaacgctgtttcgttgtgggctgtgatcttttctagcccacgctgatccacgggggattgggctcgatctcgaccgggtttggcttaaacgaacatggcccgaaggagctccctgaccaccatccgaagcaccggcgccagtgcaccggagttgtctccgtggcggcttccgcccttctctcaacgacgccgcacaactcgccccagttcggccaccatatgaggatcaaggggcccgcatcacatgatactttataacccggcaccgcgacacatcaaaccatgaggctgggctcggttacaattcctaacataatccatgttttctcgtcgaggctcgatgtgatccgttgaagaaacatctgacaacctagctgtaatgtaacacgctgaatatgaaagtataaaatttcttttctaatattcaccaaattcagatgttatcctctcctttaccgcttttcttctttttttctaaataatgaagagttatatatatatatataagttttttagcgtagtaaaataaaatcctggagaagctttgaaggttttatttatgtcgttgtatagtgtttataagtgcaaatgttttcaaactatatcgaattatcttgtttatgttttcggaaactttcgggaaccttcgaaatgtttcttcgagtattaaatatgaatttcagtttttctaatattaattaaattcctaaaatttagtatttacgaaaactataaaattttgaaaactcgataatatatatatagattgtatattaggagccctgggcttccaataactaaaggaagcccggggcagacagtgcaatccggaccacatccggacgtctataaaacaggacccggagtgctagggttcagtttttc

SEQ ID NO: 39719 - DNA, 7152 bp, Zea Mays
aaaatatgttgcttataggagaagaaaggaggttccttctaggctaagtaaattgttcaaagggagaaaaatctcccttgggatttgccggtgtggagaacagggagaaccggcgtctggcgaacgagagtccgaggaatgagaaaaaaatagttagtccaagaatttaatttttcagtgtcgctcggaaaatttgtccacgtacgattaggaaatcaaaatgaattgagactgactagctttcggatctatgattaatagagacaaatcgcgacatttaaaaatcatcgccgatgttgatttttgaaatcagatcggaccgagagggattaagccaagtcgaataagaatttatttgaggacaacgcattggagattccactttgaaattttctcgcgcactattttagaaacaatgtttctctcaaacttttgatcggctttggatttttagtcggagaaggcgaatcatgacattttaaaaagcactgtcgatgcgggtttttgagttcgattcggacatagagatatttggccgagtcggataaaattgattagaggacgacatatcgagtattccatttgcgagtacggatccgaataaaatagtcggacatcgatcgaggttcggggaatcggactctgacacagctcgactagcaactgtcgagcgcttgattaaatgagcttcatatgagatttataatttgagatggattatcgagttcgtattcgtgccaagaattaaaagttttaacaggctccaaattcggccttctgtgagactgaataactccgaatttggtgaaacgcgaatgaataagctagataatcagagacatacgcgagcgagaaatagaaattttcactgagcatccgagattaggataaatctcccgatataacgcgaaatagacacctggggtgtcacagccttccccccttaaaaagaatctcgtcccgagattcgaataaggatatttaagggtggagaagcatgtaactcccagactgaagatagatgcaaattcatgagagggtatctgacaagatactgaagacagatttggttagaatatcgcgacatatcgagacaaaatgcagcgatcattctgagagtgtccacaaaagatagcacatcagtgtagtcttataatggaccacaactattaaccgtgataccagtgcgtgccgagcagctcaaccatgtgtgcaccatagtaggctctcggtttcgtcgcagcaccatcagtcgttagtcatgacacccttaccaaacataaccaatgaaaaaattcatgtggcttaaattagatgcaacccatgagaatatggcttagaaaatgtgactgaagttggggcaaagattgttggcaaaagagcctcacatgagaattttcttcaactcagagaactatttttttgatcatcacagggattatcagccaaagattgatacgatattcaatatgaagaggaaccaaccatgagatcgagatggacaacttgctgagacatgagagaactaaagacaaaagcaaaatccattgaaccgaatgggtacactgttggtagataaaaattgataaaacagtgtcatgatcctcgaagaatgagtatgagaatgaccagaattgagagattttggtatatcaacatctgatacttgagaacgagttagagcagatatccagataatagggtaggatcaataggggatccggagatttggatgataaggtcacaacatgattcacaaggaaaagattaccagatccaggtgaaaggagaggtagtcagatgagattgattaggatgggcattagaaaggttatgaagatttgggacatgatctatggaaagaaacatgaccttgatagggtttgcgcaactagacaccaacgatttttttttgacgcaacaagtgcacaaggagactggggtagtctagcggtcaagctatgggcatctataggttgtgcaggtttaatttcaagggtaaaacactcaagggctagaaaataccaacaccagcagaattttattttaaagaggtttcacttgctaaactcaaggttgtttggacggggggtctttttcatgagcagaacaaacaacacttttttttttgcaacaagggttgaacaattaccctaccacctagatagccagacaagagaaacacatatcacaacataacaagacataaccatttgacacgagataaggcatttctaacatagcagtacatcacattattcacaagtttttattattggaataaaggtaagagaagcgtgttgatgcacaagagacaatgatgcgacaatcaggatgcatgctcattctagtcgtcttctcagacctgactaattttcgggtgcttctacagcatccttattaatagtagtagtagcctctatggcctatacacatagccacctagctacccatctatttcctaaggtttcacgtcctaggtctatccttatcgtcctgacaactatccaacttggtttctaagcaagttttacttttaaaaagttggtatttatgacttattgacttctctgtaatggtattcgctccgataccagctgtggcggaaccgcccgaattattccaacttaagtgcctaagtcccgccttagaggctagaccacacttaaataggaataaaccatcagtccctcggatctagtccgataaagccacttaaccaggatcgaataccattagctcactcgaaggtgaggcacagagaaatacaataaagcataataccacaaatttaagaagtaccattagggattacattatcggagtttcagaaataataaccataaattttaatgcagcggaaataactaacggagaaaacccgagtaacatggcgaagcctggccacgctactcctcctggtcctctcctgcggaagcagtaacccactcgaccatctatcccggtggcagggatggaggctaagtcacaccatcaaccaatcatcctaaggagtacctgcaaaaattgtgccacaagcaaggctgagtatactaatactcagctagacttacccggtgtgaggagtctactcctctacctctagacatgcagctgtttggctgaggggtttggtttgtcaaaagcactagctgagtctaaaaacaaattttagcttttcaagttttagtgtaatcttttagactagatgaatacctagctattcatacatgatatcaaacattattgcaatcaacatcttttgccagtcacctcatttccacttattactcaatgtagcagcatggatcaagcagtctcattagctgcgagaagcagacgattcgaatcgagtttttaaaccttgcaaggtaaacctaaacacacgacatgcaggggcactccgtccccacacacatcaaccttccccatcaattccccgtcagcagaacagggctcaccgccttggcgtacaatgcctcactgaccccgactggccgtcgtgcagtgaccgcacttgtacccaccataaccggaatgggagacctcgtctcaagtcgcgtgaggggcaaagtctactgccaggttcaatcaggtactaggcttaccgatttaccatatttctcggtatgtgtttagtacgttcaaacgcttgacacacggtaccacaccttaatccttattcccatttttaccttgtaaacaaccaatccccatggattgttgtccaccaactagtatcatgacaatgtgaaagtgggtacaatcaatttcctgatctcgcgcgagtgctagaaaaatcactcgtcttctaccgagatcctaattaataaagcagctactcgacctagcatactagtatccatctcaaagggaatcctgagttcatgcaactagggtttcattcaactcctacacttaagtgcacggtacaagcctacaaacattaagtgcagtaaaatagcatatataacggttatgcataaaccggggcttgcctttaatttaacaattaagtagtgtttgctggggagggtactcgctcggcgagtatccactggttaagtccattcttcaggtcgtccaccaactgcgtcttgtggttggcaccacatcactggctcgatcatcatctctcggtcctatatgaggtgcaagatgcatatgtatgaatataatgaaatagcacaagatattttaagtacacgctagcgaattaaacaccaagtagcgagacatcccaagcaaccacacacactagcgttagctaactacctatcatcgagcgcacaacgttaacaccactaaaagacgacaaacatttcgtatacttacgcaacacaaatatgaccccataagtacaagcatttatttaattttgctacggcctttcattagttcttctatttatcacacaaaaacatccaacacaagtttaaccgatgacataggcatcaatggctatggaaattctatatcacaatcaactaaagaagaacatataaaacaagacacacatatcatctctagcttaaccatggcaagtctacattacttaagagcaaaccaaatatttttagcgacaagggtgaactaaacaatcaaaagcgcactagcagaatttttgggcagcaatacagcagtcacttgtttcagtcataactcacaagatatttaaccaaaaatagtaaactaggactttctagaaagcttgaaaagtgctttacaactttggtattgtcatcacagcattattaaacacttagcaaggtcaaaaggtgttaacacaacagcgctgtccagatttggacagattcagacttgcaacttcaaaaattcacaactgaagattcaggcatccaaacaaattgatcctagactttttggaaagctaattaaatgttctacaaattatttataaacattccaaggtgattcaatatttaactaaggataaacatcactaaaagactttgctgtccagaactggacagattcagtctttatatttgaaacattcataacttaagcttcagaccaccaaaaagagtgatctaagactttttggaaagctcagcaaaagcactatataacttttataatcaccaagaattgattctatgttgaactgaatcaaacaattcagttttcgaaatctgttctgtcagtggacagaacacaacaaccaagttgtaaaattcataactcttaaaccgtcaggcctttagttatgaaattttaacacaagtaagataataaaagcatctacaactttcttataatctacaaggactgattcaaacattgacttaagcaaacagtacagtctctgaaatctgtacagaaattggacagattcagttactgaatttgtaaaaagcataactcctaaactgtcagacctatggctgtcaaattttaacacaagtaagataatagagttatctacaactttcttgtgaccaccaataacttatttcaacattaacttaagcaaccattgcaatttctgaaatctgttcagaaattcgacagattcaggtgttgggcttgtgaaaagcacaactcttaaacgatcaggtttatggctgtcaaatttttgtataagcaatataatcatgttatatacaactcttctatatgacctttctacagaaaacattatttggtttatcaaacaaacagcacaacgaaaacaatgtgtgcagtccaaaacagcaatcaataaattttcagctcctatataattcaagaatttgtcgtgttctagagacttgaattgctctaacactttaccatgtattagagttgaaataatcatttgaggaccaacaagtcgacttactaatttttatccaagtcatttcgtgcgctagagttaccacataattaacaaacgtattcaccaaataaagcatttcgacacgcatgtccgacatcacacaaaactacgatgaagtactactaatatttatctttaggacaccatgacataaccattaaatctctaattagttttaaggtgtaactcaagcattccatgaaacatgcatgattttgttttctcctaatttttcactaactcttgtaattataaaaggggtgttattttagcaccatatgaaactatctaatttggggctggaattttttatgaggcataggtaataacaatttatgactaatgtataaatttcacatgcccaggttttatattttatttaatacaaaaataataaattgtcaatgcaataaagcatgtgagagcaagttaaatctaaaactaattattttctgtagatgcattaccatattgagttttcttaggctaatataataccatgcaaggacagtagaacactattttccattttttcatctatacattatttttaaatcatttaaaactacttaaggtgtattaaacaagttaaatcactaacttaatcatacatgcacaaaaattcatgatatatttaccagtcaccaagcatcacaccaagagtctactgtaaaaatttgaatccatttggagcactagagctacagatctaaaaataacaagaaaaacaaccatctttttcctatttaacatgtttaaattaacacaccaagaaaacagtgaacaacctacaagttttatatttttcttagatggattatgacaacatctaactaacaaaacaagtttgatcatttttggatttttataatgaaaactatggagagaagcaagttcgtttattctctaaacctctctttaagatttaatttgcacagacaaaaacgtctactaaaataggtcatattatagatctaataggtaggacattccatatgaaagctaacaaaacaagtcttactattttaggagctcccaaactcaagttatagattttagaagaaagtgcaagattctgaaatttcagcacacaagttcttgacccggagctcacctacatcttactgccgtagaggagggggagacgccatgggagagcttgccaaggtgagagtggagcttgggagggctggtcgccagctccaagggaggaggggctgctgctgcatggggagctagagagagggagatagagagagagggagggagtagggagagtggcgtggggagagggagggagaggaaatggc

SEQ ID NO: 39720 - DNA, 716 bp, Zea Mays
cgacagcccgccaactgcagccgtcggatactcccacaggagcgttccgaagccctaatgctcgcccttcccataagtactctcctctgaccacgccgccgccatttccttcctcctcccacctcggcggccggcctcctcttctcttcacccacacgctggtcatagagatgtcggctgcagaggcgaaggcggcggcggtcccggagtctgtgctgcggaagcgcaagcgggaggagcaatgggcagcggacaagaaggagaaggcgctcgcggacaggaagaaggcgctcgagagccgcaagatcatcttcgcccgcgccaagcagtacgccgaggagtaccacgcccaggagaaggagcttgtgcagctcaagcgtgaggcccggttgaagggtgggttctatgtgagcccagaggccaagcttctgtttgtggttcgcatccgtggtatcaatgccatgcaccccaagacccgcaagatcttgcagctcctgcgattgaggcagatcttcaacggtgtcttcctcaaggttaacaaggcaaccattaacatgctgcgcagggtggagccatatgttgcgtacggataccccaacctgaagagcgttagggagttaatctacaagagaggttacgggaagctgaacaagcagaggattccacttagcaacaacagtgtcatagaggagtctttgttttactttctgtgcgtg

SEQ ID NO: 39721 - DNA, 1188 bp, Zea Mays
cgacagcccgccaactgcagccgtcggatactcccacaggagcgttccgaagccctaatgctcgcccttcccataagtactctcctctgaccacgccgccgccatttccttcctcctcccacctcggcggccggcctcctcttctcttcacccacacgctggtcatagagatgtcggctgcagaggcgaaggcggcggcggtcccggagtctgtgctgcggaagcgcaagcgggaggagcaatgggcagcggacaagaaggagaaggcgctcgcggacaggaagaaggcgctcgagagccgcaagatcatcttcgcccgcgccaagcagtacgccgaggagtaccacgcccaggagcttgtgcagctcaagcgtgaggcccggttgaagggtgggttctatgtgagcccagaggccaagcttctgtttgtggttcgcatccgtggtatcaatgccatgcaccccaagacccgcaagatcttgcagctcctgcgattgaggcagatcttcaacggtgtcttcctcaaggttaacaaggcaaccattaacatgctgcgcagggtggagccatatgttgcgtacggataccccaacctgaagagcgttagggagttaatctacaagagaggttacgggaagctgaacaagcagaggattccacttagcaacaacagtgtcatagaggagggcctcgggaagcacaatatcatctgcattgaggaccttgtccacgagatcatgacggtcggcccgcacttcaaggaggccaacaacttcctctggccgttcaagctgaaggcacccctcggcggcctcaagaagaagaggaaccactacgtggagggcggtgacgccggaaaccgtgagaactacatcaacgagctcatcaagaggatgaactaggctctctcttgtatcctgtgagaatgcttttctgtgtcagcgtggttgtttttgctctagtaagttgacggataatgatggatatgcaattatttttttggtgttccatggctctaatacagccagacttcactaggaactgtgtcgctgtttatgttggcagttgcttctggaggtttttgtctacttttgttatttttattttcttttgtatatgttgcgcggaccttgtcaattgcctgatgctgcctaccgagccaacatataagccggtcgtttcattgta

SEQ ID NO: 39722 - DNA, 913 bp, Zea Mays
cgacagcccgccaactgcagccgtcggatactcccacaggagcgttccgaagccctaatgctcgcccttcccataagtactctcctctgaccacgccgccgccatttccttcctcctcccacctcggcggccggcctcctcttctcttcacccacacgctggtcatagagtatcaatgccatgcaccccaagacccgcaagatcttgcagctcctgcgattgaggcagatcttcaacggtgtcttcctcaaggttaacaaggcaaccattaacatgctgcgcagggtggagccatatgttgcgtacggataccccaacctgaagagcgttagggagttaatctacaagagaggttacgggaagctgaacaagcagaggattccacttagcaacaacagtgtcatagaggagggcctcgggaagcacaatatcatctgcattgaggaccttgtccacgagatcatgacggtcggcccgcacttcaaggaggccaacaacttcctctggccgttcaagctgaaggcacccctcggcggcctcaagaagaagaggaaccactacgtggagggcggtgacgccggaaaccgtgagaactacatcaacgagctcatcaagaggatgaactaggctctctcttgtatcctgtgagaatgcttttctgtgtcagcgtggttgtttttgctctagtaagttgacggataatgatggatatgcaattatttttttggtgttccatggctctaatacagccagacttcactaggaactgtgtcgctgtttatgttggcagttgcttctggaggtttttgtctacttttgttatttttattttcttttgtatatgttgcgcggaccttgtcaattgcctgatgctgcctaccgagccaacatataagccggtcgtttcattgta

SEQ ID NO: 39723 - DNA, 503 bp, Zea Mays
tcatgtcgtcggcagtgacgctgtacgggtgcgaaagaggtgaaatggccgatcgagatcctgggggcccagaacgacacgaccacgccgccgaaagaagtgtatcggttcgtgcatgtgctgcgtgaaagacacgaggttccctactacgccaagatcttccagggagtcgagcacgggttcgcctgcaggtacaacaccaccgaccctttcgccgtcaagaccgcagagacggccctcgcctacatggtcagctggttcaacaagcacctcaactgaatgaagcctgcactgcacccaccagactgaattcaataaaccactgcagtgctgtgatattttgtttcgattcatggctccccagattgatttgtcatggctaagacctctactactgtaatttccttcattttttgtctcttcaaactctctgtattcttttttttgctttttatgatcgcaataaagttcagtaggggtatacccctcctgtttgcttcaaa

SEQ ID NO: 39724 - DNA, 705 bp, Zea Mays
acaaaacattgtaacaaactacatatactaaagtttagtacattgagagcttgtctagctagtccatggccactcaaagtccccatgttctcgttgtggatcattcccgtgttgattgccttgttgcatcgattgtcctcaatagtttcaacattcgagtaactgttgcgggaggtgccatggaagcattggaattcttagatgcgaacaacagtcatgtggaccttattttgactgactactgcatgcctgatatgactggctatgatttgcttagggaagtgaagactaaagcacattccagtggtgattacatgcactgatgtcataccagaaagaatcattgagtgctttgaaggaggagcagaggaatacatgataaagcctctcaaggtttctgacgtgcctcgtattcttagctacatgtgatgcacttgagggagaaaacgaataaaaaggaaatgcaagcataaacagtctttgggttatagttctctatcaatcatgcttaagtgtgaccatatatggtctttttattatgtcacctgttgttttgaataatttgtagccaatgcaagcctaatcagtatttggcttatagttctctatcaatcatgcttatgtgtggccatctatggtacttttaatgtcatccattatttttttatccatgtggtgttttgtggatgaaatccaagtcattcc

SEQ ID NO: 39725 - DNA, 1278 bp, Zea Mays
gtgggaattatgctgatctgcgcggggtttgggcggaattgatggggtttttgttgttctgctgtgcgatttcgcatatctatctttatggaggtcaagtaacatcatggaagaatgacaatggggaagagttgctttttctcagcagcaaggctattttcaaacctccaaaagctattcgtggtggtataccaatttgctttccccaatttggaacacatggaaatcttgagcaacatggatttgctaggaaccggttttggactatcgacaacaacccaccccctttaccagtaaaccctgctattaaggcttatgttgatctgattttgaagccttctgaagaggatttaaagatctggccccacagttttgaatttcgcttgagagtttctcttggaccttctggagatctgagtctcacatcccgaatcaggaataccaacacagatggaagacctttctcttatacatttgcatatcacacatacttctctgtctctgacataagcgaggtgcgtgtcgaagggctggaaacaatggactaccttgacaacttgaaggcaaaggagcgtttcacggagcaaggcgatgctattgtttttgaatcagaagttgataaagtttatcttgccgcaccctctaaaattgccatcattgatcatgagaagaaaagaacatttgtcgtgacaaaagaagggcttcctgatgctgttgtttggaacccttgggacaagaaggcaaaagcaatgcaagattttggggatgcagaatacaagagcatgctgtgtgtggagcctgcagctgttgagaggcctattactctgaaacctggggaagagtggaaaggaaggcttgtgctttcagctgttccttcgagttactgtagcggacagttagatccatcgaaggtccttcagggttgaaaatcctcactttctgcatcttgtacagaagttcattgcccttaatatttgatgctgggctggcgtcaacgccgcatgttccttttgccatttccaccccctatatttctggtcccttttgtatctagaatttgagtgataggttgattccgaataacagtctgtgatttgagcttaggattgggtcatctcatcgatgaatgataccgctggacaaaatgctggcgtacgtgtcagtttcataaatcattcttctcataaattctttagcatgtacttcgtagttgatcatgtttcgatcggtggacccttttgttactttcttgtctgataaggtttcgatcggtggtta

SEQ ID NO: 39726 - DNA, 418 bp, Zea Mays
gtcgtgaagctcgttgccggaccgtctgcatccgtacgccgttcgccatccgtggagcctcgccggagttcgcgtctcgcctcaccgcgatcgaatccctcgattcaccacaaggtctcatgctcaactcaaattgtttcaaagaggaggacttgaggtgttacataaagagaagagaaggagggtctcatcttcaggaaatacatcagccatgggtaacaatgatttaagtggagcacaaacatcgaatgatagtgcaatgaaagtgcagctcctggagggaggggaagaggaaggggaaggggaaggggaagaggaggaagagggaggctagcaacattacttgggtttgagtggttatgggacttatatgctaggtgccttcttttgtatgaacatgaacatgtgatgattatgg

SEQ ID NO: 39727 - DNA, 3030 bp, Zea Mays
ctaccacatctcaccgggccgcgccggagctgctcccttccgtttcgtccctctccttccggcggcagctgcgtcggccgcggctgccaacggccggtatggcgggcctcgaggagatcaagaatgaggcaatcgatctggagaacatccccgtggaggaggtcttccagagtctcaaatgcagcaagctgggcctgtcctcggaggaggcggaggcgcgcctcgccgtctttgggcccaacaagctcgaggagaagaaggagagcaagttcctaaagttcctggggttcatgtggaacccgctgtcgtgggtcatggaggcggcggcgatcatggcgatcgcgctcgccaacgggggcggcaagccgccggactggcaggacttcgtggggatcgtgttcctgctgctcctcaactcgtccatctcctactgggaggagagcaacgccgggagcgcggcagaggcgctgatggccaacctggcgcccaaggccaaggtgctgcgcgacgggcgctggagcgagcaggacgcggcggtgctggccccgggggacatcatcagcgtcaagctgggcgacatcgtccccgccgacgcccgcctgctcgagggcgacccgctcaagatcgaccagtcggcgctcaccggcgagtcgctgcccgtgaccaagggccccggcgacagcatctactcgggctccacctgcaagcagggggagctcgaggccgtcgtcatcgccaccggcgtgcacaccttcttcggcaaggcggcgcacctcgtggacagcaccaaccagacgggtcacttccagaaggtgctcaaggccatcggcaacttctgcatcgccaccatcgccatcggcatcgccgtcgaggtcctcgtcatgtacgccatccagcaccgcgcgtaccgcgacggcatcgacaacctcctcgtgctcctcatcggcggcatccccatcgccatgcccaccgtgctctccgtcaccatggccatcggctcgcaccgcctcgccacgcagggcgccatcaccaagcgcatgacggccatcgaggagatggccggcatgaccgtgctctgcagcgacaagacgggcacgctcaccgtcaacaagctcagcgtcgacaggggcctcatcgagatcttcgccaagggggtcgacgccaacggggtcatcctcctcgcggccagggcctccagggtcgagaaccaggacgccatcgacgctgccatggtcggcatgctcggcgaccccaaggaagctagggaaggcatcaaggaggtgcatttcctccccttcaatcccgtcgacaagcgcacggccctcacctacgtcagcctcgccgacggtagctggcaccgtgtcagcaagggtgctcccgagcagatcatgaccctatgcaactgcaaggaggatgtcgtgaacaaggtgcacgccatcatccacaagtacgctgagcgcggcctaaggtctctcgccgtcgccacacaggaagtgccggagaagtctaaggacagccccggcggcccatggcagttcgtcgccctgctgccccttttcgacccgccgaggcacgacagtgcggaaaccatcaggaaggcgctcaacctgggcgtcaatgtcaagatgatcaccggtgaccagctcgccattgccaaggagacgggcaggaggctggggatgggcaccaacatgtacccctcctcggcgctgctcgggcagagcaaagatgaatccatcgcctccatccccgtggacgatctgatcgagaaggccgatggctttgccggcgtcttccccgagcacaagtacgagatcgtcaagaagctgcaggagaggaagcacatctgcgggatgaccggggacggcgtgaacgacgcgccggcgctgaagaaggcggacatcgggatcgccgtcgccgacgctacggacgcggccaggagcgcctccgacatcgtgctcaccgaacccgggctcagcgtcatcatcagcgccgtgctcacgagccgctccatcttccagaggatgaagaactacaccatctacgcagtgtcgatcacagtccgtattgtgctcgggttcatgctgatcgcgctgatctggaagttcgatttctcaccgttcatgatcctggtcattgccatcctcaacgacggcacgatcatgaccatctctaaggacagggtgaggccgtctccgcatccagacagctggaagctgaacgagatctttgtcaccggcgtcgtctacggcacctacctcgccgtcatgaccgtcatcttcttctgggccatgcgcagcaccgatttcttcacgaacacgttcggcgtgaggtcgctgcacggcagccgggacgagatgatgtcggcgctgtacctgcaggtgagcgtcatcagccaggcgctcatcttcgtcacgcgctcccgcggcttgtgcttcacggagcgccccggcttcctcctctgcgtcgccttcgtggtcgcccagatcattgccaccctcgtcgcggttatccccaccatcgggttcgcgcacatccgcggcgtcgggtgggggtgggcgggcgtcatctggctgtacagcgtcgtcaccttcctgccgctggacgcgttcaagctggccatccggtacgcgctgagcggaagggcgtgggacacgctgttcgagcacaagatcgccttcaccaccaagaaggactacgggcgggaggagcgggaggcgcagtgggccacggcgcagcgcaccctgcacggcctccagacgcccgaactggccggcgtcctcaacgatcgcaccagctaccgcgagctctccgagatcgccgagcaggccaagcgccgcgccgaggtggccaggctgcgggagctcggcacgctcaagggccagatggagtccgtcgtcaagctcaaggggctggacatggaaggcgtccagcagcactacaccctgtgagtgaatgcggtagtgtatttgtaattgttgctgtactcattgggaaataataacaacaggaattgaaatggttgtgatg

SEQ ID NO: 39728 - DNA, 3250 bp, Zea Mays
agaagattaaattgagagtaccaaacgagagaaaccccacaaaatcaatattataacagaaaaaagtcggagggttcgggtcgaggtgcttcatccacacccagcgaatcctcgccgcgggagtcacgcaaccgccgtctcctcgccggcacgcttcgccgccgccgcctctctcctcctcgtctcaaccgccgcctgcacacgcagaaaaggagggagaataagaggatcagcaaaccccaagccctccactcgtcgccccctgctgcaatcgccccacccgcctccgcccgccgccgcttctcctcaccttcctctcccgcgacatctcagttcttcatcaccaaaagatggtcggcggcggcaacgagttccgtttcttcttgtcctgcgacatcagccacccgcttgccttccgtgttctccacgcagaacatatcttgttgaccgaccaaaaagtcccagagctctttgttgagtgcaagctatacatcgatgggatccaatttgggttgcctgtaaaaacaaggttggaaccttctggaccgaaatactgttggaatgagctcataacattaagtaccaaatacagggacctaacatccctctcgcagcttgcatttacggtgtgggatgtctcatctggtgagaaccctgaggttgtcggtggagccaccatatttctttttaacagcaaaaggcagcttaaaacaggaagacagaagctgcggctgtggcccacaaaggaggcagatggaggagtccccaccacaactcctggcaaggttcctaggaatgagaggggtgagatagaacgtttggaaaggcttgttaacaagtatgagagagggcagatacaacatgttgattggcttgatcgtcttgccttcagtgctatggacaaagctatggaaaaagagtgtgagaggaaggccaatttgtaccctagtctggttgttgaattgtgcagtttcgaacatagaattgtcttccaggaatctggagcaaatttttatacaccggccccagtatcattatcaaatgaactggttactgtatgggaccctgaacttggaagaaccaatccatctgagcacaagcagttaaagcttgctaggagcttgactcgtgggatagttgatagagatctaaaaccaagctcaaatgagagaaagttactacaaacaattattaagtttcctcctacacgcaccttggaagtggatgagaagcaattggtgtggaagtttcgtttctctttgatgtctgagaagaaagctctaacgaaatttgtccgctcagtggattggagtgataaccaagaagctaagcaagctgttgagttgattggaaagtgggaaatgattgatgtggctgatgcactagagcttctctcacctgattttgaaagcgacgaagttcgtggttatgctgtcagcgtacttgaaagggctgatgatgaagaattacagtgctatttactccagttagtgcaagctcttcggtttgaaagatctgacaagtcccgtctagcactctttcttgtaaaccgtgctttgtccaacatcgaaattgctagcttcctccggtggtatatattagttgagcttcacagtcctgcatatgcaagacgatattatggcacatatgacatgcttgaaaacagtatgatgaaattggttggtagggaggatggggatgaagatggatttcgactgtggcagagtttaacccggcagacagacctcactgctcaattgtgttctattatgaaggatgtaagaaatgtaagaggtagcgcacaaaagaaaattgaaaaattgaggcagctattatcaggagttttcagtgagcttacaaactttgatgagccaattcgttcaccattagcaccaactcttctcctaacaggagttgtgcctcaagaatcgtctatatttaagagtgccttgaaccctttgcgcctgacatttaaaacagcaaatggcggaacatccaagattatttacaaaaagggtgatgacctccggcaagatcagttggttattcaaacggtttctttgatggaccgactactcaaattagaaaatctagatttgcaccttactccataccgagttcttgcaactggacaagatgaagggatgcttgaatttattagttccagttctcttgcacagattctatcagaacatcgcagtattacaagttacctacagaagttccatcctgatgaggatggtccttttggtataacggctcaatgtttggagacattcataaaaagctgcgccggttactctgtcattacatacatattgggggttggagacaggcatctggataatcttcttctaactgatgatggacgcctttttcatgttgactttgcttttatccttgggcgagacccaaagccatttccgccaccgatgaagttgtgtaaggaaatggttgaggccatgggtggtgcagaaagccaatattacacaaggttcaagtcctactgctgcgaagcatacaacattctgaggaagtccagcagtctcattttgaatctattcaagctgatggagcgatcaggcattccggacatctctgccgatgaaagcggaggtctcaagctccaggagaaattccggttggatctggacgacgaggaggctatacatttcttccaggatcttatcaacgatagcgtgagtgctctgttccctcaaatggttgagaccatccatagatgggctcaatattggcggtaacacaagctaatgtcgtagaagcaagtgtgaatctgtacatgctgactgtcacaagccacggtaataagcgagaaacgacactgatggatggaagcctaggcgcctagcatttggggttcaagctgcgccgcatctgcgaattgattgggctgatgcagggcatgggcaatcttctcgtgccggtgacacccaggaattcgggttgtcagttgtcacttgtgatagtagaattccgtcacgcactgctgtagacctatgggcattcgtcagatgtatatatgcgttaatgtataaaatcaacttcagtagcaaatttgtgaataccggaatacgtgatggtttaagttctttagtagtttgtaatgataagactagcctgccaggtgccagcagtctcaggagcatgtgggctctacaaggagattagcagctgctggagcattattgtgaaactaccaagtcttatatgatagcaatatcttttgctc

SEQ ID NO: 39729 - DNA, 3138 bp, Zea Mays
gaaaaaagtcggagggttcgggtcgaggtgcttcatccacacccagcgaatcctcgccgcgggagtcacgcaaccgccgtctcctcgccggcacgcttcgccgccgccgcctctctcctcctcgtctcaaccgccgcctgcacacgcagaaaaggagggagaataagaggatcagcaaaccccaagccctccactcgtcgccccctgctgcaatcgccccacccgcctccgcccgccgccgcttctcctcaccgttctcttccttcccaggccgttcatagcaagcgaccgcagacgttttgacttttgagcgttgttgatacggtcactctttccccagttcctctcccgcgacatctcagttcttcatcaccaaaagatggtcggcggcggcaacgagttccgtttcttcttgtcctgcgacatcagccacccgcttgccttccgtgttctccacgcagaacatatcttgttgaccgaccaaaaagtcccagagctctttgttgagtgcaagctatacatcgatgggatccaatttgggttgcctgtaaaaacaaggttggaaccttctggaccgaaatactgttggaatgagctcataacattaagtaccaaatacagggacctaacatccctctcgcagcttgcatttacggtgtgggatgtctcatctggtgagaaccctgaggttgtcggtggagccaccatatttctttttaacagcaaaaggcagcttaaaacaggaagacagaagctgcggctgtggcccacaaaggaggcagatggaggagtccccaccacaactcctggcaaggttcctaggaatgagaggggtgagatagaacgtttggaaaggcttgttaacaagtatgagagagggcagatacaacatgttgattggcttgatcgtcttgccttcagtgctatggacaaagctatggaaaaagagtgtgagaggaaggccaatttgtaccctagtctggttgttgaattgtgcagtttcgaacatagaattgtcttccaggaatctggagcaaatttttatacaccggccccagtatcattatcaaatgaactggttactgtatgggaccctgaacttggaagaaccaatccatctgagcacaagcagttaaagcttgctaggagcttgactcgtgggatagttgatagagatctaaaaccaagctcaaatgagagaaagttactacaaacaattattaagtttcctcctacacgcaccttggaagtggatgagaagcaattggtgtggaagtttcgtttctctttgatgtctgagaagaaagctctaacgaaatttgtccgctcagtggattggagtgataaccaagaagctaagcaagctgttgagttgattggaaagtgggaaatgattgatgtggctgatgcactagagcttctctcacctgattttgaaagcgacgaagttcgtggttatgctgtcagcgtacttgaaagggctgatgatgaagaattacagtgctatttactccagttagtgcaagctcttcggtttgaaagatctgacaagtcccgtctagcactctttcttgtaaaccgtgctttgtccaacatcgaaattgctagcttcctccggtggtatatattagttgagcttcacagtcctgcatatgcaagacgatattatggcacatatgacatgcttgaaaacagtatgatgaaaggaggatggggatgaagatggatttcgactgtggcagagtttaacccggcagacagacctcactgctcaattgtgttctattatgaaggatgtaagaaatgtaagaggtagcgcacaaaagaaaattgaaaaattgaggcagctattatcaggagttttcagtgagcttacaaactttgatgagccaattcgttcaccattagcaccaactcttctcctaacaggagttgtgcctcaagaatcgtctatatttaagagtgccttgaaccctttgcgcctgacatttaaaacagcaaatggcggaacatccaagattatttacaaaaagggtgatgacctccggcaagatcagttggttattcaaacggtttctttgatggaccgactactcaaattagaaaatctagatttgcaccttactccataccgagttcttgcaactggacaagatgaagggatgcttgaatttattagttccagttctcttgcacagattctatcagaacatcgcagtattacaagttacctacagaagttccatcctgatgaggatggtccttttggtataacggctcaatgtttggagacattcataaaaagctgcgccggttactctgtcattacatacatattgggggttggagacaggcatctggataatcttcttctaactgatgatggacgcctttttcatgttgactttgcttttatccttgggcgagacccaaagccatttccgccaccgatgaagttgtgtaaggaaatggttgaggccatgggtggtgcagaaagccaatattacacaaggttcaagtcctactgctgcgaagcatacaacattctgaggaagtccagcagtctcattttgaatctattcaagctgatggagcgatcaggcattccggacatctctgccgatgaaagcggaggtctcaagctccaggagaaattccggttggatctggacgacgaggaggctatacatttcttccaggatcttatcaacgatagcgtgagtgctctgttccctcaaatggttgagaccatccatagatgggctcaatattggcggtaacacaagctaatgtcgtagaagcaagtgtgaatctgtacatgctgactgtcacaagccacggtaataagcgagaaacgacactgatggatggaagcctaggcgcctagcatttggggttcaagctgcgccgcatctgcgaattgattgggctgatgcagggcatgggcaatcttctcgtgccggtgacacccaggaattcgggttgtcagttgtcacttgtgatagtagaattccgtcacgcactgctgtagacctatgggcattcgtcagatgtatatatgcgttaatgtataaaatcaacttcagtagcaaatttgtgaataccggaatacgtgatggtttagggcctgtttgttta

SEQ ID NO: 39730 - DNA, 2998 bp, Zea Mays
gaaaaaagtcggagggttcgggtcgaggtgcttcatccacacccagcgaatcctcgccgcgggagtcacgcaaccgccgtctcctcgccggcacgcttcgccgccgccgcctctctcctcctcgtctcaaccgccgcctgcacacgcagaaaaggagggagaataagaggatcagcaaaccccaagccctccactcgtcgccccctgctgcaatcgccccacccgcctccgcccgccgccgcttctcctcaccttcctctcccgcgacatctcagttcttcatcaccaaaagatggtcggcggcggcaacgagttccgtttcttcttgtcctgcgacatcagccacccgcttgccttccgtgttctccacgcaggtgtgggatgtctcatctggtgagaaccctgaggttgtcggtggagccaccatatttctttttaacagcaaaaggcagcttaaaacaggaagacagaagctgcggctgtggcccacaaaggaggcagatggaggagtccccaccacaactcctggcaaggttcctaggaatgagaggggtgagatagaacgtttggaaaggcttgttaacaagtatgagagagggcagatacaacatgttgattggcttgatcgtcttgccttcagtgctatggacaaagctatggaaaaagagtgtgagaggaaggccaatttgtaccctagtctggttgttgaattgtgcagtttcgaacatagaattgtcttccaggaatctggagcaaatttttatacaccggccccagtatcattatcaaatgaactggttactgtatgggaccctgaacttggaagaaccaatccatctgagcacaagcagttaaagcttgctaggagcttgactcgtgggatagttgatagagatctaaaaccaagctcaaatgagagaaagttactacaaacaattattaagtttcctcctacacgcaccttggaagtggatgagaagcaattggtgtggaagtttcgtttctctttgatgtctgagaagaaagctctaacgaaatttgtccgctcagtggattggagtgataaccaagaagctaagcaagctgttgagttgattggaaagtgggaaatgattgatgtggctgatgcactagagcttctctcacctgattttgaaagcgacgaagttcgtggttatgctgtcagcgtacttgaaagggctgatgatgaagaattacagtgctatttactccagttagtgcaagctcttcggtttgaaagatctgacaagtcccgtctagcactctttcttgtaaaccgtgctttgtccaacatcgaaattgctagcttcctccggtggtatatattagttgagcttcacagtcctgcatatgcaagacgatattatggcacatatgacatgcttgaaaacagtatgatgaaattggttggtagggaggatggggatgaagatggatttcgactgtggcagagtttaacccggcagacagacctcactgctcaattgtgttctattatgaaggatgtaagaaatgtaagaggtagcgcacaaaagaaaattgaaaaattgaggcagctattatcaggagttttcagtgagcttacaaactttgatgagccaattcgttcaccattagcaccaactcttctcctaacaggagttgtgcctcaagaatcgtctatatttaagagtgccttgaaccctttgcgcctgacatttaaaacagcaaatggcggaacatccaagattatttacaaaaagggtgatgacctccggcaagatcagttggttattcaaacggtttctttgatggaccgactactcaaattagaaaatctagatttgcaccttactccataccgagttcttgcaactggacaagatgaagggatgcttgaatttattagttccagttctcttgcacagattctatcagaacatcgcagtattacaagttacctacagaagttccatcctgatgaggatggtccttttggtataacggctcaatgtttggagacattcataaaaagctgcgccggttactctgtcattacatacatattgggggttggagacaggcatctggataatcttcttctaactgatgatggacgcctttttcatgttgactttgcttttatccttgggcgagacccaaagccatttccgccaccgatgaagttgtgtaaggaaatggttgaggccatgggtggtgcagaaagccaatattacacaaggttcaagtcctactgctgcgaagcatacaacattctgaggaagtccagcagtctcattttgaatctattcaagctgatggagcgatcaggcattccggacatctctgccgatgaaagcggaggtctcaagctccaggagaaattccggttggatctggacgacgaggaggctatacatttcttccaggatcttatcaacgatagcgtgagtgctctgttccctcaaatggttgagaccatccatagatgggctcaatattggcggtaacacaagctaatgtcgtagaagcaagtgtgaatctgtacatgctgactgtcacaagccacggtaataagcgagaaacgacactgatggatggaagcctaggcgcctagcatttggggttcaagctgcgccgcatctgcgaattgattgggctgatgcagggcatgggcaatcttctcgtgccggtgacacccaggaattcgggttgtcagttgtcacttgtgatagtagaattccgtcacgcactgctgtagacctatgggcattcgtcagatgtatatatgcgttaatgtataaaatcaacttcagtagcaaatttgtgaataccggaatacgtgatggtttaagttctttagtagtttgtaatgataagactagcctgccaggtgccagcagtctcaggagcatgtgggctctacaaggagattagcagctgctggagcattattgtgaaactaccaagtcttatatgatagcaatatcttttgctc

SEQ ID NO: 39731 - DNA, 1966 bp, Zea Mays
tgaacactgacgaggtctttgatgatgactggtgggataaaatctcaaggcaagggtgcctgatcatttaagaaagggtttcaactccatcatcattttagggacttggacattgtggaatcttcataattgatgttcgtggttatgctgtcagcgtacttgaaagggctgatgatgaagaattacagtgctatttactccagttagtgcaagctcttcggtttgaaagatctgacaagtcccgtctagcactctttcttgtaaaccgtgctttgtccaacatcgaaattgctagcttcctccggtggtatatattagttgagcttcacagtcctgcatatgcaagacgatattatggcacatatgacatgcttgaaaacagtatgatgaaattggttggtagggaggatggggatgaagatggatttcgactgtggcagagtttaacccggcagacagacctcactgctcaattgtgttctattatgaaggatgtaagaaatgtaagaggtagcgcacaaaagaaaattgaaaaattgaggcagctattatcaggagttttcagtgagcttacaaactttgatgagccaattcgttcaccattagcaccaactcttctcctaacaggagttgtgcctcaagaatcgtctatatttaagagtgccttgaaccctttgcgcctgacatttaaaacagcaaatggcggaacatccaagattatttacaaaaagggtgatgacctccggcaagatcagttggttattcaaacggtttctttgatggaccgactactcaaattagaaaatctagatttgcaccttactccataccgagttcttgcaactggacaagatgaagggatgcttgaatttattagttccagttctcttgcacagattctatcagaacatcgcagtattacaagttacctacagaagttccatcctgatgaggatggtccttttggtataacggctcaatgtttggagacattcataaaaagctgcgccggttactctgtcattacatacatattgggggttggagacaggcatctggataatcttcttctaactgatgatggacgcctttttcatgttgactttgcttttatccttgggcgagacccaaagccatttccgccaccgatgaagttgtgtaaggaaatggttgaggccatgggtggtgcagaaagccaatattacacaaggttcaagtcctactgctgcgaagcatacaacattctgaggaagtccagcagtctcattttgaatctattcaagctgatggagcgatcaggcattccggacatctctgccgatgaaagcggaggtctcaagctccaggagaaattccggttggatctggacgacgaggaggctatacatttcttccaggatcttatcaacgatagcgtgagtgctctgttccctcaaatggttgagaccatccatagatgggctcaatattggcggtaacacaagctaatgtcgtagaagcaagtgtgaatctgtacatgctgactgtcacaagccacggtaataagcgagaaacgacactgatggatggaagcctaggcgcctagcatttggggttcaagctgcgccgcatctgcgaattgattgggctgatgcagggcatgggcaatcttctcgtgccggtgacacccaggaattcgggttgtcagttgtcacttgtgatagtagaattccgtcacgcactgctgtagacctatgggcattcgtcagatgtatatatgcgttaatgtataaaatcaacttcagtagcaaatttgtgaataccggaatacgtgatggtttaagttctttagtagtttgtaatgataagactagcctgccaggtgccagcagtctcaggagcatgtgggctctacaaggagattagcagctgctggagcattattgtgaaactaccaagtcttatatgatagcaatatcttttgctc

SEQ ID NO: 39732 - DNA, 1053 bp, Zea Mays
attttccatcaccgtgaccacaaatatgcccttcacagcttcacacgacgcaaaaagggcacaccaccacccttgtacacacacacctcaagctcacatacactccagatgagagagttggggtcctctctctccccgccgtctgtaaccgtgctcaccatcgcagcccacgagctccgctgccggacccggcgcagcgcgcgcaccgagcgtccaagaatcgtcgccgtccaggtcgcggccattacggtcgcccagccgcagcctccccagcgccctcgccgcggagcgccaagcggcgtcgcggcggtggcggccacgccggcgccagcgccacaaaggaagaagcagcagcagcaggtgcggtggcacgacatggcgttcgggaccgtgcgcctgccggcggccacgagcatgggcgagatcaggaggcgcttgagggcgcggcaggctctgcaggctggcggcgccgcgaacgagccgtcctcctccgccgcggcgtgggcaccatggaggctcatacggtcgctgagctgcaggggcgtcgaggccgtgtcggctgccgcggcgccggtcaggctggtctagccgtctaggtacgtaattaacggagtgaggtggacgcacggaaggtgttggtgatctatcgaggtctggacctggtactgctggtgtcgcctgtgaaggccgacgtaactgcggcgccggccggccggtgagccggcgaatgcacggtggcctcacgggagtgacgccaagctaggttggtggaagttgaaaggcacacaagcgcaaagcggtacctagctatattaatgttcaccactttcaattttcgtctcgtgttatcttttaattaatgaaccttttctccgctctttctttctgtttggtgtttataatttaggattagttggctaagaatagtatatagccgatgtattacttgttatatatacactgtatatatgtagaggagtaatctcctgctacaataagctataagcagggtcttggagatcatgttcaaggtgcctgatatcaagatgtttg

SEQ ID NO: 39733 - DNA, 2476 bp, Zea Mays
ctcgtgaccaaggctgagcagggcggcggaaggagagctccgccccgcgacgaccggacacggtgccacaacgccattaacgcgcaaccccgacgagctctgcacatgcagccacagcgaagcacatatcgaattgcctaatcgtgaaggtgacgtcgctctacatggttgggaacataccagcgcccaggttcgaacaggttatccctgggtggagcgacggacgccttgtggttcagtggcgacggcggtgcgctggcctgccgttcttgcgaagcacaggatgaatcccctctgggcagagcgacgattcaccaaggaccgccccccctgactccgcccgacttccccaagcaccgtgttacagacactacccaggttcgtgtggtggaaagcagatcagcgtctgaagaaggcggtattcagggaccgaagtcagtccagccaagcagcaacaaggagcaccggttgtcaaaacgcgtcaggaagcccaatgtccgtgtttcaggcccagaatggagtatgtaaggtgttacgtgtgtgtgcgtgaggctggatacttaagccgcgcaagtggcgtggtgtaatcatcttggacaagaaattcctaaatgaaactctgagccgccggctctctaccctacctgctcctcctcttcctgccttcttccccttctccacgcaagtctgtagcacgtaacaactggtatcagaggagtccgttcctccgcgatcgccgatctggaacccgccgccaaccacgactacttcacgaggctccagcgacgtaagggtaccatggatccctcgtccaagctcctgctcgaggagatcgataagaagctggtggcgatggacctcaagtgggagcagcggttcggagacttcaaccgcgctaaggaggatcgcctgacggccctggagaactcgtgcgccgagttcgacaattggcgtcccaaggtcgacgccgccatggaagatgtcaagctggagctccacaagatgaacaagcagtgggatcacgcagcgcggtatatggcgggggcggattctggcatcctcggcaagccggatccactgcttgatcctcgacagcaagctccgactcatgacggccccattgggcaccgcgatgaatcacgccaccgggagcaggggtatgggtcggtgaccttcacccctggcccggtcaaggggttgtctcaattgctcatccagtggtcaggcatgcctactttgttggccacctgggaagatgaactgttattgcgccagaaatttccatatgctcctgcttgggggcaagcagcctttcatcgccgggggattgttacagacactacctaggttcgtgtggtggaaagcagatcagcgtctgaagaaggcggtattcagggaccgaagtcagtccagccaagcagcaacaaggagcaccggttgtcaaaacgcgtcaggaagcccaatgtccgtgtttcaggcccagaatggagtatgtaaggtgttacgtgtgtgtgcgtgaggctggatacttaagccgcgcaagtggcgtggtgtaatcatcttggacaagaaattcctaaatgaaactctgagccgccggctctctaccctacctgctcctcctcttcctgccttcttccccttctccacgcaagtctgtagcacgtaacacaccgatggccgcaccaaatcacagcccgcaccttttttttctctctctggcagcgttcagcacaagtggtgattggggtctattcttctcgacgtagcggcttcccttttctctccggtgatggcgtgcgcaagggggcgcggcggcaacaagccctataatgccagggcaacggcaggtcctgaaatatctcaaccgaatcccctcagttggccgaactcatcggtcccacgtcgagagttctgcggtggggaagaggaacaggagctacggcggtcccacacggatggagcagggctggcatgcggggcccggcccaccagtcagccaaacaaatgcggccagcggaggaatgagcgatggcccacatgccagtgtctgatgtccatgccgtggaggatggcgcaggtgttgagtggccgacacggtggatcccaaagaccagtggtcggacccaggatggtaacgcggatggaagatgggccacgcgggagaagggctaaatgggccgagtgggattgggtccagacaacgtttcttttttttcttctttatttttctcctttcttctttattttgaaatccaaatttttggatttcaaattttgtgatgaatttgtactcaactatttgaaggtatgattcaaacatgccatggtgaaatgaatttatttctctaaggattttatttggtattagccaatatttttctctctcttttctaaattctaaaatttcttgtatattctaaattccacttgagactttaatattttcttttcatatgatttattatgtgatcac

SEQ ID NO: 39734 - DNA, 6435 bp, Zea Mays
ctcgtgaccaaggctgagcagggcggcggaaggagagctccgccccgcgacgaccggacacggtgccacaacgccattaacgcgcaaccccgacgagctctgcacatgcagccacagcgaagcacatatcgaattgcctaatcgtgaaggtgacgtcgctctacatggttgggaacataccagcgcccaggttcgaacaggttatccctgggtggagcgacggacgccttgtggttcagtggcgacggcggtgcgctggcctgccgttcttgcgaagcacaggatgaatcccctctgggcagagcgacgattcaccaaggaccgccccccctgactccgcccgacttccccaagcaccgtgttacagacactacccaggttcgtgtggtggaaagcagatcagcgtctgaagaaggcggtattcagggaccgaagtcagtccagccaagcagcaacaaggagcaccggttgtcaaaacgcgtcaggaagcccaatgtccgtgtttcaggcccagaatggagtatgtaaggtgttacgtgtgtgtgcgtgaggctggatacttaagccgcgcaagtggcgtggtgtaatcatcttggacaagaaattcctaaatgaaactctgagccgccggctctctaccctacctgctcctcctcttcctgccttcttccccttctccacgcaagtctgtagcacgtaacaactggtatcagaggagtccgttcctccgcgatcgccgatctggaacccgccgccaaccacgactacttcacgaggctccagcgacgtaagggtaccatggatccctcgtccaagctcctgctcgaggagatcgataagaagctggtggcgatggacctcaagtgggagcagcggttcggagacttcaaccgcgctaaggaggatcgcctgacggccctggagaactcgtgcgccgagttcgacaattggcgtcccaaggtcgacgccgccatggaagatgtcaagctggagctccacaagatgaacaagcagtgggatcacgcagcgcggtatatggcgggggcggattctggcatcctcggcaagccggatccactgcttgatcctcgacagcaagctccgactcatgacggccccattgggcaccgcgatgaatcacgccaccgggagcaggggtatgggtcggtgaccttcacccctggcccggtcaagggtatgcatcatgtgccccatctaccgccttctcctcgttatcatggtcctgtgtttgatcatatgggtagtcgcacacgaaattctgatatgccaatgagctctctgggcaagttaccaaaattgccattccctatttttgacggggataatccacgtttgtggatctatcgctgtgagagttacttcgacatgtacgaagtcgaacccgaagcctgggtgaaggtggcttccatgtacctcgcgccacatgtagcatgctggttccagtctgttgagcgcaaacaaccccgattgtcttggccgctgctctgcagattactacacgagcggttcggtcgagaccagtaccagtcattgttgcggcagctgtttcgtatccatcagcagagtagcgtaactgattaccaggatcgttttgtcacattagttgatcagttggctgtttatgagtcagtgccagatcccttgttttttgctactcgctttgtagatggtctacgtaccgacattagagcagtggttatgcttcaacgtcctctggacttggactccgcatgttccttggctttgttgcaggaagaggtggcgctgccgtcgggacgacatgaacatcgcaaggaagcttatcagccctggctgaagtcggctacagcaagtgcccgaccaatgcaactaccccctccacccacatcttctcttcataaaccagaatcttatcagaagaaaagagatggtgttccttcgtctgtggatggcaaattggctgcactcaaagcttatcgacgtgctcgtggtctatgtgataggtgtgctgagaagtggcatcgtggacatacttgtaacgcaactgtgcagctgcatgcattacaggaggtgtgggaattgctgtcagaaaattcaggggaggactcatcaattcatgaacagacactcgaggaacctattattatggctatttctgctgaagctgtgacagggtcttctgcaaaaagatccatgagatttctgggaagcatgcttggaaaggacatcctgattttggttgattctggcagtacacattccttcattaatcagtcaactgttcagcatcacactattgttccagtagctgcaactcctttcagagtccaagtggcaaatggtggactgctatcctgtgacaagatgatacctcatgcagtttggagcatccaagggtgtgaattctctcaagatttgagggtgttgcctctgccaaagtttgatctcattttgggaatggattggttagaattttacagtcccatggaggtacattggcaacacagatggttgtgtattccctaccacgacagacaagtggtgctttatggttgtgctgcacaagcaactgacattcttttgcatattacaccagttatgtctttcgtgcttgataccccacctgaagctgtgcaccctgcagtgtctgctatattatctcagttccaccaagtttttgcacaaccaagttctcttcctcctgtcagggcatgtgaccatgcaattcccttggtacctggtgcgactccagtcaatatccggccctatcgatattccccatcgttgaaggatgagattgagcaacatattgtgaagatgcttcaaaatggtattataagacctagctcctctgagttttcttccccggtgttgttagtaagaaagaaagatggcagtttcaggttttgtgtagattatcgttacctcaatgccttgactatcaaatggaagtttcccattcctgtctttgactagttaatggatgaactcgctggggcatcatggttttccacactggatctcttgtcagggtaccaccaagtaaggttgaagcctggagaagaattcaaaacggctttccaaactcatcatgggcagtacgaatttttggtcatggctttcggtttatgtggagctccaggcaccttccagagtgctatgaacactacactggcaccattactcagaaaatgtgttatagtgttctttgatgacatattaatttatagtgccactttggatgaccacttagaccacttgcaacaggtgttaactctcctccagcaagacacttggtttgtcaaaatgtctaagtgcaaatttgcccaacgcaaaatttcttacctcggacatgtaataagtgaggaaggggtggccaccgatgaagcaaaagttgaggctgtgttgtcctggcccataccaaacaatgccaaagacttgagaagctttctcggtcttgcaggatattatcgcaagtttgtgaaacattttgccattattgcaagacccctgcacaatctattgaaaaaaggagctctctttgtgtggactcaagatcatcagcttgtgttctctactttgaaacaagctctcgtttcagcacctgtcttggcattaccaaattttgctaaaccgttttgcttggaaaccgatgcctgtaaaaatggtgtgggtgctgtcttgatgcaggagggtcatccactagcgtttcacagtaaacctttgggcaccaaaacacaaggtctctcaacatatgagaaagaatatctagccattctgatggctgtcgaccagtggcgccattatctgttacatgccgaattcattatcttcacagatcaaaaaagcttgatccacttaagtgaccagaggttgaacactccatggcagcagaaggtatttacaaagttactcggcatgcagtacaagatagtatacaaacaaggttccgacaatagggttgctgatgccctatctagaagagcgcatgatatccctacggttctggccatttctgtctgttctccacaatggtgccaaaacattatcgatggctatctgcaggatgaagaagctaaacagcttctagccaaactgatagtagatggttcatcagttcctcacttttcgttacaggatggtattatcaaattcaacaacaagatttgggtgggcaacaaccggccaatgcatcaagccatcttggaggccatgcacagttctgctgtaggtgggcactctggtttccctgtcacgtatcacaagctgaagcagctgtttgcctggtccggtatgaggaagtttgctaaacattttgtggcttcgtgctccgtgtgtcagcagtccaagccggagagggtcaagtaccctggactcttgcagcctctgtctgtacccgctggcgcttggcagacagttacactggattttgtggagggacttccaaattcaggcaacaaaaactgtgtaatggtagtggtcaacaagttttcgaagttcagtcactttattgccctcaaacaccctttttcagcactggtggtggctaaacactttatgcagcatatatataagctccatggcatgccaacagcaattgtctctgaccgtgaccgcatattcactagccaattgtggcaagctttattcaagctagctgatgtgaagcttcacatgagctcctcctaccacccacaaacagacgggcaaacagagcgcgttaaccaatgtatggagaccttcctccgttgctttgtcaacgcgtgtcccagcaagtggatcgattggctttacctggcagagttctggtacaactcctgcaagcacgaagcactgggtctttccccctttgaagtgttatatggttattcgccgaaaccattcggtttgaatgctgttgataactctcaaaatccttccctggatgagtggctgcaagacaaggctgtcataacaaccttggttcagcaacacctgcaccgtgctcagttacgtatgaaggcccaggctgataaaaacaggtctgaaagagtttttgctgtgggggatcaagtatacctgcgtttacagccatatatccagtcttcccttgctcccagatcgaaccaaaaacttgcttttcggtattttgggcccttcactgttctcaacaaaggttgtctcaattgctcatccagtggtcaggcatgcctactttgttggccacctgggaagatgaactgttattgcgccagaaatttccatatgctcctgcttgggggcaagcagcctttcatcgccgggggattgttacagacactacctaggttcgtgtggtggaaagcagatcagcgtctgaagaaggcggtattcagggaccgaagtcagtccagccaagcagcaacaaggagcaccggttgtcaaaacgcgtcaggaagcccaatgtccgtgtttcaggcccagaatggagtatgtaaggtgttacgtgtgtgtgcgtgaggctggatacttaagccgcgcaagtggcgtggtgtaatcatcttggacaagaaattcctaaatgaaactctgagccgccggctctctaccctacctgctcctcctcttcctgccttcttccccttctccacgcaagtctgtagcacgtaacacaccgatggccgcaccaaatcacagcccgcaccttttttttctctctctggcagcgttcagcacaagtggtgattggggtctattcttctcgacgtagcggcttcccttttctctccggtgatggcgtgcgcaagggggcgcggcggcaacaagccctataatgccagggcaacggcaggtcctgaaatatctcaaccgaatcccctcagttggccgaactcatcggtcccacgtcgagagttctgcggtggggaagaggaacaggagctacggcggtcccacacggatggagcagggctggcatgcggggcccggcccaccagtcagccaaacaaatgcggccagcggaggaatgagcgatggcccacatgccagtgtctgatgtccatgccgtggaggatggcgcaggtgttgagtggccgacacggtggatcccaaagaccagtggtcggacccaggatggtaacgcggatggaagatgggccacgcgggagaagggctaaatgggccgagtgggattgggtccagacaacgtttcttttttttcttctttatttttctcctttcttctttattttgaaatccaaatttttggatttcaaattttgtgatgaatttgtactcaactatttgaaggtatgattcaaacatgccatggtgaaatgaatttatttctctaaggattttatttggtattagccaatatttttctctctcttttctaaattctaaaatttcttgtatattctaaattccacttgagactttaatattttcttttcatatgatttattatgtgatcac

SEQ ID NO: 39735 - DNA, 3098 bp, Zea Mays
ttcgtcaaattcatcttcttcgtcttcatcgcagcatcggcgctccatcttctgctccctcccccacttcgtgctcgggttccatcttccgctccttcccccactcgcggtcggcacgcaggctcggccggcgtcagcggctccccatcccgccagtacaggaagagggccgccgcttggagctcgcgggaggtagcgtcgccaccgccgcatggaggtcccgaatggctgaatcctgaccgctgcctggagagtctcgcgcctaaatcacatcatattgagcttctcgcctttggatccgtcttattatttgctcacactgaagaattagtttgcactttggaggaaaatgagtggtgctccaaagaggttgctcgaggaaggtagtcactccacaccaacaaaacgccctttggatgacagcagcttgtattcgagtcctgggaaatttattcagtccggtggcagtgatttccatggttcttctgaacatgatggtagatttgcgaaatttcaacgtgtggagtctcgtgatgataagaggccatctgtacatcggatgcctgttggctccactaactttgctgttcaccccatctcgtctgacagcagattagagtcaaagcaaaataaagatgcacgggacagtaaggcagatgaccgcgaaacaaaagtcgatgccagggacgttcatagtgattcaaggattgaatttcaggctaataaaattgagagtgatgtaaaggtagacaatagagcagatgaaagtgaaataagggctgacaggaggggccatcctgattacagaactgacataaaatttggtaaggatagtcattctactgttccagcaaacataaactggaaggacaacaaggagcacaggggtaaaagacattttgaaccgcccgctgatactgtggattggcgtttgccccgtcctagtttacaaagtatcgatgaagctcccaaaggtccaatttctgtggaaggacgtaattccaaggacacaaatgaatctgctggtgattacaaagctgaaccaaaaaacgaagataggttcagagacaaggacaggaaaaagaaggacgagaagcatagggacttcggtgcaagagaaggcgatagaaatgatcgtcggaccggtgtaccacttggcagtagtggtgttgagcgaagagaaatgcaaagggaagatagggatgctgagaaatgggacagggaaagaaaagattccctgcgagacaaggaaggcaatgatagggagaaggattctgctaggaaagattcatctgtagtaattgcaaaggataaccctatactagaaaaagcttcatctgatggagctgttaagagtgctgagcatgagaatacgacaacagaatccaaggcacctaaggatgatgtatggaaagctcacgatagggatcctaaggacaagaaaagagagaaggatgtggatgcaggagactggcttgagcaacgaaacaaatataatgataaggaattagatgacaatgccattgaaggagatatggagaaagataaggatgtttttggaagtgtccaacgaaggaggatggtgcgaccaaggggaggtagtcaagtatctcagcgtgaacctcgattccggtccagaatgcgtgatggtgaagggtctcaaggtaagtctgaggtgtctgccattgtttataaagctggggagtgcatgcaggagcttctgaaatcatggaaagagtttgatgtaactcaggatgctacaattgctgaaagcctacaacatggtcctactcttgaaatccgaatacctgcagaatttgttacttccactaaccgtcaggtaaaaggtgctcagctctggggaacagatatttatacaaatgattcagatcttgtggctgtgctaatgcatactggttactgctcccctacatcctcccctccaccatccgccattcaagagcttcgtgcaactgttcgagttctaccaccacaagagagttatacttcaacactgaggaacaatgtgcgttcacgtgcttggggtgctgggattggttgtagctttcggattgaacgttgctgcattttcaaggtggtggcaccattggtcttgagccacgccttagccacgtgtcagctgtggagcctactctcgccccagttgcagttgagcgtacaatgacgacaagagctgcagcttctaatgcattgcggcaacaaagatttgtccgtgaagtgactatacagtacaatctgtgcaatgagccatggttgaaatatagtataaacattgtggcagataagggattgaaaaagtctctttatacttctgctagactgaagaaaggagaagtcatatatttagaaacacacattaataggtatgagctttgcttcagtggagacaagccttgcattattggatcaagctccaatgcatctgaatcagaaacggagaaacaccagagcgggagtcaccattctcagaatggtgacagaggctgtgtggagcatgaactccgggatgtgttccggtggtcccgctgtaagaaggccatgcctgaaagtgccatgcgctccatcggtatcccactaccagcagaccagttagaggtattgcaggataacctcgaatgggaggatgtgcagtggtcacagaccggtgtgtgggtatctgggaaggagtatcccctcgcccgagtgcacttcctctcggcgaactagaagcagatgatgttggctgtgttcgtggggggaaaaaagaaggtgatgttggagcaacaaaggaattaatatttcttgtggacaagacagagtcgggaacattgcgtttgcttgtacgggtcaccatgccatgtgtacaaaagaaggatcagttggttagtgttgatatggtagccttactgtgttgacaataacactattcattaggctggcctgctgcccatgcatgtgccaaagctatatttgctggttttaggtcctgtgtcggtacgcaaataacttgcaatatgcttgcttctcaagtaatctggccatccttattggaacactgcttcctctgtccctgaataatagttttaacaagttcaaaa

SEQ ID NO: 39736 - DNA, 3033 bp, Zea Mays
aggggattgtttttcacttgatgaatgaaacttggtactccatccatttttaaatatatgatggtgtttcagacaagctttgcaagaagtcttaccctgtttgtttcttctgcggtaaatcacatcatattgagcttctcgcctttggatccgtcttattatttgctcacactgaagaattagtttgcactttggaggaaaatgagtggtgctccaaagaggttgctcgaggaaggtagtcactccacaccaacaaaacgccctttggatgacagcagcttgtattcgagtcctgggaaatttattcagtccggtggcagtgatttccatggttcttctgaacatgatggtagatttgcgaaatttcaacgtgtggagtctcgtgatgataagaggccatctgtacatcggatgcctgttggctccactaactttgctgttcaccccatctcgtctgacagcagattagagtcaaagcaaaataaagatgcacgggacagtaaggcagatgaccgcgaaacaaaagtcgatgccagggacgttcatagtgattcaaggattgaatttcaggctaataaaattgagagtgatgtaaaggtagacaatagagcagatgaaagtgaaataagggctgacaggaggggccatcctgattacagaactgacataaaatttggtaaggatagtcattctactgttccagcaaacataaactggaaggacaacaaggagcacaggggtaaaagacattttgaaccgcccgctgatactgtggattggcgtttgccccgtcctagtttacaaagtatcgatgaagctcccaaaggtccaatttctgtggaaggacgtaattccaaggacacaaatgaatctgctggtgattacaaagctgaaccaaaaaacgaagataggttcagagacaaggacaggaaaaagaaggacgagaagcatagggacttcggtgcaagagaaggcgatagaaatgatcgtcggaccggtgtaccacttggcagtagtggtgttgagcgaagagaaatgcaaagggaagatagggatgctgagaaatgggacagggaaagaaaagattccctgcgagacaaggaaggcaatgatagggagaaggattctgctaggaaagattcatctgtagtaattgcaaaggataaccctatactagaaaaagcttcatctgatggagctgttaagagtgctgagcatgagaatacgacaacagaatccaaggcacctaaggatgatgtatggaaagctcacgatagggatcctaaggacaagaaaagagagaaggatgtggatgcaggagactggcttgagcaacgaaacaaatataatgataaggaattagatgacaatgccattgaaggagatatggagaaagataaggatgtttttggaagtgtccaacgaaggaggatggtgcgaccaaggggaggtagtcaagtatctcagcgtgaacctcgattccggtccagaatgcgtgatggtgaagggtctcaaggtcagtcaaatatctatatttttatagctgaatacaatgtatactggtgcttccctttggaactggagtaatcaaaagatctgcttctgtaagtctgaggtgtctgccattgtttataaagctggggagtgcatgcaggagcttctgaaatcatggaaagagtttgatgtaactcaggatgctacaattgctgaaagcctacaacatggtcctactcttgaaatccgaatacctgcagaatttgttacttccactaaccgtcaggtaaaaggtgctcagctctggggaacagatatttatacaaatgattcagatcttgtggctgtgctaatgcatactggttactgctcccctacatcctcccctccaccatccgccattcaagagcttcgtgcaactgttcgagttctaccaccacaagagagttatacttcaacactgaggaacaatgtgcgttcacgtgcttggggtgctgggattggttgtagctttcggattgaacgttgctgcattttcaagaaaggtggtggcaccattggtcttgagccacgccttagccacgtgtcagctgtggagcctactctcgccccagttgcagttgagcgtacaatgacgacaagagctgcagcttctaatgcattgcggcaacaaagatttgtccgtgaagtgactatacagtacaatctgtgcaatgagccatggttgaaatatagtataaacattgtggcagataagggattgaaaaagtctctttatacttctgctagactgaagaaaggagaagtcatatatttagaaacacacattaataggtatgagctttgcttcagtggagacaagccttgcattattggatcaagctccaatgcatctgaatcagaaacggagaaacaccagagcgggagtcaccattctcagaatggtgacagaggctgtgtggagcatgaactccgggatgtgttccggtggtcccgctgtaagaaggccatgcctgaaagtgccatgcgctccatcggtatcccactaccagcagaccagttagaggataacctcgaatgggaggatgtgcagtggtcacagaccggtgtgtgggtatctgggaaggagtatcccctcgcccgagtgcacttcctctcggcgaactagaagcagatgatgttggctgtgttcgtggggggaaaaaagaaggtgatgttggagcaacaaaggaattaatatttcttgtggacaagacagagtcgggaacattgcgtttgcttgtacgggtcaccatgccatgtgtacaaaagaaggatcagttggttagtgttgatatggtagccttactgtgttgacaataacactattcattaggctggcctgctgcccatgcatgtgccaaagctatatttgctggttttaggtcctgtgtcggtacgcaaataacttgcaatatgcttgcttctcaagtaatctggccatccttattggaacactgcttcctctgtccctgaataatagttttaacaagttcaaaa

SEQ ID NO: 39737 - DNA, 963 bp, Zea Mays
atggctgaagccgtggagagcggcgggcgggcgctcctggtctcggagttgggccgcgtgcaggacctggtgagccagctcgagctgcagctgcgcgcgcccgcggacgcggactccgtcgacctctgccgctgcctcgtgcaacagatcgtcgcgctcaccgaccgctccatcggcatgctccactcgtcaccggacctcgccccctcgccgctgaccgccacggggagcccgataagcagtgacgccgcctccgaccaccaccccttccgccccgccggcgccagccccaagaagcgcaaggccacggcgcgctggaccagccagcaggtgcgcgtcagcgccgacgacggccacagctggcgcaagtacggccagaaggacatcctcggcgccaggcacccgcgggcctactaccgctgcacgcaccgcaactcgcagaactgcctggccaccaagcaggtgcagcgcgccgacgaccaccccgcgctcttcgacgtcgtctaccacggcgagcacacctgcaggcccgccgccgccggcggcgggtccaagagggcgcagcagcacaacccgcacgcgcaggccgcgctgcagggcctcgccgcgcggctcacggtggccaccaccaccacggacaacgccgccgggctcccgccgatgacgcccgagagctgccccgtgcggggcgcctcgtccccgtggtccctcgcgtcgcccgtcggctccgacttcaacggctgcctgcaccagggcatctcgccttgcccggtgcccgggtacagggactggacctcggacgtggacctccaggaggtggtgtcatcggcgttcgccgccgtctcgtcggttgcgccccttccggtgcctgacgacgaattcatgcctctcgaatgcgtcgaatacgtattcgaccagaacttcgacattgacaccgcaatgccaagcctctactatccatga

SEQ ID NO: 39738 - DNA, 2162 bp, Zea Mays
gtcgaatagcggggtgacgagctcgacgttggaagggagggagcgagttggctattagagccaggtgcatgtagacgatggtctttgagcccgcatgtagcgcgggagatggaggtgcaggggtcggaaccgggcgcggacagcggatggagacgatggttggtgttgcagatgagcggggcatgggagaggagggcatcgtggtggcccgggcctagaagcccggcggggccaggggcgccaggggcacgcgtggcacaagagccagggccgcccaaggttagaatctaggcggtaccatgggtgctggcggagatgtacatgcaaggagtgggatcccaatggcgaaaaccaaagaacatgactcaaataaaaaatcatggttagttagatggggcgaggcagagaaggagaaatctacctcatcaaacacaacgtgttgggagacaataatgaggttggaagagggatcaatacatcagtatcccttacgatcaaaagaatatttgaggaagacacaccaagtggaaggaagtgcaagtttgtggggagcatccacagaaggttgggatagcgggcgcaaccaaaaacgtggaggtgttcgtaagagggggagaacaacaccacatgggggcagaaggtgttgatgttctttgtgggtagacgactcaacaggtatgtcacggtgtagagaccttcaacccattagcatgttggagcagaagcatggaaaagcagagagggaatgacattaatagtaaaaggaataatatactcggctttaccattctgtgaagaggtgtaggggcacgacatccagagtaaagtgccatgagagcggataaaggtccgagtgtaagtattaccaaactcgtgccatggtcgcaccggatggcctggatggagtaaccgaattgagtggaaacacatgagaaaaactgggacaaagtagtgaatgtgtcggatttcaaacgcggagcaaaggtccataattaatgagaaaaatcatcaaataaccaagtagtatttgtgaccatacatgctaacaacaggagatgtccacaaatcacaatgagccaactcaaatggtttggaagctcgactggaggaactagagaaaggtaaatgggtatgctttcctagctgaaaggcatggcgaaaatcatgtgtgcttttattacatgatatagttgatgtcatgtggggtcaccactaccagcgtcggccacgcggccaacagcagatcagggcgcaggaatagctggtagttgctagtagctagaaaataggagatttgtttagaagataagctcacggccagcaacagatcagagctggccgctgctagcaaatagggataagttgttaggaagttgtttagataagtatagagaataaatagcggttggttacgtcggcctggctatatataaagcaggtggctgtttcaatagggcaagcaagaatttcctatctcctttctcctattgttcctctctaatctcacttccttcacaattgggttaccaggcaaaatcccaggcgcctttgctgaccgcgactacgagctccgtagtcggggccctgctgtcttgggcattggagcccttgacaacctggtatcgcgatccagtcgatcctctgacccacatccgcctagcccacacgccacaccaactaccatggtcgcgccatcaacagcagacctcgcagccctcatcaccaagttgactgcaaccgtcgagacgctgtaggccaagttcgacgcactggaacaacgccccaccgacacatccgcgtccggcttccgcaccacgcatggagccgaccaccacatcgaccgtccaccacgtttccagaagatggacttccccaggttcgacggaaagtccgaccccctggcgttcatcaaccggtgtgaatcatacttccagcaacggatcgcggccgaagagcaggtatggatggcctcctataatctagaggatggcacccagatatggtttatgcagatccagagcgaagaaggcacgccgtcatggagacgcttcgtcgaactgctcaacacacgcttcgggccacctttgcgcgccaacccactcggtgaactcgtggcgtgcaaacgcacgggggtagtcgcaaattaccaggagcggttcgag

SEQ ID NO: 39739 - DNA, 1237 bp, Zea Mays
agggagaagatagggggtgatttagtgagacctgcagttacaagatttgctacatctttccttactctccagtccatatataaacataagcaagttttgagatgcctctttgttagtgatgattgaactaggtccaagctatcaagcacagaagcaggaaagaaggtcacagagatacttctttctacaaatttttggaacttagtccaagattgtattcgtgcatcacaaccactcctcattgtgttgcgaattgttgatggtgatgaaaagccagccatgccagaggttgccgctgccatggatatggcaaaagcaaagatcacttcgggttttgaaggtagagagacaatgaagaggaagttgcttgtcattattaatcggaggtggcaagatcaaatggaggtgaagttgtatggggctgcattgctattaaatccaaataagttctttgaacttcaaaaaatgatccaacaaaaagggaggttggtaagctgagggtagcattcaatgaggtgctatggaagatggttgaagattatgaccttcaagttataatcagtaaacaagctgatgagtatatgaatatggctggccctgccttctcatcaccattagcaattagagaaatacaaaaaaagagccccagtaagttccattacctcattaatcatttaagttttgtatggttggcaacaataattcaacttctcttctctttttttagttcgttggtgggatgcatatggtggccttgcatttgagattcaatcctttgcaaagcgcatcgttagcctttgttgttccgcttccggatgtgagcgcaattggagcacttttgaatttgtaagtaaaaagttgtcatttcagtttatatctttttaattgattttaggacaccaccactaattcattatttaacacatagatgcataccaaaaaaaaggaacagattggagcaccaaaggttaaacaatttggtttatatccaatacaatagaaagatggcagctaggttccaaagattgcgtgaggagggaaatattggtaaccctttaattttagaggatttccaatgggacaatgagtgggtggacaatcaaaatgaaacagttagagaaggggatgatcttgcatggactcatgtggatgatacaatcgatgcttctagttcacttcaaggtcgcaacttcccaagaagagcccgatatgagtctgtttattcaaggcgttgtca

SEQ ID NO: 39740 - DNA, 1894 bp, Zea Mays
ctagtcaactgacttatagactagtcaccaagtcagtatcttgtcgactcgactcgacttaccgacttgaaaaccttggttggtaaataactataaaaaataaatatagaaaatttcaagtggatgaagtgggaattggaaggatgcagcggaataatgtggttgatatatgtgcaaagggtttcagttaaaaagcagtagggaagggtcataataaggccttttgctgataacaaaacttactacagtaacaaatttacagggatgcaaataacattccaaacaattacaaccatacttagcctaaacaagaaaaaacaaattaaaatgtggtgcatctgaagataattttcatcttccttcacagtgatgagcaagtaattagcgagtcaaattacttttaaaagcatcaatgatctgacaaggattttttgcttccaaccatggttttatacctagtatttttctttttcccccaatgtcaagtcaacatgctacaaaatggatcagggtttgaacggtaatagaggaaacaatgctttgttcagttaaatagtacactcagctaggtgtcctggaatacgagtgaagggagcatcccagcataaatacacgttcagggacaatctggtcagaaaatcccacttgggtgtgagacggactacatctagcctaacttaaaggtacagaaacgacttgcaggaagcaagaaagacatcatatggaactggtgctaatcaatcgatcgtcaataccatctacccctacaggggcacaacccactacttaactcgtagcaacactgcagcagtggcgatggggctgcaacaaaccccccgtggcacatgaatcccaagttcacaacaaactgcatgggttaggatgtagaagcagctataccgatccaaaaaagaggaacaccgtgactatggattcggattttggagcgactatcccaatagcacaaaggaagatcctgattagaggacagcacgaacatcccatccaagcgagactaggctaggaactccttaccagtagtagtagaagaagaagccaatccgggtgcaaatgaggtggggatgtagggatatcgctccgacgcaggacggcggcgggagagcggtgtgcgcctgatggccgggagtgagcttgtttggttgaacgaccgaggcgaatttgcatccggacgtgaaagttaaccgggggccggacacgatctatcgtgctttccgataaaaattttaggaccaacacgatctttaataattttgtgtcgaaccatgttgacccaaacatttaaaatctaaatcaagcacagtatcgtatccaattttagtcacaaaactgaatgcataacatatttgattttgtttggtttacgaaatataacgtaaatgataataattcacactcgactactagcagtaataagtttgaatatgtcgaaatcaattcttaatgtatctaattacgatagaagttaaacaaatatgatttaacattatcatttactcattatgttataactacgtgaaccaaacggtatctttgtgtgaggatcaatttccatatgtattcatgtcataagtgtaatatataaaaaaacaacgctcaaatcgtaaatagataataataaattttattacatcatatagacaatgctcaaagggtttgctctatgtttttataaaatagaatataaattgaagattataacattagaaacattatacgcatcactttattctttttagaaaaccatacggaggatccaaaatagttatattgcaaagctataatatacattttaatgctaaaataacaaacaacatactatccattatttttattagaaaacacatagcctatatttctattaagaaagatggat

SEQ ID NO: 39741 - DNA, 513 bp, Zea Mays
atttccttctacttcttatttagaaaaactattcttaaacaactataataaacattatttaaattgaataagaaaacataaaaaataactattaaaaagagctattttaatatgattagcacatggttatggagctaatgaaacaaatattactttatttggatctagaatatctattttataacgaaaacgatgacgcagagacatatacacgattaaatgtagatcggagaggctagatcgcaaaatgtgacttcttccttcatttactgtcataagaggaaggaggaacctcggctagggaagggaagggagcttcagtcgaggaattggcgagggcgggcgtgcaagccgaagtgcgaagatcgccaacggggcacggaacgcggggcacagtggcggcaacgagcgtagaggcaagcaagcagagtaggagcggcacgacgggagcagatgagcgagcgaggggggaagctcgagcactggggaagaggagcgagcgggggagtggaa

SEQ ID NO: 39742 - DNA, 1575 bp, Zea Mays
atttcagcagaactacccacacgtttctttaccctaacgccgccgccgcttcttcgtctcccatcatctccctccctttatcgcgctcggcaccaggcaacacgaacgcatcgccggtgggatcccggattggccggtggacgagttcttccgcgacgttagtgacttcaatgggcgagagtgacaccaccaagcgggaagcctggggacaaggtgggtgactccgcgtactaccgctcgttggagaaggatctggatgccaacgagctgtttggccgagtacaggagatccgatctggacgccagcgctaccctctccagtccccacaaacggcctccggccttcactggcaacacggtgctcgacctcggggagaacctgctctccggcgtgctccacccgacgctgttcgacaacctcaccagccttttgaagtgtaagatttgttattctttagttatataatttctagtagagacaacttaagtattacagctatgtgttaggaagggttcatgaaaaagaatgaattttgtattcagcatatgtgcataatagggcttcgattctcaagtcatgtaatattggaagtatgcataagtgcataacaaagtttattaaagaaagaaaagtcctcacttgctggcagtttgtccattgtatttttgtaaattaaggttattaaagaaagaaatgtcctcacttctatgggttaatttatgatcttagcacttgctacgactataaagtttatataggttcacagcttcttactgtccactaggcttctccagctgcattgtttgtaaggaacagaaactagctaactgttgtgacttaattactcatcaactttcacctgccttaagccttttaggttcacttgtcttatatataccatggtaaaccacaccatgaatatgccataaataagtaacaagagtgactagcaactcagcacacacaggttgtcaggatccttcacgtacacctttcatgttcttgcaaccttgattctacatgcttcaggtagtctagaatatcagattgttgtatatatttaacaccttctgtaccatcaaattcaaaaatgcactcaagaaaaggcttttcaaaactcttagaatgtattccaagagcagtgcacatattcagaagctaattatgtaatttcttatatgttgctttgaggcaaattgaacagggatttgtttggcttccaaatggtttgttggtcctaaaatagtcagaatcacatgacatctgtgctatagatatggacctcggtggttttctccacattaggaaagctagaagagccttttgaactcagtttttttgctaacagtggtgttatggtgaaacagagttttgtgtgtatgtaccaacaactaaaatgtaaacacgacattatcatagttgagtacaggaataattatctcttatatcttattgcaaaatctgaaacagttctcctgtagatggttagcttgcattttacgctacaattacctcagatcacttgttgtatcttacaccaatttacaaaatttcttgatgcgttttatgacaac

SEQ ID NO: 39743 - DNA, 1564 bp, Zea Mays
cgtttctttaccctaacgccgccgccgcttcttcgtctcccatcatctccctccctttatcgcgctcggcaccaggcaacacgaacgcatcgccggtgggatcccggattggccggtggacgagttcttccgcgacgttagtgacttcaatgggcgagagtgacaccaccaagtgcctgacagcgggaagcctggggacaaggtgggtgactccgcgtactaccgctcgttggagaaggatctggatgccaacgagctgtttggccgagtacaggagatccgatctggacgccagcgctaccctctccagtccccacaaacggcctccggccttcactggcaacacggtgctcgacctcggggagaacctgctctccggcgtgctccacccgacgctgttcgacaacctcaccagccttttgaagtgtaagatttgttattctttagttatataatttctagtagagacaacttaagtattacagctatgtgttaggaagggttcatgaaaaagaatgaattttgtattcagcatatgtgcataatagggcttcgattctcaagtcatgtaatattggaagtatgcataagtgcataacaaagtttattaaagaaagaaaagtcctcacttgctggcagtttgtccattgtatttttgtaaattaaggttattaaagaaagaaatgtcctcacttctatgggttaatttatgatcttagcacttgctacgactataaagtttatataggttcacagcttcttactgtccactaggcttctccagctgcattgtttgtaaggaacagaaactagctaactgttgtgacttaattactcatcaactttcacctgccttaagccttttaggttcacttgtcttatatataccatggtaaaccacaccatgaatatgccataaataagtaacaagagtgactagcaactcagcacacacaggttgtcaggatccttcacgtacacctttcatgttcttgcaaccttgattctacatgcttcaggtagtctagaatatcagattgttgtatatatttaacaccttctgtaccatcaaattcaaaaatgcactcaagaaaaggcttttcaaaactcttagaatgtattccaagagcagtgcacatattcagaagctaattatgtaatttcttatatgttgctttgaggcaaattgaacagggatttgtttggcttccaaatggtttgttggtcctaaaatagtcagaatcacatgacatctgtgctatagatatggacctcggtggttttctccacattaggaaagctagaagagccttttgaactcagtttttttgctaacagtggtgttatggtgaaacagagttttgtgtgtatgtaccaacaactaaaatgtaaacacgacattatcatagttgagtacaggaataattatctcttatatcttattgcaaaatctgaaacagttctcctgtagatggttagcttgcattttacgctacaattacctcagatcacttgttgtatcttacaccaatttacaaaatttcttgatgcgttttatgacaac

SEQ ID NO: 39744 - DNA, 1285 bp, Zea Mays
cgtttctttaccctaacgccgccgccgcttcttcgtctcccatcatctccctccctttatcgcgctcggcaccaggcaacacgaacgcatcgccggtgggatcccggattggccggtggacgagttcttccgcgacgttagtgacttcaatgggcgagagtgacaccaccaagcgggaagcctggggacaaggtgggtgactccgcgtactaccgctcgttggagaaggatctggatgccaacgagctgtttggccgagtacaggagatccgatctggacgccagcgctaccctctccagtccccacaaacggcctccggccttcactggcaacacggtagcctattatgtcccgccgtgagatcagttctcgcagaggttcttcaaggattcttcaaagttgctcgattttttttcaggttgcagagattaattcagcacgtgccaccaatattgagcttttatttcttgtttgtgtatttaaaaggctaaaatgtcattttcggaaggaataattcattcagtgatttaactggaatttcacgcttcacgtttagttatcaaaactaccaataaattttcattcagtgatttaaccgaaatttatttatgtgagaagtgatttagactagctttatgctgaaagaaaattcaagcatttgctgaaagttgatgtgcaacttgtccaaattttgtacaaagaatgttttttttgacatggttcctttgaaaatacacccttatagtacattctaaaaatcgtcacaaaattctatacaagaagttcatctagcatagtgcatattaaccagagttagaatttgttccacctccaggtgctcgacctcggggagaacctgctctccggcgtgctccacccgacgctgttcgacaacctcaccagccttttgaagtggatttgtttggcttccaaatggtttgttggtcctaaaatagtcagaatcacatgacatctgtgctatagatatggacctcggtggttttctccacattaggaaagctagaagagccttttgaactcagtttttttgctaacagtggtgttatggtgaaacagagttttgtgtgtatgtaccaacaactaaaatgtaaacacgacattatcatagttgagtacaggaataattatctcttatatcttattgcaaaatctgaaacagttctcctgtagatggttagcttgcattttacgctacaattacctcagatcacttgttgtatcttacaccaatttacaaaatttcttgatgcgttttatgacaac

SEQ ID NO: 39745 - DNA, 1646 bp, Zea Mays
cgtttctttaccctaacgccgccgccgcttcttcgtctcccatcatctccctccctttatcgcgctcggcaccaggcaacacgaacgcatcgccggtgggatcccggattggccggtggacgagttcttccgcgacgttagtgacttcaatgggcgagagtgacaccaccaagtgcctgacagcgggaagcctggggacaaggtgggtgactccgcgtactaccgctcgttggagaaggatctggatgccaacgagctgtttggccgagtacaggagatccgatctggacgccagcgctaccctctccagtccccacaaacggcctccggccttcactggcaacacggtagcctattatgtcccgccgtgagatcagttctcgcagaggttcttcaaggattcttcaaagttgctcgattttttttcaggtgctcgacctcggggagaacctgctctccggcgtgctccacccgacgctgttcgacaacctcaccagccttttgaagtgtaagatttgttattctttagttatataatttctagtagagacaacttaagtattacagctatgtgttaggaagggttcatgaaaaagaatgaattttgtattcagcatatgtgcataatagggcttcgattctcaagtcatgtaatattggaagtatgcataagtgcataacaaagtttattaaagaaagaaaagtcctcacttgctggcagtttgtccattgtatttttgtaaattaaggttattaaagaaagaaatgtcctcacttctatgggttaatttatgatcttagcacttgctacgactataaagtttatataggttcacagcttcttactgtccactaggcttctccagctgcattgtttgtaaggaacagaaactagctaactgttgtgacttaattactcatcaactttcacctgccttaagccttttaggttcacttgtcttatatataccatggtaaaccacaccatgaatatgccataaataagtaacaagagtgactagcaactcagcacacacaggttgtcaggatccttcacgtacacctttcatgttcttgcaaccttgattctacatgcttcaggtagtctagaatatcagattgttgtatatatttaacaccttctgtaccatcaaattcaaaaatgcactcaagaaaaggcttttcaaaactcttagaatgtattccaagagcagtgcacatattcagaagctaattatgtaatttcttatatgttgctttgaggcaaattgaacagggatttgtttggcttccaaatggtttgttggtcctaaaatagtcagaatcacatgacatctgtgctatagatatggacctcggtggttttctccacattaggaaagctagaagagccttttgaactcagtttttttgctaacagtggtgttatggtgaaacagagttttgtgtgtatgtaccaacaactaaaatgtaaacacgacattatcatagttgagtacaggaataattatctcttatatcttattgcaaaatctgaaacagttctcctgtagatggttagcttgcattttacgctacaattacctcagatcacttgttgtatcttacaccaatttacaaaatttcttgatgcgttttatgacaac

SEQ ID NO: 39746 - DNA, 1632 bp, Zea Mays
cgtttctttaccctaacgccgccgccgcttcttcgtctcccatcatctccctccctttatcgcgctcggcaccaggcaacacgaacgcatcgccggtgggatcccggattggccggtggacgagttcttccgcgacgttagtgacttcaatgggcgagagtgacaccaccaagcgggaagcctggggacaaggtgggtgactccgcgtactaccgctcgttggagaaggatctggatgccaacgagctgtttggccgagtacaggagatccgatctggacgccagcgctaccctctccagtccccacaaacggcctccggccttcactggcaacacgcctattatgtcccgccgtgagatcagttctcgcagaggttcttcaaggattcttcaaagttgctcgattttttttcaggtgctcgacctcggggagaacctgctctccggcgtgctccacccgacgctgttcgacaacctcaccagccttttgaagtgtaagatttgttattctttagttatataatttctagtagagacaacttaagtattacagctatgtgttaggaagggttcatgaaaaagaatgaattttgtattcagcatatgtgcataatagggcttcgattctcaagtcatgtaatattggaagtatgcataagtgcataacaaagtttattaaagaaagaaaagtcctcacttgctggcagtttgtccattgtatttttgtaaattaaggttattaaagaaagaaatgtcctcacttctatgggttaatttatgatcttagcacttgctacgactataaagtttatataggttcacagcttcttactgtccactaggcttctccagctgcattgtttgtaaggaacagaaactagctaactgttgtgacttaattactcatcaactttcacctgccttaagccttttaggttcacttgtcttatatataccatggtaaaccacaccatgaatatgccataaataagtaacaagagtgactagcaactcagcacacacaggttgtcaggatccttcacgtacacctttcatgttcttgcaaccttgattctacatgcttcaggtagtctagaatatcagattgttgtatatatttaacaccttctgtaccatcaaattcaaaaatgcactcaagaaaaggcttttcaaaactcttagaatgtattccaagagcagtgcacatattcagaagctaattatgtaatttcttatatgttgctttgaggcaaattgaacagggatttgtttggcttccaaatggtttgttggtcctaaaatagtcagaatcacatgacatctgtgctatagatatggacctcggtggttttctccacattaggaaagctagaagagccttttgaactcagtttttttgctaacagtggtgttatggtgaaacagagttttgtgtgtatgtaccaacaactaaaatgtaaacacgacattatcatagttgagtacaggaataattatctcttatatcttattgcaaaatctgaaacagttctcctgtagatggttagcttgcattttacgctacaattacctcagatcacttgttgtatcttacaccaatttacaaaatttcttgatgcgttttatgacaac

SEQ ID NO: 39747 - DNA, 2053 bp, Zea Mays
cgtttctttaccctaacgccgccgccgcttcttcgtctcccatcatctccctccctttatcgcgctcggcaccaggcaacacgaacgcatcgccggtgggatcccggattggccggtggacgagttcttccgcgacgttagtgacttcaatgggcgagagtgacaccaccaagcgggaagcctggggacaaggtgggtgactccgcgtactaccgctcgttggagaaggatctggatgccaacgagctgtttggccgagtacaggagatccgatctggacgccagcgctaccctctccagtccccacaaacggcctccggccttcactggcaacacggtagcctattatgtcccgccgtgagatcagttctcgcagaggttcttcaaggattcttcaaagttgctcgattttttttcaggttgcagagattaattcagcacgtgccaccaatattgagcttttatttcttgtttgtgtatttaaaaggctaaaatgtcattttcggaaggaataattcattcagtgatttaactggaatttcacgcttcacgtttagttatcaaaactaccaataaattttcattcagtgatttaaccgaaatttatttatgtgagaagtgatttagactagctttatgctgaaagaaaattcaagcatttgctgaaagttgatgtgcaacttgtccaaattttgtacaaagaatgttttttttgacatggttcctttgaaaatacacccttatagtacattctaaaaatcgtcacaaaattctatacaagaagttcatctagcatagtgcatattaaccagagttagaatttgttccacctccaggtgctcgacctcggggagaacctgctctccggcgtgctccacccgacgctgttcgacaacctcaccagccttttgaagtgtaagatttgttattctttagttatataatttctagtagagacaacttaagtattacagctatgtgttaggaagggttcatgaaaaagaatgaattttgtattcagcatatgtgcataatagggcttcgattctcaagtcatgtaatattggaagtatgcataagtgcataacaaagtttattaaagaaagaaaagtcctcacttgctggcagtttgtccattgtatttttgtaaattaaggttattaaagaaagaaatgtcctcacttctatgggttaatttatgatcttagcacttgctacgactataaagtttatataggttcacagcttcttactgtccactaggcttctccagctgcattgtttgtaaggaacagaaactagctaactgttgtgacttaattactcatcaactttcacctgccttaagccttttaggttcacttgtcttatatataccatggtaaaccacaccatgaatatgccataaataagtaacaagagtgactagcaactcagcacacacaggttgtcaggatccttcacgtacacctttcatgttcttgcaaccttgattctacatgcttcaggtagtctagaatatcagattgttgtatatatttaacaccttctgtaccatcaaattcaaaaatgcactcaagaaaaggcttttcaaaactcttagaatgtattccaagagcagtgcacatattcagaagctaattatgtaatttcttatatgttgctttgaggcaaattgaacagggatttgtttggcttccaaatggtttgttggtcctaaaatagtcagaatcacatgacatctgtgctatagatatggacctcggtggttttctccacattaggaaagctagaagagccttttgaactcagtttttttgctaacagtggtgttatggtgaaacagagttttgtgtgtatgtaccaacaactaaaatgtaaacacgacattatcatagttgagtacaggaataattatctcttatatcttattgcaaaatctgaaacagttctcctgtagatggttagcttgcattttacgctacaattacctcagatcacttgttgtatcttacaccaatttacaaaatttcttgatgcgttttatgacaac

SEQ ID NO: 39748 - DNA, 368 bp, Zea Mays
gtttttttaaggcatcgacacaagactaggatgtgcaaaatttcttctgtagtttcaagggtgtgcaaaattattgatcagtatctacgctactacactctcctttccttcaattacagggactacaccaagtaagtttaccggagcagcttcagatccggccaagacataagcttagacgatggtccaaaacctgacacgggcgaaactgaagcctgctccatggcaaaactggtattgctatccttgactgaaatggacactgtccataaaaaagcctgtcgtgtcttgactgttgggcactctgatcttccaacttacacctagccctgtcagagtaactagcctaccatgcctttcaccaagtg

SEQ ID NO: 39749 - DNA, 2648 bp, Zea Mays
acgccggcgaacagacctttcatgcctccagacctgccagagaacaatataagcaagcaacaaatcacaattatgggtacattatagatgccccttaccaaaccaattactaaagtagaactaagggaggaatatggaggcagggcccattttgcagttaaactttgaacaattctaatctaatggacacaaatgtagtcatgcaaaactaactagatcaaagatctgcaacctgctacagtctcaggaatatcaaaactaaacaggcaagtggctaaaataaatgatgtatagctctataatgaactacgttaaagatggcagattatttactgcagcaccatcaaatttcaccaaacacaatttatatacacaagatgaaaatgagtgaagcgtgtatacaatatatggttttgtaccgatggaatgaataggtcatgaatcaaacaagcaaatgcacgaaaggcttgggtgggctgcaagtggttcagcaactgcggctaaaagaccataagtctcatttatggcacctattcaatccgcctacaattttccaacctgtgaagttgcagctttgatttgtgttcgtgctcagtttggaaccaatgtggtagatccagtgttcaaaagaaacataactaaacgctcgcctaggcgtgcttgagcaaggaacggagcccttgtgcctcgcttaggccataagcatccaattaaacgctgtccattgggtaagtggcatggaatcaaagtaaatcaggaggaaggcaaactagcatgtgtagaggcaagccgcaggagcatgcactagcgcggtgggcagcagcgcaggaagaaacaagatcttgcaccttggcgcagccgccacctccacaacttgagtcggtgccagcagaaagaataatctcgagcaccaactccacaagtaaccccacacgcaccttccctggtgatcacaggccttgctgtttgtgaagtgcggctggctgtgtgtccagagaccttgcggtttgtgaagtgcgactagctgtgcagacctgtgccacttaatatcttcttggacaagggaaatactattgctgacgtactcggcctattgttgtaccaagtatagactgaatctgtgatgcagtgatgcacttaaacacattctggcaacaaaacgaagaaaaaaacacaaatgtttggtcgcatttaatctccgcttgggcatcctaggtgccaaccagtggcctagtgccttttggagccttgggtagatcactactctcacataaaattgacaaacaaattgttcaaaccacgaaaaactaaatccactaagctaaatcaacatcaacatagccttttagtcccaagcaagtcggggtaggctagagttgaaacccaacaagatgtcaccaaatagagaaagagagagaaaggggaggggaaaagcttttgagagcactaaaaggaaaaaggcctaatcacggttcggttacgtggatagcttctttccaagcacttctatccaaacacaactccattggtatatttcatttcttcaagtcccttttgattgcctcctcccatgtaagtttggtcaacctctacctctcttcacattattgtcccgtcttatgatgcctctatgcaccactgcctctggggtctccggtggacatgcccaaaccatctcaaccggtgttgaataagtttttcttcaattggcgctactcctagtcgatcgcgtatgtcatcatttctcactcgatccaatcttgtgtgcccacatatacaacgcaacatacgcaactctgtgacacttagttgttggatatgtcgactcttagtagcccaacactcagccccatataacatagcacgcctaattgttgtcatgtagaacttgcctttcaacttctgtggcactctcttgttgcataggactctcgatgattgacgtcatttcatccaccccattttgattctatggctaacatcttcatcaatatcaccatctctttgtagcatcgatcccaaataacggaaggtgtcctttggtactacctggtctcccaaacttacatcttcatcctcactaattgtagtaccaaagtcacatctcatatactcggttttggtcctgctaattctaaatccttttgactctagggtctgacgctataactctagctttctatttactccttcccggctttcatctactagaactacatcgtcagtgaaaagcatacaccaaaggatatctccttttatatccctcatgacctcatctatcactaaggcaaataggtaaagactcagagctgaaccttgatgtagtcctatgttaatcgggaaaacatttgtatcaccatcaattgttaatcaggaaatccactaagctaaatgatgtcaagaattgtctctggaacttcttatgacaagcagggttcacctgctggatttcagcttacgacctagctccaaacctttaaaatttgatcagcatgtttccgaacccacctaggccttgttcggttacaagaggattgaagaggattgagagggattaaatcccttcctattcaattttggataggaagggtaattccccccaatcccttcctaaccgaacaagcccctagtggtgcttttttgtgaga

SEQ ID NO: 39750 - DNA, 1271 bp, Zea Mays
cattacttcttgtgaaatcctcaatccagttgcggaatatatcataacaaggcaagtatatcccaacctgtttgtgatcaaacaattagtaacaggtgcaattgatttgaacataaaaagtagagggaaaatactatgtgcatcagttagatggagatagcggggcaattgatttgaacaggtgtaatatgattcagaatattacgttgtagagggaaaatagagagatggagatagcaagttgtacaagattgatgggtgacacgacaaaaaaaatcaacatgaattataatactatgtgcattagttagacaagtgcaaattagtcaagaggtaagcccataaggcttctataaaaaaggatcatggttattaaagcggtaaaacgttaaaacgttatgaacaactttttaacatttaaacgtttaaacgaacgttgaaacgtcttttcagacttgacatagaagttcaaatatagaataagttcatacataagttgagtacttgagttcacaaaccaaatagcataaaaagaaacagatcaagttcaacaacataagttacaacttttatgcatgatcagtaaccatcatcgaactcatcaatattaagagagcatccacgccttgatcatcaccatcttttccactattgcttccttcaatttcatcttccacgtcaagatcatcaagaatatattcctcgtcctcatcatcttcatttgctcaattagtctcctctttctcaaggtcttcattccctctcacacacccaccagcacttatggtagtttgagcaggtccctttgcatgtccctctgctacaatttcttgaggtgttcgtcgaatcatagatgcaatggacttctttggagctgcaattgggtggggcttcaattggaaaattgctttgtttcttttggcagctgttccagaacttagcacagtacatgaggaagccttggatgatgctgacattgaccctataacttggacatcgtcatctggtcctgcttcatcttccaatacatcatcatctaaaggcctaggaaaggcccacagatgggtagaacgtcctcaaaacgcgtaaaacgccctaaaacgcgcttaggatgcttaagcgacaattaaacgtccaaaacagacgttctacgccacttttctaaaacgctcggacgttccagctcctaaacacgttttctcgcttaaacgacgcttaaacaacgttttaataacaatgaaaaggatatatacatatctcatcatacaaag

SEQ ID NO: 39751 - DNA, 696 bp, Zea Mays
attgatcggcccggatcatcgccctcctttccggatccacgaatctgctggtgttcgtttgtggagcaccggaactacaaggtcgtttacaggcgctacgcctcccttttcttcctcgtcggcgtcgacagcgatgagaatgagttagctatccttgaattcatacatcttctggtggaaactatggatcgccacttcggcaatgtgtgcgagctcgatatcatgttccatctggagaaagtgcacttcatgttggaagagatggtgatgaatggttgcattgtggagacaagtaaacagaacatcttggcaccaatacaacttatggagaaaacttcctaaaatagtgatatccatttgtgtagttttacatccacttcttagcacatttgcctgtctgcccctttccataaaatttccctctgtatgtgagagtgcaaaacaatctctgtaaccatggagtattgaattgacctgattgtgtgctttcagatattcctgtgatcctcttttcatgtatgcattcgatttgctcacatatgtataaaaggtgtattatcttaagaaaagctgatttatctaaaatgtaatttatcgacatatttatatgtattttgttgcagataatttgaatagtatgatcaaaggtgagtatttggggtcatgctgaatgatcattagaactgactatacaga

SEQ ID NO: 39752 - DNA, 563 bp, Zea Mays
gaagggtgcaagctcatcagaaaagaaaagagttacaagaagatcaagcttggcggtggctgctgctgtgttgcctcctcttgttggaccgaagagagggaggggagaagcagctggcgtgcagacttctactcaggtggtcttttattctctatggggcttctaggatacatcttctccagaagcaccataagtcttgtcttgggcattacaccagggctagccactctacaacttggcactctcagtctgaagttctagaggagcggcagatccagcttcctgcttatcttggctcaggcagaggtgatgatgatgtgcaagcatcttcaccttgagttctgccttgccagaatgaatcaagtttattttcccatcctgctccatttgtggtagcccaatcgtctgtcctcacatcaactttcacctgccttaagcctttaggttcatttgtcttatatataccatggtaaaccacaccatgaatatgccataaataagtaacaagagtgtctagcaactcagcacacacaggaagtcaggatccttcacgtacacctttc

SEQ ID NO: 39753 - DNA, 199 bp, Zea Mays
atgttcacggatgaattgttccacggccgaaacatcacctgtcaaaccagcaccctccgcaacagccaccttgttctggcactggctgaagttgaatgcctctccagggaccccaagctggacttcatcagagatgtcggctgacgatacggcgttcctagattccctaagcttgttcctacaacatggtcaaaaacag

SEQ ID NO: 39754 - DNA, 3495 bp, Zea Mays
accttcagaaacggcgacggtgacggacggcgtgtggcggaattggcgggaggcggggagccaacggctctatgctataaaatgcgatggagcacaagttttactatcgctatttgccactgaatcgactcgtcttctctgccgaacccggccagcaggcggcagcagcagcagctcgctcgccgatggacgcgccggcccccacgaggggccccgcgagcttcctcactcaggccaacgccctcctccgcaagaacctctgcttccagaagcggaacctgaagaccaacatcggcatcacgctcttcccggtgctcctctgcgtcattctcgtcgtgctccagggcgtcatcgaccgcgagctcgacaagcccaagtaccgctgcggctgcgtatgcgtcgacccgggcccggccgcggtcggggacgcgtgccgccggacggagtgcggcgtccagcactccaccctcgaccaggtcgggagctgcccgatccccaacccgaccccgtggccggcgctggtgcaggtgccgcggcccgagtcacgcgccgtcaggaccgccggccagccgttcgacggcttgcctgacccgacctgccgggacaccggctcctgccccgctgccgtcctcgtcaccggcagcaaccgctcgctagctcaaagtctttcggttggactatttcctgcttcgacttcctccttgaatttgacggattatctggatgcactatccaagatcgttgctggatcggacacgtggccgtggacaacagagttaatagagtcagcgtttatcccagggaataacttgtatctggtgcaacctcggtgtttgtccaacctaacgcagacagtttcatccaatgccggggccatacctcttcagctcaacatagactgcgttcagggattgccactatggcgtgaaagtgcatcagttgtaaatgatgaactctttaagggttacagacaaaatggtggaggtagtggaggtggaaagacaaatgaatttgttgcaggttatgattttctaaatacaaatacgaatggtcttgaaatgaatatttggtacaactctacctataacaacaacactgcatacgtacctatttcattactacgagttccacgcttggttaatgcggcatcaaatgagtacattaaatttctcaaaggaagtggagtggaaatgtttctgcaatatgttaaagagatgcccaaagtaggaacaaagttgaaatttgacctctcttctcttcttggtgcactgttcttcacatggatcgttgaactactgtttccagtcatattaacatatctcgtgtatgagaagcaacagaagctgaaaattatgatgaagatgcatggtctgaaggatggtccttattggcttatctcatatgcttacttttttgctctctccgctacctacatgatattgtttgtgatttttggctcactgattggtctagatttctttaggaaaaatgcctatagcattcaatttgtcttctacttcatctacataaacttgcagatttcacttgcatttttggtatcttccttcttttcttctgtcaaaatagccacagttgttggttacatctatgtatttggctctggcttgttaggggaatttctccttcgcttttttgttgaggatactggttttccaaagggttgggtggtcgtaatggagatcattcctggattttcattgtaccgaggattatacgagtttggtcaatacgcatctgctggaaactcaatggggaccactggtatgaaatggagtaatctagatgactctcttaatggaatgcgtgttgtcttgattattatggttgtggaatgggcaatagttctccccttggcattttatgtggatcaagtctcgccactggggggtggattcaggaaaaatccctttttcttcttgggctgctttaagaagagtcctctatcattgcggagatatagctttgggagacaaggatctaaagtagtcgttgaaatggacaatcctgatgctgttcaagaaagggaggtggttgaacaacttctgctggaacccattgcaaaccaagcgatcctctctgataacctcaaaaaggtttaccatggtaaagatggaaaccctgacaaacttgctgtccgagggttgtctcttgccataccaaaaggccagtgttttggaatgcttggtccgaatggagctgggaaaacatccttcatcagtatgatgattgggcttattccaccaacatctggcactgcctatgtacatggaatggatataaagaccaatatggatgcaatctatactaccatgggtgtatgcccacagcatgacttactttgggaaacattaacaggaagagagcatgtaatgttttatgggagactgaagaatcttaagggcactgaattactgaaggctgttgatgactctctgaagagtgttaatctgtttcatggtggcgttggtgataagcaagtgggaaagtacagtgggggcatgaaacgaaggcttagtgttgccatttcattaatcggggatcccaaagtagttttcatggacgagccaagcaccggactagatccagcatcaagaaacaatctgtggtgtgtcgtgaaggaggcaaagaaaaaccgtgccatcattcttacaacgcactcgatggaggaggcggaagtactatgtgatagacttggtattttcgtcgatggtggtttccaatgccttggtaacccaaaagagctgaaagctagatatggcggcacctacgtactaacaatgacaacaccttcggagaatgagcaggaggtcgaacagcttgttcaccgcctatcaccgaatgcgagcaggatataccatatttcaggaacccagaaattcgagctgccaaagcaggaggtgaaggttgcagacgtattccatgccgtcgagagtgcgaaacgccggttcagcatctatgcttggggcctggtcgacaccaccttggaggatgtctttattaaggtcgccaagggagcacaagcattcagtgttgttgcgtaaatagtgtaatggagtctgtagatgtcaatatctttttagttgtggaatgtgtgatgtatagtcttgcctgaactttggttgtagtcttggtaaggttgaggttgtggtgtatattttagcgtagctaagttgtactctctctgttcataaatatatgtcaccgttgactttttaaaaaaactttgaccactcgtcttattcaaaaaaataataagttatcattttttatttgttttatcacttaagttactttgtgcttgacttaaatttttatattttaaataaatattttgaataagacgagtggtcaaagtttttgaaaaaaatcaacggtgtcatatatttgtgaacgaaggtagtatatattttgtaatttgaaagccacattgtccctaacaaatatagatatactttgttcctatttacaaaaagg

SEQ ID NO: 39755 - DNA, 2669 bp, Zea Mays
atggcaaacacaagcggaactcggcctcacacgggagcacaacagtggttgtccttgcgtgagaccatgacacgtgcaaatgcgacatacatagactgcgttcagggattgccactatggcgtgaaagtgcatcagttgtaaatgatgaactctttaagggttacagacaaaatggtggaggtagtggaggtggaaagacaaatgaatttgttgcaggttatgattttctaaatacaaatacgaatggtcttgaaatgaatatttggtacaactctacctataacaacaacactgcatacgtacctatttcattactacgagttccacgcttggttaatgcggcatcaaatgagtacattaaatttctcaaaggaagtggagtggaaatgtttctgcaatatgttaaagagatgcccaaagtaggaacaaagttgaaatttgacctctcttctcttcttggtgcactgttcttcacatggatcgttgaactactgtttccagtcatattaacatatctcgtgtatgagaagcaacagaagctgaaaattatgatgaagatgcatggtctgaaggatggtccttattggcttatctcatatgcttacttttttgctctctccgctacctacatgatattgtttgtgatttttggctcactgattggtctagatttctttaggaaaaatgcctatagcattcaatttgtcttctacttcatctacataaacttgcagatttcacttgcatttttggtatcttccttcttttcttctgtcaaaatagccacagttgttggttacatctatgtatttggctctggcttgttaggggaatttctccttcgcttttttgttgaggatactggttttccaaagggttgggtggtcgtaatggagatcattcctggattttcattgtaccgaggattatacgagtttggtcaatacgcatctgctggaaactcaatggggaccactggtatgaaatggagtaatctagatgactctcttaatggaatgcgtgttgtcttgattattatggttgtggaatgggcaatagttctccccttggcattttatgtggatcaagtctcgccactggggggtggattcaggaaaaatccctttttcttcttgggctgctttaagaagagtcctctatcattgcggagatatagctttgggagacaaggatctaaagtagtcgttgaaatggacaatcctgatgctgttcaagaaagggaggtggttgaacaacttctgctggaacccattgcaaaccaagcgatcctctctgataacctcaaaaaggtttaccatggtaaagatggaaaccctgacaaacttgctgtccgagggttgtctcttgccataccaaaaggccagtgttttggaatgcttggtccgaatggagctgggaaaacatccttcatcagtatgatgattgggcttattccaccaacatctggcactgcctatgtacatggaatggatataaagaccaatatggatgcaatctatactaccatgggtgtatgcccacagcatgagaagagagcatgtaatgttttatgggagactgaagaatcttaagggcactgaattactgaaggctgttgatgactctctgaagagtgttaatctgtttcatggtggcgttggtgataagcaagtgggaaagtacagtgggggcatgaaacgaaggcttagtgttgccatttcattaatcggggatcccaaagtagttttcatggacgagccaagcaccggactagatccagcatcaagaaacaatctgtggtgtgtcgtgaaggaggcaaagaaaaaccgtgccatcattcttacaacgcactcgatggaggaggcggaagtactatgtgatagacttggtattttcgtcgatggtggtttccaatgccttggtaacccaaaagagctgaaagctagatatggcggcacctacgtactaacaatgacaacaccttcggagaatgagcaggaggtcgaacagcttgttcaccgcctatcaccgaatgcgagcaggatataccatatttcaggaacccagaaattcgagctgccaaagcaggaggtgaaggttgcagacgtattccatgccgtcgagagtgcgaaacgccggttcagcatctatgcttggggcctggtcgacaccaccttggaggatgtctttattaaggtcgccaagggagcacaagcattcagtgttgttgcgtaaatagtgtaatggagtctgtagatgtcaatatctttttagttgtggaatgtgtgatgtatagtcttgcctgaactttggttgtagtcttggtaaggttgaggttgtggtgtatattttagcgtagctaagttgtactctctctgttcataaatatatgtcaccgttgactttttaaaaaaactttgaccactcgtcttattcaaaaaaataataagttatcattttttatttgttttatcacttaagttactttgtgcttgacttaaatttttatattttaaataaatattttgaataagacgagtggtcaaagtttttgaaaaaaatcaacggtgtcatatatttgtgaacgaaggtagtatatattttgtaatttgaaagccacattgtccctaacaaatatagatatactttgttcctatttacaaaaagg

SEQ ID NO: 39756 - DNA, 2937 bp, Zea Mays
gctgaccgcgttcagacacgacacccatggagtctcggcgatcgcgtggtcttgcgaggttttccaggcagaggaggaacgcgaggacgaacgccgcgatcgccgcgttcccggtgctgctctgcgtgctcctcgtctccatccagcacgtggtggacagcgagctggagcggcctccgttccgctgcggctgcgccggcgcggatcagtgcggcatccagcactccacgcccatccaggcgctcgcctgcgccgtgcccgtgccgccgaggtggccggcgctgctgcaggtgccggccaccgaggcgcgcgcactcacgcgcctccgcccgcgcccgtgcaaggcgccggagaactgccccgccaccgtgcttctcaccggccagaaccgcctgcttgcccaaggccttggaagcttgctgttcccacctctccctccacagtacgcccgacgcatgcctggtgctgctgctgctgcttcgaattcctcggactatctggatttgttctcggcagtagttcctggttcaagctcgctgccggcacatgtgctcttcatcgaaccgggcctcgttccagaagagacgctgtatctgctccaaccaaattgctggtcagagacacgcaatatttcagcacattttgatgggataccaatagaatctgaactgcagtgcgttcaggctctgtcgtcgtggtgcgacaattcgtcggtgatcaatcgccaaatgttcatgggctacaagggtggtgataggaggcgaagatctaacgagttcctcgctggctatgacttcctcgacacaagcaagaggcgcttccatgtatacgtctggtacaactccagcttcagcagggacaatgggcaccattccatgacggttttgcgtgtttcacggttggttaacatggcgtccactgcatatctgaacttgttattaaaaggagggactacagaaatgcgcctggagtttctgaaagagatgcccaaagctgcaatcaaaatgcggctggacctcaccactctcctggacgccctcttcttcacctggacggttcagctcctccttccagtaatgttgacataccttgtctacgagaagcagcagaggctaagactaatgatgaagatgcacgggctgaaggacgcgccttactggctgatatcctacgcctatttcctggccctttcagcagcctacatggcgttcttcaccatctctgggtccatcatagggctggacatattcaggctaaatagctacggcatacagtctctgttctacttcgtgtgtatcaacctgcagatcgtgcttgctttcctgctcgcaactttcttctcgtctgtcaggactgctagcgtgatcggctacatgtatgtcttcggctccagccttcttggcgaagcgcttctgaaggtattcatcgaggacgcaaccttcccaaggcgttggcttgtagcaatggagcttgttcccgggttctccctgtaccgagggatctacgagcttgccgagtacgccgcggcagggaggaacatgggaaaacccgggatgcgatggggggacatggacgacccggtgaacgggatgagaggcgtcttggtggtgatgtctgtcgaatggatcgttctcctcctcgtagcgttcttgctggaccgtaggcctgcgtggcagcctctgtttctgttcgggttcctgtcgacgaaacactcctcgccgtcagagagacagaagaaggagtccaggagggtccatgtgtacgggacgaagcctgacgtgtctctagagcgcaaggtggtgagacggttgttgaaggacatggacatgggggatatgatcatctgcaataatctgaagaaggtgtatcctggaaagaacgggaaccctgacaagcatgccgtcagaggattgtcgctggctctgcgcaaagggcagtgtttcgggatgctgggtcccaatggcgcagggaagacatccttcatcaacatgatgattggcctcgtgaaaccgacgtatggaactgcctacgtgcatggaatggatctgaggacagagatgaacgaaatatacacgagtatcggtgtatgtccacagcacgacttgctgtgggagcctctgacaggacgggagcatctgatgttctatggccggatgaagaatctcacaggtgctgctctaacacaggcagtggaggactccctgaagagcgtgaacctattccacagcggcttcggcgacaaatctgtgagcaagtacagcggcgggatgaagaggaggctcagcgtcgccgtcgctctcataggcagccctaaggttgtgtacatggacgagccaagcactgggctggactcgaggtccaggagcgatctatggagcatcatcaggcgagcaaagaaagactgcaccatcattcttaccacacattccatggaggaggctgagcagctgtgcgatcgcatcggcatcttcatcaacggcagcttccactgcattggaactcccaaggagctgaaggcgaggtatggcggcacccggatcctgacgatcacgacctcgccggagcacgaggaagcggtggagctgatcgtgagccggctggcgcccggatacagcaggatctacagcgtgtccgggactcagaagttcgcgctgccccggcgggaggtggggttggggtgcgtcttcggcgcagtggaggtggcgcggcgagagttcccggtgctggggtggggcgtggcggacgccacgctggaggacgtgttcgtcagggtggccaaggaggcccgggcgttccacgttctgtcctagctagtcactgctcggttcgctcttagaaatggaaaatgtacaggttatggcttgttcgttaacattaattcatatggattggatgatgttgagacggtttaaattcatagcaggtcaatattatctc

SEQ ID NO: 39757 - DNA, 2930 bp, Zea Mays
atggagtctcggcgatcgcgtggtcttgcgaggttttccaggcaggtccatgccctcttcctcaagaacctttctttccagaggaggaacgcgaggacgaacgccgcgatcgccgcgttcccggtgctgctctgcgtgctcctcgtctccatccagcacgtggtggacagcgagctggagcggcctccgttccgctgcggctgcgccggcgcggatcagtgcggcatccagcactccacgcccatccaggcgctcgcctgcgccgtgcccgtgccgccgaggtggccggcgctgctgcaggtgccggccaccgaggcgcgcgcactcacgcgcctccgcccgcgcccgtgcaaggcgccggagaactgccccgccaccgtgcttctcaccggccagaaccgcctgcttgcccaaggccttggaagcttgctgttcccacctctccctccacagtacgcccgacgcatgcctggtgctgctgctgctgcttcgaattcctcggactatctggatttgttctcggcagtagttcctggttcaagctcgctgccggcacatgtgctcttcatcgaaccgggcctcgttccagaagagacgctgtatctgctccaaccaaattgctggtcagagacacgcaatatttcagcacattttgatgggataccaatagaatctgaactgcagtgcgttcaggctctgtcgtcgtggtgcgacaattcgtcggtgatcaatcgccaaatgttcatgggctacaagggtggtgataggaggcgaagatctaacgagttcctcgctggctatgacttcctcgacacaagcaagaggcgcttccatgtatacgtctggtacaactccagcttcagcagggacaatgggcaccattccatgacggttttgcgtgtttcacggttggttaacatggcgtccactgcatatctgaacttgttattaaaaggagggactacagaaatgcgcctggagtttctgaaagagatgcccaaagctgcaatcaaaatgcggctggacctcaccactctcctggacgccctcttcttcacctggacggttcagctcctccttccagtaatgttgacataccttgtctacgagaagcagcagaggctaagactaatgatgaagatgcacgggctgaaggacgcgccttactggctgatatcctacgcctatttcctggccctttcagcagcctacatggcgttcttcaccatctctgggtccatcatagggctggacatattcaggctaaatagctacggcatacagtctctgttctacttcgtgtgtatcaacctgcagatcgtgcttgctttcctgctcgcaactttcttctcgtctgtcaggactgctagcgtgatcggctacatgtatgtcttcggctccagccttcttggcgaagcgcttctgaaggtattcatcgaggacgcaaccttcccaaggcgttggcttgtagcaatggagcttgttcccgggttctccctgtaccgagggatctacgagcttgccgagtacgccgcggcagggaggaacatgggaaaacccgggatgcgatggggggacatggacgacccggtgaacgggatgagaggcgtcttggtggtgatgtctgtcgaatggatcgttctcctcctcgtagcgttcttgctggaccgtaggcctgcgtggcagcctctgtttctgttcgggttcctgtcgacgaaacactcctcgccgtcagagagacagaagaaggagtccaggagggtccatgtgtacgggacgaagcctgacgtgtctctagagcgcaaggtggtgagacggttgttgaaggacatggacatgggggatatgatcatctgcaataatctgaagaaggtgtatcctggaaagaacgggaaccctgacaagcatgccgtcagaggattgtcgctggctctgcgcaaagggcagtgtttcgggatgctgggtcccaatggcgcagggaagacatccttcatcaacatgatgattggcctcgtgaaaccgacgtatggaactgcctacgtgcatggaatggatctgaggacagagatgaacgaaatatacacgagtatcggtcttgctgtgggagcctctgacaggacgggagcatctgatgttctatggccggatgaagaatctcacaggtgctgctctaacacaggcagtggaggactccctgaagagcgtgaacctattccacagcggcttcggcgacaaatctgtgagcaagtacagcggcgggatgaagaggaggctcagcgtcgccgtcgctctcataggcagccctaaggttgtgtacatggacgagccaagcactgggctggactcgaggtccaggagcgatctatggagcatcatcaggcgagcaaagaaagactgcaccatcattcttaccacacattccatggaggaggctgagcagctgtgcgatcgcatcggcatcttcatcaacggcagcttccactgcattggaactcccaaggagctgaaggcgaggtatggcggcacccggatcctgacgatcacgacctcgccggagcacgaggaagcggtggagctgatcgtgagccggctggcgcccggatacagcaggatctacagcgtgtccgggactcagaagttcgcgctgccccggcgggaggtggggttggggtgcgtcttcggcgcagtggaggtggcgcggcgagagttcccggtgctggggtggggcgtggcggacgccacgctggaggacgtgttcgtcagggtggccaaggaggcccgggcgttccacgttctgtcctagctagtcactgctcggttcgctcttagaaatggaaaatgtacaggttatggcttgttcgttaacattaattcatatggattggatgatgttgagacggtttaaattcatagcaggtcaatattatctc

SEQ ID NO: 39758 - DNA, 1516 bp, Zea Mays
cagcattggatttattggctttcgctggcatctagatgtagccctccccagatgatttattaaccccccacgttctcttgcgtctccacttgtctttacaaatcgactatatgtactgcgcctctattcccgtaagaccaagaaagacctgaacctgatacaccttgcctctccccactaagcttgtttaccacgcttataagacatgggtcaagcactcggcttgattcaagtggatcaatcgacagtagccatcaaggaaacttttgggaagtttgacgaggtcctagagcctggatgccacttcttgccatggtgcatagggaagcaaattgctgggtatctgtcactgcgtgtgcagcagcttgatgtccgctgcgaaacaaagacaaaggataatgtcttcgtcaatgttgtggcatctgtgcaatatcgtgcccttgccgataaggcatctgatgcattttacaggcttagtaacaccagggagcaaatccagtcatatgtttttgatgtcatcagggcaagtgttccgaagatgaacttggatgatgcctttgagcagaagaatgaaatcgccaaagctgtagaaaatgaacttgaaaaggcaatgtctatgtatggatacgagattgtgcagactctgattgttgatattgagcctgatgagcatgtgaagagagctatgaatgagatcaatgcagctgctaggctgaggttggctgccagcgagaaagctgaggcagagaagatactgcagatcaagagagccgaaggtgatgcagaatccaagtacttggcgggtctgggtatcgcaagacagcgccaggctatagtggatgggctcagagacagtgttcttgctttctctgagaatgtgcctgggacctctgcaaaggatgtcatggacatggttctggttacccagtacttcgacaccatgaaggagattggggcctcgtccaagtcctcgtcggttttcatccctcatggaccaggtgctgtcagagacatcgcagcgcagataagggatggtcagctccaggccagtctgctgtgagcacgttggaaaaggcatgcttttgacattcccatcagtaaagaagtacatatacatcatgaggagtaaaaaaaaacttactagcgataatgtgagtacagcttgttcgttctatctatatggtgcatgtgattattattatggagattaatgttaaataggttcgcatgtattgtgccagaacaaggctaaggaccagtttgcgtaaaaaaatgtatgtttggaacttatctaagttttggagcctgaggaaacccctccatcctgtgcaaactattttgtggtaccctgcttctctgttatcgtgaatgagaatctcatgttcattttctgtgcccagattaagaggaaattctgggatttgattactgacgtggatgcatcctgtgagatttttgaggcaataatcaaaagtgcccacttacgtttaactgctcattgttgaatagcgtgcgc

SEQ ID NO: 39759 - DNA, 1315 bp, Zea Mays
agacatgggtcaagcactcggcttgattcaagtggatcaatcgacagtagccatcaaggaaacttttgggaagtttgacgaggtcctagagcctggatgccacttcttgccatggtgcatagggaagcaaattgctgggtatctgtcactgcgtgtgcagcagcttgatgtccgctgcgaaacaaagacaaaggataatgtcttcgtcaatgttgtggcatctgtgcaatatcgtgcccttgccgataaggcatctgatgcattttacaggcttagtaacaccagggagcaaatccagtcatatgtttttgatgtcatcagggcaagtgttccgaagatgaacttggatgatgcctttgagcagaagaatgaaatcgccaaagctgtagaaaatgaacttgaaaaggcaatgtctatgtatggatacgagattgtgcagactctgattgttgatattgagcctgatgagcatgtgaagagagctatgaatgagatcaatgcagctgctaggctgaggttggctgccagcgagaaagctgaggcagagaagatactgcagatcaagagagccgaaggtgatgcagaatccaagtacttggcgggtctgggtatcgcaagacagcgccaggctatagtggatgggctcagagacagtgttcttgctttctctgagaatgtgcctgggacctctgcaaaggatgtcatggacatggttctggttacccagtacttcgacaccatgaaggagattggggcctcgtccaagtcctcgtcggttttcatccctcatggaccaggtgctgtcagagacatcgcagcgcagataagggatggtcagctccaggccagtctgctgtgagcacgttggaaaaggcatgcttttgacattcccatcagtaaagaagtacatatacatcatgaggagtaaaaaaaaacttactagcgataatgtgagtacagcttgttcgttctatctatatggtgcatgtgattattattatggagattaatgttaaataggttcgcatgtattgtgccagaacaaggctaaggaccagtttgcgtaaaaaaatgtatgtttggaacttatctaagttttggagcctgaggaaacccctccatcctgtgcaaactattttgtggtaccctgcttctctgttatcgtgaatgagaatctcatgttcattttctgtgcccagattaagaggaaattctgggatttgattactgacgtggatgcatcctgtgagatttttgaggcaataatcaaaagtgcccacttacgtttaactgctcattgttgaatagcgtgcgc

SEQ ID NO: 39760 - DNA, 1372 bp, Zea Mays
atcgctctccccctgaacccccaacactactccacaagaccacaaccccgaacccggccggcggcagcacaacatgagaacagcccccccccccccccccccccccccccccttctcgcgcctcctacctctctccagtcggttcccacgccttgccgcgctttacctctgcggcgcactcccgttatcatataacccgcgcgccggctccggcgagattcgaccaaactccatggggctcgagatggtggaggtcatgtccgagactgttcctacggttgtgcctgcggcagcgagggagaacggggtggatatttacccgctcagccgctactacttcggcgccagggacgccgccggcgtgccccgcggcctcgagaccgccgctgaccgcgcgctacggctcaaggcaaacttcgcggcgcacgggctccgcacgagcgtccacggcgtcctcctggtggagctgttcgatcacccgcacgtgctgctgctgcaggtccgagggctcaagcgcaagctctccagcaagctctccgttgtcgatgatgtggaggccgttgaagaagaagactggcagattgggcagtgcatcgggatgtggtggagatctgaatttgaggccatcccgtttccctacatgcctccacgattccgtgcggcaaaggaatgcatgaagctgttcctgatcaggctgccgatgtcccggcagttcatcgtgcccaggaacatgaagctcctggccgtgcctttgtcccagattcatggcaatgctcaggtttacggtccaattatagccgccattccgagcctactatccaagttctccttcaacgtcatcagcgactgaattgtggaaaccaaccagaatgttgaggggttagtagacgcatgcatacttggctagttgaagtcatagaacagtgtgcgataccgatgggagcttgtattgagaagtagctcatctgtttttgttttttttttttttgtgtgtgcatatgtgtataatgtatccccctcctgggctcttgctgataatgatatgtatgtactgtatgtgtttctcgcgacctgtgtatgaccgtgtgagaaggattcagttctgtacaataactcattttgatttatttttgctcctacagtcctgaacttggaacataattagcacaccattccatgaaacagaagctactaaattcatttttcgggacaggtcatgtaacctgctaaccgctgaaggccaccaacttggatttcgttgagattccgttgggtgagccaaatttacctgcagaggttaagtgtgatccagatctttacacctcaacatagatccacacgtttgattagctataggacaatatgtgataca

SEQ ID NO: 39761 - DNA, 1040 bp, Zea Mays
atttcgctgaattgagtaacctctacttcgcggcgcacgggctccgcacgagcgtccacggcgtcctcctggtggagctgttcgatcacccgcacgtgctgctgctgcaggtccggaactcctccttcctgctcccgggaggccgcctcaggcctggcgaggaagaggtccgagggctcaagcgcaagctctccagcaagctctccgttgtcgatgatgtggaggccgttgaagaagaagactggcagattgggcagtgcatcgggatgtggtggagatctgaatttgaggccatcccgtttccctacatgcctccacgattccgtgcggcaaaggaatgcatgaagctgttcctgatcaggctgccgatgtcccggcagttcatcgtgcccaggaacatgaagctcctggccgtgcctttgtcccagattcatggcaatgctcaggtttacggtccaattatagccgccattccgagcctactatccaagttctccttcaacgtcatcagcgactgaattgtggaaaccaaccagaatgttgaggggttagtagacgcatgcatacttggctagttgaagtcatagaacagtgtgcgataccgatgggagcttgtattgagaagtagctcatctgtttttgttttttttttttttgtgtgtgcatatgtgtataatgtatccccctcctgggctcttgctgataatgatatgtatgtactgtatgtgtttctcgcgacctgtgtatgaccgtgtgagaaggattcagttctgtacaataactcattttgatttatttttgctcctacagtcctgaacttggaacataattagcacaccattccatgaaacagaagctactaaattcatttttcgggacaggtcatgtaacctgctaaccgctgaaggccaccaacttggatttcgttgagattccgttgggtgagccaaatttacctgcagaggttaagtgtgatccagatctttacacctcaacatagatccacacgtttgattagctataggacaatatgtgataca

SEQ ID NO: 39762 - DNA, 1394 bp, Zea Mays
atgactgcccgtacgtcggttgttacaacgaacaacttaacaccgccctatagatcaagtgatcaactgcccggcatgctcggagtggatgatcactcactaacttccatgaagggatcatgccttttaataggtatgatgacgaagcaaacggaggctaattaatgggcgcggttatcccgcggtccctctcctattcctacgacgacgacgcccccgacctcggtgtggtgcgtggtagcacgacgatcgccattgccgccgcctgtgccatctggcgcgcgcgcggcgagacaatgacctcctcagtatccccagccgcggccgcctcccagccccaactgcatattaccaccaccggtacgagcaccgggtccactgcaatcatatcgccctcctcaaaccaaagcaccagcaacgcgcgttcctcctccccgcattccacgagcagcccccctcgcggacccagcaccaccggaggcacaggcagcggcggcggaagcggaagcgggtgcacgaaccaggcgtgcgcggcgtgcaagtaccaacggcgcaagtgcaacacggactgcccactcgcgccctacttccctgcggatcagcaggagcgcttcctcaactcgcaccgtctcttcggcgtccgaaagatccttaagacgctggagaacaccagtccggagctctccgccaacgctatggccactctgattttccagtcggacatgcgcgcacaggaccccgtcggcggctgctaccacctcatcctcagcctcgagcgccagctccagattgagatggccgagcactccgccatggtccaaagactggcgctcttccgccaggctgctaccacgatgccaccggatcaaggcggcggcacggttggcctcgactacaccgcgtcatccaagcagccgctcttccacaacgctcagcaagaggtggtttacgcactctacaagaacaaccacggtggaggccacggccccaacaaggatgatcacggcgggcaacaacaccagcacttcgacgagaactgccagattgaccacaaggattatttcgagattaaagcggccgcactcgtcgacgacgcgtttgacatgcgacaggaggtggtggacgtgtgcgccgaggttgacatggacaccaagacggtggatgtgaatgccggcatcggcggcgtcgatatcaaggcgatgggcatgaacgccaacgtcgatgtcaatgtctccacaccacaaatggcagctgagtcatcgcactgcagactagggctaggcttttcatcgttctgataatagagatattagaggtttttttggtccaccgaaagatccaccagactcgtttttaagaattataagcacaaaaagactatatataaatcaggc

SEQ ID NO: 39763 - DNA, 648 bp, Zea Mays
ctcggaagttagtaggttctcggaagttagtagcttcacgtcgttagcgccgttagctgactagcttcctacgactaacttcctatggctgactgtagccctggctaacttcctacggctgactgtagcccctaggaagttagctggctaacttcctacggcccaataagcctctaggaagttaatttgaccagatttacaaatgctgtttatttttattttacaccacattccacaacaaaacaaatatatcaaacatctatatagcacaacatattttcacataaaacatctcacacataatcagataacaatatttaaatccatagtctcatcaattacatcacaaaagtctcatccatagtcataataagacacatctcatcatccagtactaataagagacaatatcgggggaaatcgggggaagccgctacgggaggaggaagaagaggagaggaagaagaaaagaggagaggatggagagggtatgtttttatcgcgggggcggggttggtcgcggcgggcggggacaggggcggccacgccagcagagcagtgggcgggggcgggggcgggagcggcaggcgaggccggggcgggcgggggcataggaagaggcaataatatttggcaaatacctgcaag

SEQ ID NO: 39764 - DNA, 1193 bp, Zea Mays
ataccccaaccaccccaccattcatggcatccaagttttccagcttccaaccactatacaagagctagcattcattgcaaagcacaccaaaagagatcaaatcctctcccaaccccacacaaagcattagtgattagagagagtgatttgtagtgttcatttgagctcttgcgcttggatcgcttcttttctttcgcattctttcttgtgatcaaacactcacttgtaattgaggcaagaggcaccaatcgtgtggtggcccttgcgggaagtttgattcccaagagatttgagaagagaagctcactcggtccaagggaccgtttgagagagggaagggttgaaagagacccggcctttgtggcctccttaacggggagtaggtttgagagaaccgaacctcggtaaaacaaatccgcgtgtctcacttcattattcgcttgcgatttgttttatgccctctctcgtggactcgattatatttctaacgctaacccggcttgtagttgtgattatttttgagaatttcagtttcgccctattcaccccccctctaggcgactaccaaacatgctatcaagacgcagacaagagttctggcactgctacattgggttgtctaagacaatgaacaggtattgctgatttttcttgccattgacatgacattgatactaacaattaattcatccaatatattggcgtgtgttttccttttggggaaatttaccgcatcatgatttttgattttcaccatgagtggagtttacctttgcaaagatttccaaagaaaactgtatcttgatccattgaaagctcaaacacaagcctctttccttgaagctggtaaaaaaccaacagcatatatattatgaatgttaggtttcataaatgagacagtgttattctttgtatctgttataatgaaaaggcacactaccatctcagatctcactctggagtctagactcaaggtctatagaaaagaataaaattaaacaaacttgtgattaacataaatatgaagaaagcaggaagcaattgttgcaggcaacattatgatactggtgcatataacaaaatattaacaacataaaagaaaaggttactacatatagatgtggaactagacacaggaaaaaatgattaaatgtaatggcagaatggtacatattagcacaagttaagcactg

SEQ ID NO: 39765 - DNA, 1613 bp, Zea Mays
agccggagagagatcagggagggggcaaggctgcaccagcaggctcgtctcctttcatgctccgatgcatctggtggcccgagcaataattcggaccttgtctcaccggcgacgcaacgctacaagcctacaagcgaggtggcgggcgcgagcaaaaaaaaaaaaaaaaaacgagactacgagagagcttacaaaaagtttcccccaccattaattccaccgtgattccatctcctttgtcctcctcctctctcacatcacagccgtcccaccgcttctttttaagctcccactgcgcggccctctcctctccgtcaccctcctccccccctccctctcgtcggtctcttctctcttggtcggtcctggataaacacaaatctcttgcctccctccccctcctcttcgcctctctgcattgcggtgctactagctagcaaccaaatccaaagcagcaaagccttgcaggctagctagggaagcaaatcaatctcaggctttgccgctcgctctatacatccgtcctcctcgtgctgcgtgctgcgtggcgtgtgtctgtctggagaggtgaagcggcggaggcagcatgagggcgggcgggatgctgtgccggtcgcaggcggcgacggcggtgtgcgtgccgggggacgcgcggtccatggtggtggcccggcgcgccgccgaccgcacccgcgacagcgacgacgcccgcgccctgcacgacgtcaggtacgcgcgcctcggcgccggcgccggagacgggggccgccgcacctccgcttcgcggaggttctcggcgcccagcagggccgccgcgcctcctccgaccgctaccgccgccactgcgtcatgcaagccgcgcgtggagaggccgcggcgcgcgcccgtggccgtgacgctgcccatggtgacggtgatgggccacgtgtcgccggcgggcgtcctcgagagcatctccaaggtgaagaaggccgagctcctcctcgcctgatggatcgatcgacgattatggatctccagccgtccaccaactagctagctagttgttgcattgcattgctagcaaaacacccgagtgaacgaacgaacgaagaaccctgtgcactatcgctctgattggttagtcgcactgtctcatcctgcatcagtgcgtgcattgactttatttaagtctttgtttggttgcctgtatactagaagcgtgagctgcatgagtggatgcaaaataatttattttgaggctgtttgactgcatctgctcatacgtcaaaaacttcggttcctagccagcctggatggcacgagactggtttgtaaggctcaggcaaccaatcaggcagtatgtgttagtatctcgcttctgcttgcattggctgctactgctagccgtacgtgcatcgtataccaatccatggatggatgtatcatgcgcgtgcagtgatggcgtgtggcgaaccttctccctcctcctgtgccgtgcctgttggcttttgctgctggtacgtacttgtacctagctatggtcgggccgtcggtcctcctccgtccgtgtctgcattatgcatgcatgatcgatgccttgcttcgtttgttatacagcactattattgctt

SEQ ID NO: 39766 - DNA, 2943 bp, Zea Mays
atgaatgcaggaggagtactcggcaccaacctcctgtcctgggctgggcccctcgctagcgcttacactattctgcggtcagaccagagaagagaaggccgcatctaccaccgccagtcgcgacccccgtggttccatccatccgcgggcccgcgcggcatctaccaccggcgcggaccgaggacttggacttgcgctcgccttgcatttgcacgtgacgtgaacgcgacgtcgctcgctcgaccactgcaccaccgtggctgctcggtcgagagtgtatacaactgctctccatttggaggcagcagattgaatgatcatttcatcctcgcagtcgcagacatacattgtcccgttctctcgcggcgggcgcctgacgatctcgtcctccgcgtccgccctcctcgttgcccacgcacgcctgaaggcgacggcggcgctggctgcgcggaggaagcccgagcggacattccgtttgctcgcaggccggattgcaaggccccctctcccaaattgcaaggatagtcaggaagctaattaacagtgttcgaaagatggtccaccgcgagccggccgaggcggcggcggcggcagcagcaggaggcgagaccagcatctctacgcagcctccctcatcatcccagcaggctgcgccaccaccggccgtgttagtgtacaaggtcgggtatcctccccggaggagcctggccacggagttcaccagcacgctgagggagaccttcttccacgacagcccgctgaagcagtgcaaggaccagtccgtgtccacgaagctccagatgggcctgcagctcttgttcccggtcttgggttggggcaggacctacagcctgagcatgttcaagggcgatctcgttgccgggctgacaattgcgagcctctgcattccccaggatattggctactcgaagctcgcgtatttggatccggagtacgggctctactctagcttcgtccccccgttgatatacgctgcgatgggtagctccaaggacatagcgatcgggccagtcgcagtggtctctcttctgctaggttcgcttctgcagaaggaggctgaccacgacaaggacagggaggaatacctgcgccttgcgtttacggcaaccttcttcgctggcatcactcaagcagctctgggattcctgaggctaggtttcctcatcgacttcctgtcgcacgccgccatcgttgggttcatggggggagcggccgtcactattgccctgcagcagctcaagggaaaaggaacaagaagtatttctgggtgcctgctatcgctcctgtaacttcggttattcttgccacccttttcgtgtacctctttcgcgctgacaagcaaggtgttcagattgtgaacaagatcaaaaagggcgtcaacccgtcatctgtgcacaagatctacttcaccggtccattcgtcgcgaaagggttcaagatcggcgctgtttgcggcatgatcggcttaacagaagccgttgccatcggaaggacgttcgccgccatgaaggactaccagctagatgggaacaaggagatggtagcacttgggacgatgaacatcgtaggctcaatgacgtcttgctacatcgcaacaggctctttctctcgctcggcggtcaacttcatggccgggtgccggacgccagtgtccaacgtggtcatgtccacggttgtgctcctcaccttgctgctcatcacgccgctgttcaagtacaccccgaacgcgatcctgggctcgatcatcatctctgccgtcatcggcctcgtcgactacgaggcggcgatcctcatctggaaagtcgacaagatggacttcgtcgcctgcatgggggccttcttcggcgtggttttcaagtctgtcgagataggcctcttgattgctgtgtcaatctcgtttgccaaaatacttgtccaagtaacaagacccaggactgtgctgctgggaaaccttccaggcaccacgatctacaggaacacggagcagtatccgcatgcgaggcatgttcctggggtggtcatagtcagggtggattctgccatttacttctccaactccaactatgtccgagagcgaatccttaggtggttgacggacgaagaagatagagtcagcgcagaggggctgcctagaatcagtttcttggtagtagagatgtcacctgttatagatatcgatacgagtggtatccatgcccttgaagacctgtacaagaatctccaaaagcgaggcattcagcttctcttatcaaaccctggctctgccgtgattgaaaagctccagtcgtccaaactcaccgagcacatcggaaatggtcatatcttcctcacggtcgcagacgccgtgcgtttctgcacttccaagtcgatgcaggagccttgaactgaaatggatttgtttgcgtccacattctgttctctaatctctactgtatacgttatgtatcatgtattcatgtaatcagaataatatacatatgcaagtttacgaatgacaggaatagtttcgaatgctgtgctcacagttgcttaacgcaaaagctagtgtgcgatagtattccaaatgaacattattatttacagacaagaggataggatcaatcttgaacgtataactataatttgatcaatgtagaaaccgaaggaaacatataaaacaaaactgaattcgacttgtgtggtcagccagacaggcattcccttaagtgttcagtcgctcttactccaaccagtccattttacaagccgtagtcttgacaatgacgaggtcttacatgttttactttagactattctagcaggcttcctatttcactctgtatttcaaactttactctgcaaacaatgtaattgttggaggccttcggcttccaaaggtactcaaaaatatgatttaacaatgtttctggagtatgatacatg

SEQ ID NO: 39767 - DNA, 2240 bp, Zea Mays
atccccaatcgaaacggctcgcagctcatctcaatccgatccgatggcccgcgccgccgctcgcctcctccccatcttcctcccatggcggcgtcctcccccgccctgcctcctccgccggggcttcctaaaccctagcagccccagaacctccgcgcgcgtcgacaccctcgttctccctggagacgagcgcttgcccttcccctcgcccccacgcctcccgaaccagctgcgtcctgactacgggagtggcggcggaggcggcgctccctcgaccatcgcggccatcgtcacctcactcggcggaggccctgcagcggtggggatcgtgcggatctccggccccgatgccgtcgccgtcgccgaccgcgttttccgcccagccgggaccaggagggcgtcgacgccgtggcaaccgcgcagccactttgttgagtacggactcgcgctcgacgcggacggcagcgttattgacgaggttttggtggtgccaatgctctccccgaggtcctacacgcgagaggatgttgtggagcttcagtgccatggcaacgatctctgcttgcgccgcgtgctcagggcttgcttggaagctggagccagacttgctgatcctggtgagttcacccttcgtgcattcctgaatgggaggttggacttggcccaagcggagaatgtgtctaggcttatttcagcaaagtcagcagctgcagcggactcagctttggctggcatccagggaggcttttctaccctagtaaagtcattgagatcaaggtgcattgagttgctaacagaaattgaggctcgtttagattttgaagatgagatgcctcctttggacccagtgatgcttgtcagcaaaattaattgtatgaggaaggaggttcaggatgctttggacacttccaattatgataaattgttacaatctggtctacagatagcaataattggccgtccaaatgttggaaagtccagcctccttaatgcttggagtaagcttgcagagtgaaagggctattgttactgaaatagccggaactacacgggatgtagtagaagcaaatgtctcaattaatggtgtacctgttactcttttggacactgctggtataagagaaactgatgatgttgtggaaaaaattggcgtgaaaagatccgaggctgctgcaatgggagctgatcttattgtaatggcaataagtgcagttgatggatggactgatgatgacactaaacttatggagcatgtttcggtaaataggaagtcctcaggttctgcagttccgatggttcttgtaatcaacaaggtagattgtgcgccatttgttcctggagaacagttcaaacaattcagtggcctcttcagaaaacacgtacagacatgtgcagtcaccggtaaaggcatttctgatttggagagcgctgtaatagaggtcaggggtattgagcatgtgccttctgagggacgaaggtggaccgtaaatcagaggcaatttgaacagctgttgaggactaaagaagctttcgcacgtctagagtcatcaatcaacgagcagttaccaatggacttttggactgtggacttgagggaagctgcgcttgcccttgcaacaatcagcggggaggacatctccgaagaagttttgagtagcatattcagcaaattctgcatcgggaaatgatctcgcaagatgctgcatccagtagtttggagcagaagctttttccttgactgagaacaggaaccaacatgctgagtggcacttggttcgcggcatcagaatggtgaacaggcgtgcttgttctctgaggtgccacaaagaacacaagggaggtgaagccctgtccatcctagtgcacaccgtatagatgctaaggatggaaccatcgagttcctgtcttcgacgtcggatacgaatcctgtatactcgtggttgatatgagaaaattttattagacctaattgagaacgcaaacagtttcattcatccgtcttgctgtacgggacgcaacatacccgaattgtgaccaggagacattaaggtgccgtctggttcagacgttgtaacaggaatcgtaatgagatcccttaccggcggtaatgtaatggttattggctgatcccttaccggcggtaatgtaatggttattggctgtaattagattggatagtaccagatactacttgaaagagctcagtcaaataaaggtatcggtctaatccgtttgcgttg

SEQ ID NO: 39768 - DNA, 2231 bp, Zea Mays
atccccaatcgaaacggctcgcagctcatctcaatccgatccgatggcccgcgccgccgctcgcctcctccccatcttcctcccatggcggcgtcctcccccgccctgcctcctccgccggggcttcctaaaccctagcagccccagaacctccgcgcgcgtcgacaccctcgttctccctggagacgagcgcttgcccttcccctcgcccccacgcctcccgaaccagctgcgtcctgactacgggagtggcggcggaggcggcgctccctcgaccatcgcggccatcgtcacctcactcggcggaggccctgcagcggtggggatcgtgcggatctccggccccgatgccgtcgccgtcgccgaccgcgttttccgcccagccgggaccaggagggcgtcgacgccgtggcaaccgcgcagccactttgttgagtacggactcgcgctcgacgcggacggcagcgttattgacgaggttttggtggtgccaatgctctccccgaggtcctacacgcgagaggatgttgtggagcttcagtgccatggcaacgatctctgcttgcgccgcgtgctcagggcttgcttggaagctggagccagacttgctgatcctggtgagttcacccttcgtgcattcctgaatgggaggttggacttggcccaagcggagaatgtgtctaggcttatttcagcaaagtcagcagctgcagcggactcagctttggctggcatccagggaggcttttctaccctagtaaagtcattgagatcaaggtgcattgagttgctaacagaaattgaggctcgtttagattttgaagatgagatgcctcctttggacccagtgatgcttgtcagcaaaattaattgtatgaggaaggaggttcaggatgctttggacacttccaattatgataaattgttacaatctggtctacagatagcaataattggccgtccaaatgttggaaagtccagcctccttaatgcttggagtaagcttgcagagtgaaagggctattgttactgaaatagccggaactacacgggatgtagtagaagcaaatgtctcaattaatggtgtacctgttactcttttggacactgctggtataagagaaactgatgatgttgtggaaaaaattggcgtgaaaagatccgaggctgctgcaatgggagctgatcttattgtaatggcaataagtgcagttgatggatggactgatgatgacactaaacttatggagcatgtttcggtaaataggggttctgcagttccgatggttcttgtaatcaacaaggtagattgtgcgccatttgttcctggagaacagttcaaacaattcagtggcctcttcagaaaacacgtacagacatgtgcagtcaccggtaaaggcatttctgatttggagagcgctgtaatagaggtcaggggtattgagcatgtgccttctgagggacgaaggtggaccgtaaatcagaggcaatttgaacagctgttgaggactaaagaagctttcgcacgtctagagtcatcaatcaacgagcagttaccaatggacttttggactgtggacttgagggaagctgcgcttgcccttgcaacaatcagcggggaggacatctccgaagaagttttgagtagcatattcagcaaattctgcatcgggaaatgatctcgcaagatgctgcatccagtagtttggagcagaagctttttccttgactgagaacaggaaccaacatgctgagtggcacttggttcgcggcatcagaatggtgaacaggcgtgcttgttctctgaggtgccacaaagaacacaagggaggtgaagccctgtccatcctagtgcacaccgtatagatgctaaggatggaaccatcgagttcctgtcttcgacgtcggatacgaatcctgtatactcgtggttgatatgagaaaattttattagacctaattgagaacgcaaacagtttcattcatccgtcttgctgtacgggacgcaacatacccgaattgtgaccaggagacattaaggtgccgtctggttcagacgttgtaacaggaatcgtaatgagatcccttaccggcggtaatgtaatggttattggctgatcccttaccggcggtaatgtaatggttattggctgtaattagattggatagtaccagatactacttgaaagagctcagtcaaataaaggtatcggtctaatccgtttgcgttg

SEQ ID NO: 39769 - DNA, 2164 bp, Zea Mays
atccccaatcgaaacggctcgcagctcatctcaatccgatccgatggcccgcgccgccgctcgcctcctccccatcttcctcccatggcggcgtcctcccccgccctgcctcctccgccggggcttcctaaaccctagcagccccagaacctccgcgcgcgtcgacaccctcgttctccctggagacgagcgcttgcccttcccctcgcccccacgcctcccgaaccagctgcgtcctgactacgggagtggcggcggaggcggcgctccctcgaccatcgcggccatcgtcacctcactcggcggaggccctgcagcggtggggatcgtgcggatctccggccccgatgccgtcgccgtcgccgaccgcgttttccgcccagccgggaccaggagggcgtcgacgccgtggcaaccgcgcagccactttgttgagtacggactcgcgctcgacgcggacggcagcgttattgacgaggttttggtggtgccaatgctctccccgaggtcctacacgcgagaggatgttgtggagcttcagtgccatggcaacgatctctgcttgcgccgcgtgctcagggcttgcttggaagctggagccagacttgctgatcctggtgagttcacccttcgtgcattcctgaatgggaggttggacttggcccaagcggagaatgtgtctaggcttatttcagcaaagtcagcagctgcagcggactcagctttggctggcatccagattttgaagatgagatgcctcctttggacccagtgatgcttgtcagcaaaattaattgtatgaggaaggaggttcaggatgctttggacacttccaattatgataaattgttacaatctggtctacagatagcaataattggccgtccaaatgttggaaagtccagcctccttaatgcttggagtaagcttgcagagtgaaagggctattgttactgaaatagccggaactacacgggatgtagtagaagcaaatgtctcaattaatggtgtacctgttactcttttggacactgctggtataagagaaactgatgatgttgtggaaaaaattggcgtgaaaagatccgaggctgctgcaatgggagctgatcttattgtaatggcaataagtgcagttgatggatggactgatgatgacactaaacttatggagcatgtttcggtaaataggaagtcctcaggttctgcagttccgatggttcttgtaatcaacaaggtagattgtgcgccatttgttcctggagaacagttcaaacaattcagtggcctcttcagaaaacacgtacagacatgtgcagtcaccggtaaaggcatttctgatttggagagcgctgtaatagaggtcaggggtattgagcatgtgccttctgagggacgaaggtggaccgtaaatcagaggcaatttgaacagctgttgaggactaaagaagctttcgcacgtctagagtcatcaatcaacgagcagttaccaatggacttttggactgtggacttgagggaagctgcgcttgcccttgcaacaatcagcggggaggacatctccgaagaagttttgagtagcatattcagcaaattctgcatcgggaaatgatctcgcaagatgctgcatccagtagtttggagcagaagctttttccttgactgagaacaggaaccaacatgctgagtggcacttggttcgcggcatcagaatggtgaacaggcgtgcttgttctctgaggtgccacaaagaacacaagggaggtgaagccctgtccatcctagtgcacaccgtatagatgctaaggatggaaccatcgagttcctgtcttcgacgtcggatacgaatcctgtatactcgtggttgatatgagaaaattttattagacctaattgagaacgcaaacagtttcattcatccgtcttgctgtacgggacgcaacatacccgaattgtgaccaggagacattaaggtgccgtctggttcagacgttgtaacaggaatcgtaatgagatcccttaccggcggtaatgtaatggttattggctgatcccttaccggcggtaatgtaatggttattggctgtaattagattggatagtaccagatactacttgaaagagctcagtcaaataaaggtatcggtctaatccgtttgcgttg

SEQ ID NO: 39770 - DNA, 2230 bp, Zea Mays
atccccaatcgaaacggctcgcagctcatctcaatccgatccgatggcccgcgccgccgctcgcctcctccccatcttcctcccatggcggcgtcctcccccgccctgcctcctccgccggggcttcctaaaccctagcagccccagaacctccgcgcgcgtcgacaccctcgttctccctggagacgagcgcttgcccttcccctcgcccccacgcctcccgaaccagctgcgtcctgactacgggagtggcggcggaggcggcgctccctcgaccatcgcggccatcgtcacctcactcggcggaggccctgcagcggtggggatcgtgcggatctccggccccgatgccgtcgccgtcgccgaccgcgttttccgcccagccgggaccaggagggcgtcgacgccgtggcaaccgcgcagccactttgttgagtacggactcgcgctcgacgcggacggcagcgttattgacgaggttttggtggtgccaatgctctccccgaggtcctacacgcgagaggatgttgtggagcttcagtgccatggcaacgatctctgcttgcgccgcgtgctcagggcttgcttggaagctggagccagacttgctgatcctggtgagttcacccttcgtgcattcctgaatgggaggttggacttggcccaagcggagaatgtgtctaggcttatttcagcaaagtcagcagctgcagcggactcagctttggctggcatccagggaggcttttctaccctagtaaagtcattgagatcaaggtgcattgagttgctaacagaaattgaggctcgtttagattttgaagatgagatgcctcctttggacccagtgatgcttgtcagcaaaattaattgtatgaggaaggaggttcaggatgctttggacacttccaattatgataaattgttacaatctggtctacagatagcaataattggccgtccaaatgttggaaagtccagcctccttaatgcttggagtaagagtgaaagggctattgttactgaaatagccggaactacacgggatgtagtagaagcaaatgtctcaattaatggtgtacctgttactcttttggacactgctggtataagagaaactgatgatgttgtggaaaaaattggcgtgaaaagatccgaggctgctgcaatgggagctgatcttattgtaatggcaataagtgcagttgatggatggactgatgatgacactaaacttatggagcatgtttcggtaaataggtcctcaggttctgcagttccgatggttcttgtaatcaacaaggtagattgtgcgccatttgttcctggagaacagttcaaacaattcagtggcctcttcagaaaacacgtacagacatgtgcagtcaccggtaaaggcatttctgatttggagagcgctgtaatagaggtcaggggtattgagcatgtgccttctgagggacgaaggtggaccgtaaatcagaggcaatttgaacagctgttgaggactaaagaagctttcgcacgtctagagtcatcaatcaacgagcagttaccaatggacttttggactgtggacttgagggaagctgcgcttgcccttgcaacaatcagcggggaggacatctccgaagaagttttgagtagcatattcagcaaattctgcatcgggaaatgatctcgcaagatgctgcatccagtagtttggagcagaagctttttccttgactgagaacaggaaccaacatgctgagtggcacttggttcgcggcatcagaatggtgaacaggcgtgcttgttctctgaggtgccacaaagaacacaagggaggtgaagccctgtccatcctagtgcacaccgtatagatgctaaggatggaaccatcgagttcctgtcttcgacgtcggatacgaatcctgtatactcgtggttgatatgagaaaattttattagacctaattgagaacgcaaacagtttcattcatccgtcttgctgtacgggacgcaacatacccgaattgtgaccaggagacattaaggtgccgtctggttcagacgttgtaacaggaatcgtaatgagatcccttaccggcggtaatgtaatggttattggctgatcccttaccggcggtaatgtaatggttattggctgtaattagattggatagtaccagatactacttgaaagagctcagtcaaataaaggtatcggtctaatccgtttgcgttg

SEQ ID NO: 39771 - DNA, 2107 bp, Zea Mays
atccccaatcgaaacggctcgcagctcatctcaatccgatccgatggcccgcgccgccgctcgcctcctccccatcttcctcccatggcggcgtcctcccccgccctgcctcctccgccggggcttcctaaaccctagcagccccagaacctccgcgcgcgtcgacaccctcgttctccctggagacgagcgcttgcccttcccctcgcccccacgcctcccgaaccagctgcgtcctgactacgggagtggcggcggaggcggcgctccctcgaccatcgcggccatcgtcacctcactcggcggaggccctgcagcggtggggatcgtgcggatctccggccccgatgccgtcgccgtcgccgaccgcgttttccgcccagccgggaccaggagggcgtcgacgccgtggcaaccgcgcagccactttgttgagtacggactcgcgctcgacgcggacggcagcgttattgacgaggttttggtggtgccaatgctctccccgaggtcctacacgcgagaggatgttgtggagcttcagtgccatggcaacgatctctgcttgcgccgcgtgctcagggcttgcttggaagctggagccagacttgctgatcctggtgagttcacccttcgtgcattcctgaatgggaggttggacttggcccaagcggagaatgtgtctaggcttatttcagcaaagtcagcagctgcagcggactcagctttggctggcatccagggaggcttttctaccctagtaaagtcattgagatcaaggtgcattgagttgctaacagaaattgaggctcgtttagattttgaagatgagatgcctcctttggacccagtgatgcttgtcagcaaaattaattgtatgaggaaggaggttcaggatgctttggacacttccaattatgataaattgttacaatctggtctacagatagcaataattggccgtccaaatgttggaaagtccagcctccttaatgcttggagtaagagtgaaagggctattgttactgaaatagccggaactacacgggatgtagtagaagcaaatgtctcaattaatggtgtacctgttactcttttggacactgctggtataagagaaactgatgatgttgtggaaaaaattggcgtgaaaagatccgaggctgctgcaatgggagctgatcttattgtaatggcaataagtgcagttgatggatggactgatgatgacactaaacttatggagcatgtttcggtaaataggaagtcctcaggttctgcagttccgatggttcttgtaatcaacaaggtagattgtgcgccatttgttcctggagaacagttcaaacaattcagtggcctcttcagaaaacacgtacagacatgtgcagtcaccggtaaaggcatttctgatttggagagcgctgtaatagaggtcaggggtattgagcatgtgccttctgagggacgaaggtggaccgtaaatcagaggcaatttgaacagctgttgaggactaaagaagctttcgcacgtctagagtcatcaatcaacgagcagttaccaatggacttttggactgtggacttgagggaagctgcgcttgcccttgcaacaatcagcggggaggacatctccgaagaagttttgagtagcatattcagcaaattctgcatcgggaaatgatctcgcaagatgctgcatccagtagtttggagcagaagctttttccttgactgagaacaggaaccaacatgctgagtggcacttggttcgcggcatcagaatggtgaacaggcgtgcttgttctctgaggtgccacaaagaacacaagggaggtgaagccctgtccatcctagtgcacaccgtatagatgctaaggatggaaccatcgagttcctgtcttcgacgtcggatacgaatcctgtatactcgtggttgatatgagaaaattttattagacctaattgagaacgcaaacagtttcattcatccgtcttgctgtacgggacgcaacatacccgaattgtgaccaggagacattaaggtgccgtctggttcagacgttgtaacaggaatcgtaatgagatcccttaccggcggtaaaaagaa

SEQ ID NO: 39772 - DNA, 321 bp, Zea Mays
cactcacatcccggacacctcttcctccccttcttcacccactgccactggcctggcctctcacgggccacatagccatggcgacgaccatctctacgcacatctacaccacctcttctagcgctccctcccaggccccagctgctgcaagtaggagtacgtagtaagcagccgtacataggtgataggttcagtcaatagttcagagagagggtagaggtacgtaggcatatatagaactatacaagaacggtagagacagacagggcaggggagatgatgctggggaagagatccgggcgcccgtcgcctacggcgcga

SEQ ID NO: 39773 - DNA, 3234 bp, Zea Mays
cctggaaacaccttggagcaccagttacccaccctaccttcaaaaacaatcgcctgaacctgaacaaacgatctcacgagtgttctcataggaggaaagcgagagaagcaagcaagcgagaagctggagcagcgaacaccaagaattcggtgccgaagcggaggcgaaggggaggaggacgaagggaagggcagtgaccgaagagcgagcgcgccacgtttgatctgggtatattatgagtgttccaagactaatgcatcatctttgatggtgtaccaaaaaaatggttgttaacatcaaggcctcaacgagctagcctgagacaagaacactggaaccatggtttcaaaatcatattcaaatctgctagacatgaccccaggagatgggtttgactttcgacgaccttttaagtctcttcctcgtgttgtaacttctcctagcattatatctgaccatgattgggattccataagtgatggtgattcagttggttcagcattttctatcgagaggaaaataattgtcgccaacttccttccgctgaattgtacaagagatgaaaccggggaactgtccttctcattggatcatgattcactactcatgcaacttaaagatgggttttcaaatgagactgatgctgtgtatgtaggcagtttgaaggttcatgtagatcccagggagcaggaccaagttgcacagaagcttctcagagaatatcgatgcatacctacttttctcccatctgatctgcagcagcagttctatcatggcttctgtaaacaacagttatggccactttttcattatatgcttccaatttgccttgacaagggtgagttgtttgatcgcaccctgtttcaagcctatgtccgagccaacaaactttttgcagataaagttatggaagcaatcaatacagatgatgattatgtttgggttcatgattatcatctcatgctgctccctacattcttgaggaagaggttacaccgaataaagattggtttcttccttcacagcccttttccctcttcagaaatatacaggactctgcctgtaagggatgaaatcctgaagtcactgcttaatgctgatctgattggtttccaaacatttgactatgcccgccacttcctatcttgctgtagcagattgctaggcctgcattatgagtcaaaacgtggttacattggaatagagtattttggccgaacagtgagtttgaagatcctttctgtgggtgtccatgttggtcggcttgaatctgtcttaaagttgcctgctacagttagtaaggttgaagaaattgaacaaaggtataagggcaagatactcatgttaggtgtagatgacatggacatcttcaaaggaataagtctgaaattgcttgcactggagcttcttctggacagaaacccaaagcttagagagaaggttgtccttgtacagatcatcaatcccgcaagaagcacggggaaggatgtgcaggaagctatcacagaagctgtctctgtggctgaaagggttaacacaaagtatggttcttcaagttacaagcctgtcgtcctaattgataatcgcataccgttttatgaaaaggttgcattctatgccgcgtctgactgttgtattgtaaacgctgtgagggatggcatgaacttagtaccatatgagtatactgtttgccgacagggaaacgaggagatcgacagagtcagaggccttgacaaagacacccatcacacaagcacacttattgtttcggagtttgtgggttgctccccatctctgagtggtgctttcagggtaaatccttggagcgtcgatgatgtggcggatgccttgtgccgcgcaactgatctatctgaatctgagaaacggttgcggcacgaaaagcattatcgctatgtcagtactcatgatgttgcttactgggcgcacagctttgctcaagatctggaaagagcatgcagagaccattacagccgaaggtgttgggctattgggtttggcctgaatttcagagtcattgctctttctcctggcttcagaaagctttcttcggagcactttgtttcttcttataacagggcttctagaagggcaatatttctcgactacgacggcacacttgtgccccagtcgtcaatcaacaaggctccaagtgaagaagtcatctccattcttaacaccttgtgtaatgatccaaagaacgttgtgtttatcgtaagtggacgaggacgtgattccctcgacgagtggttttctccatgcgagaagctccgtctagccgcagaacatggctattttatcaggtggagcaaggaagctgcatgggagtcgagctattcgagtccgcggcaagaatggaagcacatcgctgaacctgtcatgcagaccatgatttcggttccttccaagcgaaggagctaaaggatcatcttgagagggtgctatcaaatgagcccgttgttgtgaagtgtggccattatatcgtagaagtaaagccgcagggagttagcaagggtcgtgctgtcgacaagctgattcaagcactggccaacaacaacgggaaggcacaggatttcctgatgtgcgtcggcaacgacagatctgacgaggacatgttcgaatgcatcaacggtatggcctccaacgatgtctcatcgaccacagtaccggaggtgtttgcctgttcggtcggccagaagcccagcaaagcaaaatactatgtggacgacaccagcgaagtgatcagattgctcagggatgcaacccgcttctcatcgtcgcagcggagggaggacgtcaacgccagccgcgggcgtgtgaccttcagagacgcactcgattacgtggactaggcaccagcagcaattcttagttactcgaaatgattagctgcggagcttgtaaattccgctgtcttctgtctgccaatggttttcgttctagagaattgtagtgtagccgacatcgacatggatcgtcgtcaccgatacacgaacagcggaaatatgagttgaagttcgccgtttcgaggctcagaattggtacatttatagaattgtagtgtaggcaattttttggtagggaatagtaattggtacatttatagaattgtcaattgtttttcttctaccgctgataatactatagcttcgctaaattaatattattgtttcacttagcgatgaaatatatttagcaccactgatattgatcaac

SEQ ID NO: 39774 - DNA, 3440 bp, Zea Mays
tggaaacaccttggagcaccagttacccaccctaccttcaaaaacaatcgcctgaacctgaacaaacgatctcacgaggtgcagagcaatttctcgcctttctgtctcgacatttcttgcaacctcgctcgcgtccccgtgtctatcagcccctctctcccaaccccgggtctgtagtgttctcataggaggaaagcgagagaagcaagcaagcgagaagctggagcagcgaacaccaagaattcggtgccgaagcggaggcgaaggggaggaggacgaagggaagggcagtgaccgaagagcgagcgcgccacgtttgatctgggtatattatgagtgttccaagactaatgcatcatctttgatggtgtaccaaaaaaatggttgttaacatcaaggcctcaacgagctagcctgagacaagaacactggaaccatggtttcaaaatcatattcaaatctgctagacatgaccccaggagatgggtttgactttcgacgaccttttaagtctcttcctcgtgttgtaacttctcctagcattatatctgaccatgattgggattccataagtgatggtgattcagttggttcagcattttctatcgagaggaaaataattgtcgccaacttccttccgctgaattgtacaagagatgaaaccggggaactgtccttctcattggatcatgattcactactcatgcaacttaaagatgggttttcaaatgagactgatgctgtgtatgtaggcagtttgaaggttcatgtagatcccagggagcaggaccaagttgcacagaagcttctcagagaatatcgatgcatacctacttttctcccatctgatctgcagcagcagttctatcatggcttctgtaaacaacagttatggccactttttcattatatgcttccaatttgccttgacaagggtgagttgtttgatcgcaccctgtttcaagcctatgtccgagccaacaaactttttgcagataaagttatggaagcaatcaatacagatgatgattatgtttgggttcatgattatcatctcatgctgctccctacattcttgaggaagaggttacaccgaataaagattggtttcttccttcacagcccttttccctcttcagaaatatacaggactctgcctgtaagggatgaaatcctgaagtcactgcttaatgctgatctgattggtttccaaacatttgactatgcccgccacttcctatcttgctgtagcagattgctaggcctgcattatgagtcaaaacgtggttacattggaatagagtattttggccgaacagtgagtttgaagatcctttctgtgggtgtccatgttggtcggcttgaatctgtcttaaagttgcctgctacagttagtaaggttgaagaaattgaacaaaggtataagggcaagatactcatgttaggtgtagatgacatggacatcttcaaaggaataagtctgaaattgcttgcactggagcttcttctggacagaaacccaaagcttagagagaaggttgtccttgtacagatcatcaatcccgcaagaagcacggggaaggatgtgcaggaagctatcacagaagctgtctctgtggctgaaagggttaacacaaagtatggttcttcaagttacaagcctgtcgtcctaattgataatcgcataccgttttatgaaaaggttgcattctatgccgcgtctgactgttgtattgtaaacgctgtgagggatggcatgaacttagtaccatatgagtatactgtttgccgacagggaaacgaggagatcgacagagtcagaggccttgacaaagacacccatcacacaagcacacttattgtttcggagtttgtgggttgctccccatctctgagtggtgctttcagggtaaatccttggagcgtcgatgatgtggcggatgccttgtgccgcgcaactgatctatctgaatctgagaaacggttgcggcacgaaaagcattatcgctatgtcagtactcatgatgttgcttactgggcgcacagctttgctcaagatctggaaagagcatgcagagaccattacagccgaaggtgttgggctattgggtttggcctgaatttcagagtcattgctctttctcctggcttcagaaagctttcttcggagcactttgtttcttcttataacagggcttctagaagggcaatatttctcgactacgacggcacacttgtgccccagtcgtcaatcaacaaggctccaagtgaagaagtcatctccattcttaacaccttgtgtaatgatccaaagaacgttgtgtttatcgtaagtggacgaggacgtgattccctcgacgagtggttttctccatgcgagaagctccgtctagccgcagaacatggctattttatcaggttgtgatgaactacgcatgcatgcgttttcaggtggagcaaggaagctgcatgggagtcgagctattcgagtccgcggcaagaatggaagcacatcgctgaacctgtcatgcaggtatacaccgagacaacagacggatcttcagtcgagtcgaaggagagcgctctagtgtggcactatttggatgcagaccatgatttcggttccttccaagcgaaggagctaaaggatcatcttgagagggtgctatcaaatgagcccgttgttgtgaagtgtggccattatatcgtagaagtaaagccgcagggagttagcaagggtcgtgctgtcgacaagctgattcaagcactggccaacaacaacgggaaggcacaggatttcctgatgtgcgtcggcaacgacagatctgacgaggacatgttcgaatgcatcaacggtatggcctccaacgatgtctcatcgaccacagtaccggaggtgtttgcctgttcggtcggccagaagcccagcaaagcaaaatactatgtggacgacaccagcgaagtgatcagattgctcagggatgcaacccgcttctcatcgtcgcagcggagggaggacgtcaacgccagccgcgggcgtgtgaccttcagagacgcactcgattacgtggactaggcaccagcagcaattcttagttactcgaaatgattagctgcggagcttgtaaattccgctgtcttctgtctgccaatggttttcgttctagagaattgtagtgtagccgacatcgacatggatcgtcgtcaccgatacacgaacagcggaaatatgagttgaagttcgccgtttcgaggctcagaattggtacatttatagaattgtagtgtaggcaattttttggtagggaatagtaattggtacatttatagaattgtcaattgtttttcttctaccgctgataatactatagcttcgctaaattaatattattgtttcacttagcgatgaaatatatttagcaccactgatattgatcaac

SEQ ID NO: 39775 - DNA, 3129 bp, Zea Mays
ctttttgtttcctcgcaccaaggacgggcgtgaacgcgtacagggatgtatattatgagtgttccaagactaatgcatcatctttgatggtgtaccaaaaaaatggttgttaacatcaaggcctcaacgagctagcctgagacaagaacactggaaccatggtttcaaaatcatattcaaatctgctagacatgaccccaggagatgggtttgactttcgacgaccttttaagtctcttcctcgtgttgtaacttctcctagcattatatctgaccatgattgggattccataagtgatggtgattcagttggttcagcattttctatcgagaggaaaataattgtcgccaacttccttccgctgaattgtacaagagatgaaaccggggaactgtccttctcattggatcatgattcactactcatgcaacttaaagatgggttttcaaatgagactgatgctgtgtatgtaggcagtttgaaggttcatgtagatcccagggagcaggaccaagttgcacagaagcttctcagagaatatcgatgcatacctacttttctcccatctgatctgcagcagcagttctatcatggcttctgtaaacaacagttatggccactttttcattatatgcttccaatttgccttgacaagggtgagttgtttgatcgcaccctgtttcaagcctatgtccgagccaacaaactttttgcagataaagttatggaagcaatcaatacagatgatgattatgtttgggttcatgattatcatctcatgctgctccctacattcttgaggaagaggttacaccgaataaagattggtttcttccttcacagcccttttccctcttcagaaatatacaggactctgcctgtaagggatgaaatcctgaagtcactgcttaatgctgatctgattggtttccaaacatttgactatgcccgccacttcctatcttgctgtagcagattgctaggcctgcattatgagtcaaaacgtggttacattggaatagagtattttggccgaacagtgagtttgaagatcctttctgtgggtgtccatgttggtcggcttgaatctgtcttaaagttgcctgctacagttagtaaggttgaagaaattgaacaaaggtataagggcaagatactcatgttaggtgtagatgacatggacatcttcaaaggaataagtctgaaattgcttgcactggagcttcttctggacagaaacccaaagcttagagagaaggttgtccttgtacagatcatcaatcccgcaagaagcacggggaaggatgtgcaggaagctatcacagaagctgtctctgtggctgaaagggttaacacaaagtatggttcttcaagttacaagcctgtcgtcctaattgataatcgcataccgttttatgaaaaggttgcattctatgccgcgtctgactgttgtattgtaaacgctgtgagggatggcatgaacttagtaccatatgagtatactgtttgccgacagggaaacgaggagatcgacagagtcagaggccttgacaaagacacccatcacacaagcacacttattgtttcggagtttgtgggttgctccccatctctgagtggtgctttcagggtaaatccttggagcgtcgatgatgtggcggatgccttgtgccgcgcaactgatctatctgaatctgagaaacggttgcggcacgaaaagcattatcgctatgtcagtactcatgatgttgcttactgggcgcacagctttgctcaagatctggaaagagcatgcagagaccattacagccgaaggtgttgggctattgggtttggcctgaatttcagagtcattgctctttctcctggcttcagaaagctttcttcggagcactttgtttcttcttataacagggcttctagaagggcaatatttctcgactacgacggcacacttgtgccccagtcgtcaatcaacaaggctccaagtgaagaagtcatctccattcttaacaccttgtgtaatgatccaaagaacgttgtgtttatcgtaagtggacgaggacgtgattccctcgacgagtggttttctccatgcgagaagctccgtctagccgcagaacatggctattttatcaggtggagcaaggaagctgcatgggagtcgagctattcgagtccgcggcaagaatggaagcacatcgctgaacctgtcatgcaggtatacaccgagacaacagacggatcttcagtcgagtcgaaggagagcgctctagtgtggcactatttggatgcagaccatgatttcggttccttccaagcgaaggagctaaaggatcatcttgagagggtgctatcaaatgagcccgttgttgtgaagtgtggccattatatcgtagaagtaaagccgcagggagttagcaagggtcgtgctgtcgacaagctgattcaagcactggccaacaacaacgggaaggcacaggatttcctgatgtgcgtcggcaacgacagatctgacgaggacatgttcgaatgcatcaacggtatggcctccaacgatgtctcatcgaccacagtaccggaggtgtttgcctgttcggtcggccagaagcccagcaaagcaaaatactatgtggacgacaccagcgaagtgatcagattgctcagggatgcaacccgcttctcatcgtcgcagcggagggaggacgtcaacgccagccgcgggcgtgtgaccttcagagacgcactcgattacgtggactaggcaccagcagcaattcttagttactcgaaatgattagctgcggagcttgtaaattccgctgtcttctgtctgccaatggttttcgttctagagaattgtagtgtagccgacatcgacatggatcgtcgtcaccgatacacgaacagcggaaatatgagttgaagttcgccgtttcgaggctcagaattggtacatttatagaattgtagtgtaggcaattttttggtagggaatagtaattggtacatttatagaattgtcaattgtttttcttctaccgctgataatactatagcttcgctaaattaatattattgtttcacttagcgatgaaatatatttagcaccactgatattgatcaac

SEQ ID NO: 39776 - DNA, 963 bp, Zea Mays
ggtttactggtcttagtgccttgatatgtcgaggacagcatggatcccaggtccaacatatagatggaatccggatcgctggacttccttttgatgtaagctcttatgcttaaacaaagttcactgttacccacatttttctgattaatatttagttattttcatagtctatatttcacatcactacctgactcattgcttcttatcagtatgttctgatatcttgatgttgattttttgctcctcaaatttgtcacacgctattcttgtagctatatacggcattcaataattagaaccagaatgaaagctttatccatgttggagcatttggttgagcctgaccatcgtcgagttgtggaattaaacttccgcatttgtttggtttatgaactagtttccaagatcagagatgcaatttcatactgtgcaaaagcaatttcgctatgcaagtcacgcatacagaacctgaaaagttccaaggatgctttgttggctggtatagatggtggtgatgcatctgctgctgaaggaggctcagaaaattctaccgttgaaaaagagctagaacagcttactagcatattgcctgatcttgagaagaagcttgaggacctgtctgaagcaaacccaagcgctgacatggatgagatggtgaaggcaattgcgtccatggtaattgaagtgatgccaaaagctgcatcttttacttcttcccagatagcaacctcaagcaatggattcgactcctcggttatgtctacggcagcgacaactggaagctctggaagcactgtgactgaccttggggttgtaggcagaggcgtcaaacgagctagcatcaagccgatctctgtcgaacctgctgctaagaaacctgcacttgattcaccatctctccaaggtgacaacaacatcaactctgaggttgtccctgcaacacagactgatgaatccagctaa

SEQ ID NO: 39777 - DNA, 2147 bp, Zea Mays
caaacccaccgttacttcagcaaccgccgcggtaacctgaaaaattttaaacaaggaagggaaacacaaaaggtggaagggaaaagggtttgatttccccactcctgtagtgccgccgccgtgttccggtgatccgccatccgcctccgttcgccgtcccccgcttgtcccgttagtggttttcgtccttctggttcactcgccggcggactacatgctgatcgacgggatgaggtccgtggtcgccacggtgagcggttaccacggcgacgagcggcataggcttgtaaacctcattgcggagaccggtgctagctacgtaggatcaatgagcagatccatcacccacctggtgtgctggaggctcgaggggaagaagtacgacatcgcgaggaggctggggacacgcgttgtgagccactggtggttcacggagtgtctcagggaggggaggcgcctcccagaggacccgtactttatgtggtgaagaagcagggccagtcccagagctgccttctcgttcccgtaaacaagtcaagaaaaatgccatcatggaggacagagttttccaagagttacctgatgatttctgggacactcctcgagctagagccagctataaagttaagcttgatgattctgattctgattttgagtctgccctgctagaacaaaaaaatcattcaccagacgttaagaaaaggagaaagcgtatgaagcatgtcaatacatcaacggacagagatgtcttaaacctgcaggataatgtgtcaagtgtcatggcaagacagtgccttcatatctcaagtcatagaacgtcccagagcacatcaaagcataagggaaacttgtcacacttgcttcacaatgaagttcctatccggatgggagaaaggaacaatcttactgaaaactctgaaaatgatagtttgtctgacagcttcagtgaacctcagacttcagatactctgtgtatagaagctcaaagaaaatcaagtgcaccatcatcatcacttagacaaagtaccctagattctctatatgaatttggtgaaactagtaggcatgaaccagcaggaagaaaaaaactagacaacgttgaattaagggagacttcaagaagcttacttccatttgatttgtcaggacaggaaccagctttctgtactcaggagcaagtagataaatgtagccttggcactctagctgataaaaaacccatggaaaaatcatctaatatggaaaggcaaccagaattatcatgtgtcatatgctggacagatttttcttctacaaggggcatcttaccatgtggacatcgattctgttattcatgcattcaaggatgggtggattgtctggcttctaggggtaaagtctcaacatgtcccctttgcaaagccagtttcacatgtatcagtaaggtggacgaggcaggcacctcagatcagaagatatactcgcagaccattccctgtgaagcttctactgatgtttttgtgtcgggcaatgtaggctacgatttctctcgaccaacgtctgggcaaggagcatgctaccagtgtcacttccgtgagcccgaggagcttcttctaagctgccacgtctgcagatcacagtgggtacactcgtactgccttgatcctccgctgactccttggacatgcatgcactgcagagacctgcgtatgctgtttcaccggtatcgttagccccagttatggtactcatgtcaaaccttaattgttggaggaaattgtatcagaaggcatgaacaccatttgattactgagatgtaactgccaagttccatttgatgtctatactctaacattgattactgagggtcgatgtgagcttttttatctcagtatcttctctgcataaagaactggaaactagtgtcaaatgttgcctcccaaaaatgtgacctcccgaaaacggttcgcgcgtccgcccgagagatgggctggcagggggctcggcccagcgcggggaaaaagtgaagggaggattgggcccggtacaggggtaaggagcagttccctttattctttacttatttatgagactaggtcagtacccgtgcgttgcaacgggaacatataataccatgataacttatatacaaaatgtgtcttatattg

SEQ ID NO: 39778 - DNA, 3123 bp, Zea Mays
caaacccaccgttacttcagcaaccgccgcggtaacctgaaaaattttaaacaaggaagggaaacacaaaaggtggaagggaaaagggtttgatttccccactcctgtagtgccgccgccgtgttccggtgatccgccatccgcctccgttcgccgtcccccgcttgtcccgttagtggttttcgtccttctggttcactcgccggcggactacatgctgatcgacgggatgaggtccgtggtcgccacggtgagcggttaccacggcgacgagcggcataggcttgtaaacctcattgcggagaccggtgctagctacgtaggatcaatgagcagatccatcacccacctggtgtgctggaggctcgaggggaagaagtacgacatcgcgaggaggctggggacacgcgttgtgagccactggtggttcacggagtgtctcagggaggggaggcgcctcccagaggacccgtactttatggtaagtggtgaagaagcagggccagtcccagagctgccttctcgttcccgtaaacaagtcaagaaaaatgccatcatggaggacagagttttccaagagttacctgatgatttctgggacactcctcgagctagagccagctataaagttaagcttgatgattctgattctgattttgagtctgccctgctagaacaagtaagaatcataaccttcattccattttgttcctgcatgcagacccatgatgttgtattgtctaatccagtgtgcaattcatcatgtttcttatatcttgatgattctgattttgattttaagtctaccctgcgagaataagtaagaatcataaccttaatttcattttgttcctgcatgcagacccatcacccatgatgttgtattgtctaatccattgtgcaattcatcatatttcttatatctctattctactactttaatgctatgtttagcatgtgtaatatttcccaatcatggttcagctagaatctgttgcagtcgaatatgagggcaacagttattgtatattagaatatgaccttccatctatgcataaagcatggctgccagctggttgagttgataagtctgattatatctgataattggtaatttatcaggcgataaatttaaatttatggatgaaatttgactgaaaatggggaaaacatgagtttgaccatttttttcaaatcaagtatgatatattggtatgtttatagtttataggacctcatcgatatcaccaacactttgcaacgtactgctgagattctggtagaactaacaccacataatctaagctgaatataaagatatgtagctctcttgtgtgtccgataaaagtatgtatttcttcaatttgaattgtcaaactttcatgttatacctaaggcctaagcataaaactatattcccaaaaaatctcgaaagtgcgctggacctacatttgttcttcattttgaattatggcattcttaatacttctcttaccctttaatagtgtcatgtagcagttgataatcaaatgtgtgttcaccgtgaacttacttttccaaaaataacgatgcatattgtactatcaattttctgatggagcttggttgacctgctgacttcatgattctgtgggtgatgggaattctaagaaaaatcattcaccagacgttaagaaaaggagaaagcgtatgaagcatgtcaatacatcaacggacagagatgtcttaaacctgcaggataatgtgtcaagtgtcatggcaagacagtgccttcatatctcaagtcatagaacgtcccagagcacatcaaagcataagggaaacttgtcacacttgcttcacaatgaagttcctatccggatgggagaaaggaacaatcttactgaaaactctgaaaatgatagtttgtctgacagcttcagtgaacctcagacttcagatactctgtgtatagaagctcaaagaaaatcaagtgcaccatcatcatcacttagacaaagtaccctagattctctatatgaatttggtgaaactagtaggcatgaaccagcaggaagaaaaaaactagacaacgttgaattaagggagacttcaagaagcttacttccatttgatttgtcaggacaggaaccagctttctgtactcaggagcaagtagataaatgtagccttggcactctagctgataaaaaacccatggaaaaatcatctaatatggaaaggcaaccagaattatcatgtgtcatatgctggacagatttttcttctacaaggggcatcttaccatgtggacatcgattctgttattcatgcattcaaggatgggtggattgtctggcttctaggggtaaagtctcaacatgtcccctttgcaaagccagtttcacatgtatcagtaaggtggacgaggcaggcacctcagatcagaagatatactcgcagaccattccctgtgaagcttctactgatgtttttgtgtcgggcaatgtaggctacgatttctctcgaccaacgtctgggcaaggagcatgctaccagtgtcacttccgtgagcccgaggagcttcttctaagctgccacgtctgcagatcacagtgggtacactcgtactgccttgatcctccgctgactccttggacatgcatgcactgcagagacctgcgtatgctgtttcaccggtatcgttagccccagttatggtactcatgtcaaaccttaattgttggaggaaattgtatcagaaggcatgaacaccatttgattactgagatgtaactgccaagttccatttgatgtctatactctaacattgattactgagggtcgatgtgagcttttttatctcagtatcttctctgcataaagaactggaaactagtgtcaaatgttgcctcccaaaaatgtgacctcccgaaaacggttcgcgcgtccgcccgagagatgggctggcagggggctcggcccagcgcggggaaaaagtgaagggaggattgggcccggtacaggggtaaggagcagttccctttattctttacttatttatgagactaggtcagtacccgtgcgttgcaacgggaacatataataccatgataacttatatacaaaatgtgtcttatattg

SEQ ID NO: 39779 - DNA, 1396 bp, Zea Mays
caaacccaccgttacttcagcaaccgccgcggtaacctgaaaaattttaaacaaggaagggaaacacaaaaggtggaagggaaaagggtttgatttccccactcctgtagtgccgccgccgtgttccggtgatccgccatccgcctccgttcgccgtcccccgcttgtcccgttagtggttttcgtccttctggttcactcgccggcggactacatgctgatcgacgggatgaggtccgtggtcgccacggtgagcggttaccacggcgacgagcggcataggcttgtaaacctcattgcggagaccggtgctagctacgtaggatcaatgagcagatccatcacccacctggtgtgctggaggctcgaggggaagaagtacgacatcgcgaggaggctggggacacgcgttgtgagccactggtggttcacggagtgtctcagggaggggaggcgcctcccagaggacccgtactttatggtaagtggtgaagaagcagggccagtcccagagctgccttctcgttcccgtaaacaagtcaagaaaaatgccatcatggaggacagagttttccaagagttacctgatgatttctgggacactcctcgagctagagccagctataaagttaagcttgatgattctgattctgattttgagtctgccctgctagaacaaaaaaatcattcaccagacgttaagaaaaggagaaagcgtatgaagcatgtcaatacatcaacggtttttgtgtcgggcaatgtaggctacgatttctctcgaccaacgtctgggcaaggagcatgctaccagtgtcacttccgtgagcccgaggagcttcttctaagctgccacgtctgcagatcacagtgggtacactcgtactgccttgatcctccgctgactccttggacatgcatgcactgcagagacctgcgtatgctgtttcaccggtatcgttagccccagttatggtactcatgtcaaaccttaattgttggaggaaattgtatcagaaggcatgaacaccatttgattactgagatgtaactgccaagttccatttgatgtctatactctaacattgattactgagggtcgatgtgagcttttttatctcagtatcttctctgcataaagaactggaaactagtgtcaaatgttgcctcccaaaaatgtgacctcccgaaaacggttcgcgcgtccgcccgagagatgggctggcagggggctcggcccagcgcggggaaaaagtgaagggaggattgggcccggtacaggggtaaggagcagttccctttattctttacttatttatgagactaggtcagtacccgtgcgttgcaacgggaacatataataccatgataacttatatacaaaatgtgtcttatattg

SEQ ID NO: 39780 - DNA, 1600 bp, Zea Mays
cttcattccattttgttcctgcatgcagacccatgatgttgtattgtctaatccagtgtgcaattcatcatgtttcttatatcttgatgattctgattttgattttaagtctaccctgcgagaataaaaaaatcattcaccagacgttaagaaaaggagaaagcgtatgaagcatgtcaatacatcaacggacagagatgtcttaaacctgcaggataatgtgtcaagtgtcatggcaagacagtgccttcatatctcaagtcatagaacgtcccagagcacatcaaagcataagggaaacttgtcacacttgcttcacaatgaagttcctatccggatgggagaaaggaacaatcttactgaaaactctgaaaatgatagtttgtctgacagcttcagtgaacctcagacttcagatactctgtgtatagaagctcaaagaaaatcaagtgcaccatcatcatcacttagacaaagtaccctagattctctatatgaatttggtgaaactagtaggcatgaaccagcaggaagaaaaaaactagacaacgttgaattaagggagacttcaagaagcttacttccatttgatttgtcaggacaggaaccagctttctgtactcaggagcaagtagataaatgtagccttggcactctagctgataaaaaacccatggaaaaatcatctaatatggaaaggcaaccagaattatcatgtgtcatatgctggacagatttttcttctacaaggggcatcttaccatgtggacatcgattctgttattcatgcattcaaggatgggtggattgtctggcttctaggggtaaagtctcaacatgtcccctttgcaaagccagtttcacatgtatcagtaaggtggacgaggcaggcacctcagatcagaagatatactcgcagaccattccctgtgaagcttctactgatgtttttgtgtcgggcaatgtaggctacgatttctctcgaccaacgtctgggcaaggagcatgctaccagtgtcacttccgtgagcccgaggagcttcttctaagctgccacgtctgcagatcacagtgggtacactcgtactgccttgatcctccgctgactccttggacatgcatgcactgcagagacctgcgtatgctgtttcaccggtatcgttagccccagttatggtactcatgtcaaaccttaattgttggaggaaattgtatcagaaggcatgaacaccatttgattactgagatgtaactgccaagttccatttgatgtctatactctaacattgattactgagggtcgatgtgagcttttttatctcagtatcttctctgcataaagaactggaaactagtgtcaaatgttgcctcccaaaaatgtgacctcccgaaaacggttcgcgcgtccgcccgagagatgggctggcagggggctcggcccagcgcggggaaaaagtgaagggaggattgggcccggtacaggggtaaggagcagttccctttattctttacttatttatgagactaggtcagtacccgtgcgttgcaacgggaacatataataccatgataacttatatacaaaatgtgtcttatattg

SEQ ID NO: 39781 - DNA, 1045 bp, Zea Mays
gtcacgcacgcaattactcgacgccgctgtttcaaaaaaaaaggagaacggacagcgtcgccgccggtttctcctctgcagtgcctctttgccttctgacgatacggatgcctactgctgccgtggttgccagcctcctcttctccacactcaagtgcgcatgtctgcctcttctctattaaacagcgatagcgtcatctactctccctcttcatcgtcgtgggctaagccattaatagccgcggctgtttcttcgagtaggtaacgctgttcttcaatctgcatcaatggagtattaaatctgcccgcaaaccactctcctccctcgcctataaagcttgagccgtgcttgcttcctacctcctactcccttcagcttcctccagccgatccatttcttctctgctttgttgcctgtgcgcgtgcctgctctttctcctacccgtaaagtgctctcccgtctgctcaatttcatactagtggaggacaggtgaaccataaggcatgcggcacccaaatcgcctcctctccaacgccaggtctccattccctcgccgattctacctccttgaaatcgtcgttcgtcgtcgccattcgtcgacatcccccgccatgctgaagtcgtgacgccatccttgagttccttcctcatgcagacgctgcgaagatatctattttctatacgcgatctgaagttgagaatcaagatatactccgtggaagaacctcgagttttcaataagcaaggcaagtggacttctccctctgcatactctgtttgatcccaaacaatacatttaataaagtttattcttttggatatatatgcataatttgacgggttacctatttagataaccttttcaaccttactccttgtttaacctgggattatgatataatcaagtagctatgctattgctacaacttaactttatgcagtcactcccgcttatgatattaatgttccaaaatggtaagtttactttattgttgttaacccgatggttaaacaagattattgcatattaattggaacatggag

SEQ ID NO: 39782 - DNA, 7214 bp, Zea Mays
gtcacgcacgcaattactcgacgccgctgtttcaaaaaaaaaggagaacggacagcgtcgccgccggtttctcctctgcagtgcctctttgccttctgacgatacggatgcctactgctgccgtggttgccagcctcctcttctccacactcaagtgcgcatgtctgcctcttctctattaaacagcgatagcgtcatctactctccctcttcatcgtcgtgggctaagccattaatagccgcggctgtttcttcgagtaggtaacgctgttcttcaatctgcatcaatggagtattaaatctgcccgcaaaccactctcctccctcgcctataaagcttgagccgtgcttgcttcctacctcctactcccttcagcttcctccagccgatccatttcttctctgctttgttgcctgtgcgcgtgcctgctctttctcctacccgtaaagtgctctcccgtctgctcaatttcatactagtggaggacaggtgaaccataaggcatgcggcacccaaatcgcctcctctccaacgccaggtctccattccctcgccgattctacctccttgaaatcgtcgttcgtcgtcgccattcgtcgacatcccccgccatgctgaagtcgtgacgccatccttgagttccttcctcatgcagacgctgcgaagatatctattttctatacgcgatctgaaggtagaagaaagatccaatttatttactcgttatcacccattgtctacaattaatcgtgttttagctgtatgacatttttcagtttgtataaaaaagattaattagagttcaaataattaggttcttgtattgctaacttcataaatagcgtttgcaacaaattacatattttcgtaattttaattatgttggttataattgatctacgtatagttttctaaataagaaattaaaaagaattatagcctttatgtttttaaccaaaaataaaagatagatatttataatgaaatctatatacaaaatgtaaatttattagctacccctcttagtctatctttatttatgtgtaggtccctattatagtttattattaaatgtatattagggatccgaataatagaaatagctttgttagtttataattatgtgataagcattttaattagtgtttccaatagtttacgtattttcactagaattacgattgttacaaaagaaatattaaaatgattttttcaatagatatcatgtttttataatttaacaatgttcattatatgtgtttaagtataactttcttaagtagaaatttaaaataaaatggagaccatatgtttctcaataacattaaaatataattgtaaatctttttccataaaagttgatttagattttatactcaagtattttatatttaaatatgtgtacgttagataataatttctaataatattaatatagcttaattcatccacataactaaaatgaaaaattaaatattgttgaacataattttctttctaatgaattagatcatttgttcctacaatagaattaaaaataattaatagattaattatcatttatcataatttattaatcaaacctatagtcaatttgttcttaactagatttatggcatgattaatgatttcatagaatttagtccaccttatatacaaatcacttagttttttccaaaggataaaataaagcaataagagtttaaattcttttataacttaaaatattacattatatattgacttcgaatatactaatataggctatgtgttttctaatgaaattaaaagatagttatttgtttattatcttttatgtgaaaatccacttaaaggcctataacctagtttttcataaaataggtgtttaataataatgatattttcacataaaacctatttagacttatatcttagtttatcataagtaaaggtttaacaatgaattataatgagttccataatgcttctaaaattaataaggtatttcacaacgcattaaccttatatttataacttatatcttttctaaaaggttaaaaatgtttaatattgttataacatgttttaacatcctataaaccattaatcttagacatatcacatatgacgttttataaaagattaaaattggtgaacctaatatttgtatattttaattaagatacttttaagctcatgtcttgttttataaagtatagatcacacatttttgaaaagaataccttcttattttaaccattacttgcgacgtttttaaaaagcgaacgctcttttcgttaggctttcttttagatttatgtatggtgaatgttgtatgttattgagtggtgtttgttattcttgtttttttgtgtgatattcaatggttgatctagtagttgagaatcaagatatactccgtggaagaacctcgagttttcaataagcaaggcaagtggacttctccctctgcatactctgtttgatcccaaacaatacatttaataaagtttattcttttggatatatatgcataatttgacgggttacctatttagataaccttttcaaccttactccttgtttaacctgggattatgatataatcaagtagctatgctattgctacaacttaactttatgcagtcactcccgcttatgatattaatgttccaaaatggtaagtttactttattgttgttaacccgatggttaaacaagattattgcatattaattggaacatggagtgaccacccgggaaaacagtgctaccatgagaactatcatggctctggtcttggctaaataactagggaagtcttatgttgggtgttggtcgtggtcgacaggaacgggggcatctggcaagctcttatagttccggctcaggcagattggatacgggcatagttcccaaatctttaccctgtagtctggactataagttggttacggtaggtgtgccttatgcagtttgaccatttccagcatttgcgtaatgaggactctagggagaagcctcgtagtgagaccctggccattcacctcggaagtgaatatgggtctagctaacccgggttagaagggaatcgcgactcataggtaaagatgtgccacctctgcagagtgtaaaactgatatatcagccgtcctcacggttatgagcagcctggactcctcacatgataattgaacttgaagatggaaataaatcgagatccgatgatctgccaatggtttgcttaagtggtttcacttaagtgttgttgatatactcttatacctttgcttaatgggaatacttgggattcacacttattagtaagacatgtgttgttaataaaatgttgaccaactaaaatgcttactgctcaaccttagcctcaccttgttaaacctacattagttttttccccacttgctgagccccgaccataagtgagctcacccttgcttaattttgatcagaagtttgcagatgaagatatgatgctgaactccatgatgctagtctagtgatacccccggtcatcttcctgtggatggatgtccatgttcgttgtactttgatgaataaaggttaagacattatgtctgttcgaagtgtaatatgttaatataatcgttatttacgcttttatgcattgttcttttgatatattacacttgtgacgtcaacatatgtgtggaaatagatcctggcacacatatgctatgcacccgactctgcccattagaaacaggtgtgacaaataaataacttgatcttactttctaaataaatgtaagtttatgtaatcgcttccgcatttctatatctccgatgttctgtaatgtctgcaagacgggtgaaacgttcctggaaaggtaagaaagaagataccgaacttgtcaagtgattcaagggcacctacagggttgtctgaagtccgttggacaaggacaactataggtgggcctaattacttgggaggttccgtcacacaagggatattcacaagtcgaaggtttggatttcggtgaaacctatgcacccgtagctaggcttgagtcaattcgtatattacttgcctatgctacttaccatggcttcaagctttatcaaatggacgtgaagagtgccttcctcaatggaccaatcaaggaggaggtctacgttgagcaacctcccggctgtgaagatagtgagtaccctaaccatgtttataaactctctaaggcgctttatgggctcaagcaagtcccaagagcatggtatgaatgcctaagagattttcttatcgctaatggcttcaaatttggaaaagctgatcctactctctttactaaaaccattgcaaatgatttatttgtatgtcaaatttatgttgatgatatcatatttgggtctactaacaaatctacttgtgaagagtttagtaggattatgattcaaaaattcgagttgtctatgatgggggagttgaagtatttcttaggatttcaagtgaagcaactcctagagggcaccttcattagccaaacaaagtacactcaagacattctcaccaagtttggaatgaaggatgccaagcccatcaagacacccatgggaaccaatgggcatctcgacctcgacacaggaggtaaatccgtagatcaaaaggtataccggtcgatgataggatctttactctatttatgtgcatctcgaccggatattatgctatccgtatgtatgtgtgcaagattctaagccgatcataaggaagttcaccttagggccgtgaaacgaatcttgagatatttagttcatacacctaagtttggtctttgttaccctaagggatccacttttgatttaattgggtattcagatgctgattgggcagggtgtaaaattgatagaaagagcacatcagggacttgtaagttcttgggaagatccctggtgtcttgggcttcaaagaagcaaaactcagtagctctttcaaccgtcgaagccgagtacattgccgcaggccattgttgcgtgtaattgctttgcgatgaggcaacccttagggattatggttacaaattaaccaaagttcctctcctatgtgataatgagagtgcaatccgcatggcggataatcccgttgagcacagccacactaagcacatagccattcgatatcactttctaagggatcaccaacaaaggggggatatcgagattgcttatgttagcaccaaagaacaattagccgatatctttaccaagccattagatgagaaaacttttaccaagcttaggcatgagctaaacattcttgatcctaggaattttgattgatactttgcacacataactcatttatatatacatttgatcatctcagtcatgtgctatgactaatgtggttttcaagtgtatttcatgctaaatcatagattgaaagggaaatggagtcttcggcgaagacaaggcttccactccactccatcgcattatttatccttcgtcgtcactccgcaccgctctccaatttggtataatcttcactcatatattgtttgccaaagggggatagaaagtaaaagggcttatatttcactcacaagtattcgtttttggcgattcatgccaaaggggagaaagtattagcccaaagcaaaaggaccgcaccaccaccaatttcaaaaaatgtagtcttttcaatttgtattaaataagtttttcaattggtatcttatttttgatataatttcaaattggtatgacctctttcaaaattaatatccaaaaccctcttgaatactaagaggagaatttcattgagggggagttttgtttagtcaaaggaaaagcatttgaagcagggggagaaaatttcaaaacttgaaaatgcttctcaaaatcttattcatatacctttgactatttgcaaaagactttgaaaaagaattttcaaaacatttacaaaaacaaaacaagtggtgcaagcgtggtccaaaatgttaaaataaataaagcaatccaggcatatcctatgaatgtataaattggtttaattccaagtaatctttgcacttaccttatgcaaactagttcaattttgcacttatatatttgctttggtttgtgttggcatcaatcaccaaaaagggggagattgaaacggaaataggctaaaaccttttcctaattgattatggtggttgaattgctcaacacaaataattggactaactagtttgctctagattataagttctacaggtgccaaaggttcaacacaaaccaataaaaagtacaagaaagggttcaaataaaaagagcaaaagacaaccgaaggctgccctggtttggcacaccggactgtctggtgcaccagggagatcaactccgaacttgccaccttcgggtttctgggattgcctctccgctataattcaccagactgtccggtgtagcaccggattgtccggtgtgtcaagcggagtaacggctacaacaccaatggttgtctgcaaaaggtgaacagtgagctacagtgcgcggactgcgcgcgcagaagtcagagcaggcgcagatggcgcactggacagtgaacaggacctgtccggtgcaccaccggattgtccggtggccccacatgtcagagctccaatggtcaaaccctaacggttgggtgacgtggctggcgcaccggactgtccggtgcgcccttcgacaacagccttccccaacggtcactttggtggttggggctataaataccccccaaccaccaaacttcaaggcattcaagttttcaaccaacacattcaatacaagagctagtgcattcaatacaagacacaattagagtgaatcaaaatctctccaagtcccaattccactcaaagcaatagtgactagaagagagagttttgtcgtgttcatttgagctcttgcgcttggatcgcttttcttcttcctccattcttgctctcaactcacttgtaatcaaagcaagagacaccaagttgtggtgatccttgtagtggactaagtgtcccattttattgaagagaaaagctcacttggtctaggtgaccgtttgagagagggaaagggttgaaagagacccggtctttgtgaccacctcaacggggagtaggtttgcaagaaccgaacctcgggaaaacaaatcaccgtgtcatttgccttattcgcttgtgatttgttttcgccctctctttcggactcaattatatttcta

SEQ ID NO: 39783 - DNA, 4138 bp, Zea Mays
tgttgttgggcggagacaggacgaaagaaaacgctatatgtaggggacagaataatttacaggatattgttggagacagcctaattcacgagcggggccaaggcccaacagcgcatccagagcctctccatccggctcggaacagtcgatccaccagccaatctttgatcacccaaccggtctcctcgtgctctaactcgaacccaaaccaaaccaccgtctccttggcggctccgccctaccaccatggctgccgtcgcgcctccgcccgacaacatggacccgccgccggccactcccccagccgccactcctgccgcgacgctaaccccgcctcccgccgccacctccaccccgccaaaccccgcgacgcccggccccgcggcgcctagtccaaaccctaacctgccccccgcccccgcttccgcgcctccggcggcatttgcgccaccgatgcccccagctccggtctctttcgccgctaccttccgcccgctcggtgctcctgcgccaccgccgccgcaccaggtcccgcagtacggcgcgttgccgccgaacccgggctacccgatgccgccgccgatgcagccgccgggcgtccccgtcgtcatgcctccgggctccgttcggccgccggtcatgtacggaccgccccagccgggagcatacatgccgcagcagggcgctgcggtcccccatcctgcggtggtcgtgccagccattactccccacagcgagaggtgccggctcatgtttgattctgcagctctaactgaagctgtagatcatttgctccctcactgagtgtggtatgccgaatgtttgaatttgaactggttttgtttacattgtctaattgatttacatgctttagctcgtctcactgcttaattaggctcagtttcattatgcacttagatgcttcagctctgggttgtcccgaaaacttgctaaggtatcatgattttctgccgtttaatttcatatgccggccatatccttttgttatggtttcatatacatttttttgataagaagtgtaaagtagtgacatatttgcctgagctcttattacctgagtagtgcattacaatggtgtgagctataccaagtttctcaaataaccaatacaagtatgttatcctgtccatgaggttaagaggtaaggccagttttgtttaggtcccttttcgtttgaccaaaatattgcttctgttgatgttcactctggtattctgaactggcaagatattgctaatctattcagtcagctcttatttgtttatggctttcggtatcttctgtttacacatgactacactctctgattttatatgtgttatgtggtttctatgtgttttacttcgttggtatacttactaatgtggttgcataggtgttgtctgtctgtctctgcaggaatgcctcgttatcctgcaccgtatcctatggttcgtccaggttttgttccacgtccaatgccgccacctggtgttgtgacaattcaacgaccaccaataatttctgggatccgggctattcctcctttggtagccctgactgcccgtccacctcctccagctgttatgctggctgataaaccgccaaccgcagtttatgttggcaagattgccccaacagtagacaatggtttccttctttcacttctccagctttgtggacctgtcaagagttggaagcgtgccgaagatccaagtaatggaaaacctaaaggttttgggttttgtgagtttgaatctgctgaaggcatccttcgtgcgacacggcttctcaacaaattgagccttgatggtcaggaactggtgattaatataaatgatgccaccaaggagtacctgaagaaacatgttgaggaaaagaagagagcacaagtgaagtcaaaagatgcaagtggggatggaactacagctgttgctgaaaatgaatcatcaaaatctgttcctgatgaatcagataaggagacaggagatgctggagacaaggacagtgacgagagcactaagaaatttgggattgttactgatgaagactctcaagctgataaagacgtcgcagaaaaaataagcagtatgattgagcagtggttaaagactagaccgccacctccacctccaccagttcaaccatcggcggatagctctggtgtagataaggcaaaaaatgattctgctgataagactgatgctgacactgttaaaagagcagtcaatgaaactgaaagatctgaaactgcctctcctgataggaggaaggatagagagcatgataaggataaacgggacaaagatattgaaaggcatgaccgtgaacgcgaacgtgaaaggatacggagggatagggagaaggatcataagcatagagaagttgatagactatacagggatcgccttaaggagtgggaatctagggagagagagaaagaatatcagagatatagtgaaaaggagaaagaaaaagatagagaacataaccgcagaagggagatcctgaagcaggaagatgagagcgacgaagaggataataggaaaaggaagcgaaggagtagtagttcacttgaagataggaaaagaaggcggcaacgtgaaaaggaggaagatttggcagataaaataagggaggaagaggaaattgcagaagcaaggcggcgggctgtagagttgcaacagcaagcagatgaagcagctgcagcagcggctgcagctgctgaagagtctgctacacttatggaggttgatgctgacgacgaaaaagaaacagatgcacaaaacgagccgtctgttgtggaagctgataacatcccgagctttgctaatagtgttggtgctggtggacttggtaaggaaaataacagtgaggaaataagcatggtacctagtcataccaagcaaaacaacaatgtcccagtaaagaaactgggttttggtttgattggcttgggcaaaaggacatctgttccatcagtttttgctgaagaggatgatgaaaataatgttgataaaagcataagacctctagtacctatcgactacaatgaagaattacaagccgtacaggctaattcttcgactggggcaaatgtcgcagcagctgctgagtttgccaagcgcatctcagtttctaactcaaaggaagagaaggctgacacagagaaggataggaataggagatccagtgaaggtcgtcctagcgatgagcgaagagagaagctacatgatcgtgagaaggataagtccaagtcggagaacaagaagattctggatgcaaagcaattaattgatatgatcccaaggacaaaggaagaactttttgcctatgatataaactgggtgatatatgacaagaatgagttgcacgagagaatgaggccttggatttcaaaaaagattattgaatttcttggcgaggaggaatcaactttggtggactatattgtttcctgcaccaaagaccacgttcaggcagaaaagatgctagagctcctacagtcgattttggatgttgaggctgagatgtttgttctcaagatgtggcggatgctgatatttgagattaagaaagtcgaatctggactatcaggaagagcaaattcacatgcatcaacagcctactcttgttctctggtgaacgacgaagaatgtcgaaggctggcagtagtcgcaagtataaatccctaatcatgctcttcgtagttcctgctgtgcaataactctgcagttttatgaccatctaattatggctcattttgttgtgttgtcttttgaggttgtatgtaagcaattttttgttgtttttgctctaattgtggatcatgttgttgcgttgtattttgaggttagcatgtgttttggttagcagacggttggtgttgaggtggtccagcacttttcttttgaatggaaccatcttgtgttatgtttaggtcttgttcgtttgtgtcggattggtgggtcggaacgattcctagccggattgtttctctaatttatataaactttgattaggtctcgttcgtttctggctgatccagccgttccaggcctcttttcagtcagaaaaattatccagtttcgaatccggcactcagctgttcgtttcaatctgaaataaaaacaaaaac

SEQ ID NO: 39784 - DNA, 3231 bp, Zea Mays
tgttgttgggcggagacaggacgaaagaaaacgctatatgtaggggacagaataatttacaggatattgttggagacagcctaattcacgagcggggccaaggcccaacagcgcatccagagcctctccatccggctcggaacagtcgatccaccagccaatctttgatcacccaaccggtctcctcgtgctctaactcgaacccaaaccaaaccaccgtctccttggcggctccgccctaccaccatggctgccgtcgcgcctccgcccgacaacatggacccgccgccggccactcccccagccgccactcctgccgcgacgctaaccccgcctcccgccgccacctccaccccgccaaaccccgcgacgcccggccccgcggcgcctagtccaaaccctaacctgccccccgcccccgcttccgcgcctccggcggcatttgcgccaccgatgcccccagctccggtctctttcgccgctaccttccgcccgctcggtgctcctgcgccaccgccgccgcaccaggtcccgcagtacggcgcgttgccgccgaacccgggctacccgatgccgccgccgatgcagccgccgggcgtccccgtcgtcatgcctccgggctccgttcggccgccggtcatgtacggaccgccccagccgggagcatacatgccgcagcagggcgctgcggtcccccatcctggaatgcctcgttatcctgcaccgtatcctatggttcgtccaggttttgttccacgtccaatgccgccacctggtgttgtgacaattcaacgaccaccaataatttctgggatccgggctattcctcctttggtagccctgactgcccgtccacctcctccagctgttatgctggctgataaaccgccaaccgcagtttatgttggcaagattgccccaacagtagacaatggtttccttctttcacttctccagctttgtggacctgtcaagagttggaagcgtgccgaagatccaagtaatggaaaacctaaaggttttgggttttgtgagtttgaatctgctgaaggcatccttcgtgcgacacggcttctcaacaaattgagccttgatggtcaggaactggtgattaatataaatgatgccaccaaggagtacctgaagaaacatgttgaggaaaagaagagagcacaagtgaagtcaaaagatgcaagtggggatggaactacagctgttgctgaaaatgaatcatcaaaatctgttcctgatgaatcagataaggagacaggagatgctggagacaaggacagtgacgagagcactaagaaatttgggattgttactgatgaagactctcaagctgataaagacgtcgcagaaaaaataagcagtatgattgagcagtggttaaagactagaccgccacctccacctccaccagttcaaccatcggcggatagctctggtgtagataaggcaaaaaatgattctgctgataagactgatgctgacactgttaaaagagcagtcaatgaaactgaaagatctgaaactgcctctcctgataggaggaaggatagagagcatgataaggataaacgggacaaagatattgaaaggcatgaccgtgaacgcgaacgtgaaaggatacggagggatagggagaaggatcataagcatagagaagttgatagactatacagggatcgccttaaggagtgggaatctagggagagagagaaagaatatcagagatatagtgaaaaggagaaagaaaaagatagagaacataaccgcagaagggagatcctgaagcaggaagatgagagcgacgaagaggataataggaaaaggaagcgaaggagtagtagttcacttgaagataggaaaagaaggcggcaacgtgaaaaggaggaagatttggcagataaaataagggaggaagaggaaattgcagaagcaaggcggcgggctgtagagttgcaacagcaagcagatgaagcagctgcagcagcggctgcagctgctgaagagtctgctacacttatggaggttgatgctgacgacgaaaaagaaacagatgcacaaaacgagccgtctgttgtggaagctgataacatcccgagctttgctaatagtgttggtgctggtggacttggtaaggaaaataacagtgaggaaataagcatggtacctagtcataccaagcaaaacaacaatgtcccagtaaagaaactgggttttggtttgattggcttgggcaaaaggacatctgttccatcagtttttgctgaagaggatgatgaaaataatgttgataaaagcataagacctctagtacctatcgactacaatgaagaattacaagccgtacaggctaattcttcgactggggcaaatgtcgcagcagctgctgagtttgccaagcgcatctcagtttctaactcaaaggaagagaaggctgacacagagaaggataggaataggagatccagtgaaggtcgtcctagcgatgagcgaagagagaagctacatgatcgtgagaaggataagtccaagtcggagaacaagaagattctggatgcaaagcaattaattgatatgatcccaaggacaaaggaagaactttttgcctatgatataaactgggtgatatatgacaagaatgagttgcacgagagaatgaggccttggatttcaaaaaagattattgaatttcttggcgaggaggaatcaactttggtggactatattgtttcctgcaccaaagaccacgttcaggcagaaaagatgctagagctcctacagtcgattttggatgttgaggctgagatgtttgttctcaagatgtggcggatgctgatatttgagattaagaaagtcgaatctggactatcaggaagagcaaagtaatgaagctaagcctgttaccttgtatgacctttgatttacatcactcaactgtggtcatgcttgtaaggtcatactgtactaaacaagcatcagaaaccatttttaatgatgctgagtggacggttttgattctacacttcccttgtagaaatgtatacgagaattaatgagagactgcgtaattattttgatagattgttgattgcataatgtgtttggtgcagttcacatgcatcaacagcctactcttgttctctggtgaacgacgaagaatgtcgaaggctggcagtagtcgcaagtcactagtacaagttgaagagaggaggaagcttcgac

SEQ ID NO: 39785 - DNA, 3061 bp, Zea Mays
cccatcctgcggtggtcgtgccagccattactccccacagcgagaggtgccggctcatgtttgattctgcagctctaactgaagctgtagatcatttgctccctcactgagtgtggaatgcctcgttatcctgcaccgtatcctatggttcgtccaggttttgttccacgtccaatgccgccacctggtgttgtgacaattcaacgaccaccaataatttctgggatccgggctattcctcctttggtagccctgactgcccgtccacctcctccagctgttatgctggctgataaaccgccaaccgcagtttatgttggcaagattgccccaacagtagacaatggtttccttctttcacttctccagctttgtggacctgtcaagagttggaagcgtgccgaagatccaagtaatggaaaacctaaaggttttgggttttgtgagtttgaatctgctgaaggcatccttcgtgcgacacggcttctcaacaaattgagccttgatggtcaggaactggtgattaatataaatgatgccaccaaggagtacctgaagaaacatgttgaggaaaagaagagagcacaagtgaagtcaaaagatgcaagtggggatggaactacagctgttgctgaaaatgaatcatcaaaatctgttcctgatgaatcagataaggagacaggagatgctggagacaaggacagtgacgagagcactaagaaatttgggattgttactgatgaagactctcaagctgataaagacgtcgcagaaaaaataagcagtatgattgagcagtggttaaagactagaccgccacctccacctccaccagttcaaccatcggcggatagctctggtgtagataaggcaaaaaatgattctgctgataagactgatgctgacactgttaaaagagcagtcaatgaaactgaaagatctgaaactgcctctcctgataggaggaaggatagagagcatgataaggataaacgggacaaagatattgaaaggcatgaccgtgaacgcgaacgtgaaaggatacggagggatagggagaaggatcataagcatagagaagttgatagactatacagggatcgccttaaggagtgggaatctagggagagagagaaagaatatcagagatatagtgaaaaggagaaagaaaaagatagagaacataaccgcagaagggagatcctgaagcaggaagatgagagcgacgaagaggataataggaaaaggaagcgaaggagtagtagttcacttgaagataggaaaagaaggcggcaacgtgaaaaggaggaagatttggcagataaaataagggaggaagaggaaattgcagaagcaaggcggcgggctgtagagttgcaacagcaagcagatgaagcagctgcagcagcggctgcagctgctgaagagtctgctacacttatggaggttgatgctgacgacgaaaaagaaacagatgcacaaaacgagccgtctgttgtggaagctgataacatcccgagctttgctaatagtgttggtgctggtggacttggtaaggaaaataacagtgaggaaataagcatggtacctagtcataccaagcaaaacaacaatgtcccagtaaagaaactgggttttggtttgattggcttgggcaaaaggacatctgttccatcagtttttgctgaagaggatgatgaaaataatgttgataaaagcataagacctctagtacctatcgactacaatgaagaattacaagccgtacaggctaattcttcgactggggcaaatgtcgcagcagctgctgagtttgccaagcgcatctcagtttctaactcaaaggaagagaaggctgacacagagaaggataggaataggagatccagtgaaggtcgtcctagcgatgagcgaagagagaagctacatgatcgtgagaaggataagtccaagtcggagaacaagaagattctggatgcaaagcaattaattgatatgatcccaaggacaaaggaagaactttttgcctatgatataaactgggtgatatatgacaagatgagttgcacgagagaatgaggccttggatttcaaaaaagattattgaatttcttggcgaggaggaatcaactttggtggactatattgtttcctgcaccaaagaccacgttcaggcagaaaagatgctagagctcctacagtcgattttggatgttgaggctgagatgtttgttctcaagatgtggcggatgctgatatttgagattaagaaagtcgaatctggactatcaggaagagcaaagtaatgaagctaagcctgttaccttgtatgacctttgatttacatcactcaactgtggtcatgcttgtaaggtcatactgtactaaacaagcatcagaaaccatttttaatgatgctgagtggacggttttgattctacacttcccttgtagaaatgtatacgagaattaatgagagactgcgtaattattttgatagattgttgattgcataatgtgtttggtgcagttcacatgcatcaacagcctactcttgttctctggtgaacgacgaagaatgtcgaaggctggcagtagtcgcaagtataaatccctaatcatgctcttcgtagttcctgctgtgcaataactctgcagttttatgaccatctaattatggctcattttgttgtgttgtcttttgaggttgtatgtaagcaattttttgttgtttttgctctaattgtggatcatgttgttgcgttgtattttgaggttagcatgtgttttggttagcagacggttggtgttgaggtggtccagcacttttcttttgaatggaaccatcttgtgttatgtttaggtcttgttcgtttgtgtcggattggtgggtcggaacgattcctagccggattgtttctctaatttatataaactttgattaggtctcgttcgtttctggctgatccagccgttccaggcctcttttcagtcagaaaaattatccagtttcgaatccggcactcagctgttcgtttcaatctgaaataaaaacaaaaac

SEQ ID NO: 39786 - DNA, 3131 bp, Zea Mays
ggtcgtgccagccattactccccacagcgagaggtgccggctcatgtttgattctgcagctctaactgaagctgtagatcatttgctccctcactgagtgtgatgcttcagctctgggttgtcccgaaaacttgctaaggtatcatgattttctgccgtttaatttcatatgccggccatatccttttgttatggtttcatatacatttttttgataagaagtgtaaagtagtgacatatttgcctgagctcttattacctgagtagtgcattacaatggtgtgagctataccaagtttctcaaataaccaatacaagtatgttatcctgtccatgaggttaagaggtaaggccagttttgtttaggtcccttttcgtttgaccaaaatattgcttctgttgatgttcactctggtattctgaactggcaagatattgctaatctattcagtcagctcttatttgtttatggctttcggtatcttctgtttacacatgactacactctctgattttatatgtgttatgtggtttctatgtgttttacttcgttggtatacttactaatgtggttgcataggtgttgtctgtctgtctctgcaggaatgcctcgttatcctgcaccgtatcctatggttcgtccaggttttgttccacgtccaatgccgccacctggtgttgtgacaattcaacgaccaccaataatttctgggatccgggctattcctcctttggtagccctgactgcccgtccacctcctccagctgttatgctggctgataaaccgccaaccgcagtttatgttggcaagattgccccaacagtagacaatggtttccttctttcacttctccagctttgtggacctgtcaagagttggaagcgtgccgaagatccaagtaatggaaaacctaaaggttttgggttttgtgagtttgaatctgctgaaggcatccttcgtgcgacacggcttctcaacaaattgagccttgatggtcaggaactggtgattaatataaatgatgccaccaaggagtacctgaagaaacatgttgaggaaaagaagagagcacaagtgaagtcaaaagatgcaagtggggatggaactacagctgttgctgaaaatgaatcatcaaaatctgttcctgatgaatcagataaggagacaggagatgctggagacaaggacagtgacgagagcactaagaaatttgggattgttactgatgaagactctcaagctgataaagacgtcgcagaaaaaataagcagtatgattgagcagtggttaaagactagaccgccacctccacctccaccagttcaaccatcggcggatagctctggtgtagataaggcaaaaaatgattctgctgataagactgatgctgacactgttaaaagagcagtcaatgaaactgaaagatctgaaactgcctctcctgataggaggaaggatagagagcatgataaggataaacgggacaaagatattgaaaggcatgaccgtgaacgcgaacgtgaaaggatacggagggatagggagaaggatcataagcatagagaagttgatagactatacagggatcgccttaaggagtgggaatctagggagagagagaaagaatatcagagatatagtgaaaaggagaaagaaaaagatagagaacataaccgcagaagggagatcctgaagcaggaagatgagagcgacgaagaggataataggaaaaggaagcgaaggagtagtagttcacttgaagataggaaaagaaggcggcaacgtgaaaaggaggaagatttggcagataaaataagggaggaagaggaaattgcagaagcaaggcggcgggctgtagagttgcaacagcaagcagatgaagcagctgcagcagcggctgcagctgctgaagagtctgctacacttatggaggttgatgctgacgacgaaaaagaaacagatgcacaaaacgagccgtctgttgtggaagctgataacatcccgagctttgctaatagtgttggtgctggtggacttggtaaggaaaataacagtgaggaaataagcatggtacctagtcataccaagcaaaacaacaatgtcccagtaaagaaactgggttttggtttgattggcttgggcaaaaggacatctgttccatcagtttttgctgaagaggatgatgaaaataatgttgataaaagcataagacctctagtacctatcgactacaatgaagaattacaagccgtacaggctaattcttcgactggggcaaatgtcgcagcagctgctgagtttgccaagcgcatctcagtttctaactcaaaggaagagaaggctgacacagagaaggataggaataggagatccagtgaaggtcgtcctagcgatgagcgaagagagaagctacatgatcgtgagaaggataagtccaagtcggagaacaagaagattctggatgcaaagcaattaattgatatgatcccaaggacaaaggaagaactttttgcctatgatataaactgggtgatatatgacaagaatgagttgcacgagagaatgaggccttggatttcaaaaaagattattgaatttcttggcgaggaggaatcaactttggtggactatattgtttcctgcaccaaagaccacgttcaggcagaaaagatgctagagctcctacagtcgattttggatgttgaggctgagatgtttgttctcaagatgtggcggatgctgatatttgagattaagaaagtcgaatctggactatcaggaagagcaaagtaatgaagctaagcctgttaccttgtatgacctttgatttacatcactcaactgtggtcatgcttgtaaggtcatactgtactaaacaagcatcagaaaccatttttaatgatgctgagtggacggttttgattctacacttcccttgtagaaatgtatacgagaattaatgagagactgcgtaattattttgatagattgttgattgcataatgtgtttggtgcagttcacatgcatcaacagcctactcttgttctctggtgaacgacgaagaatgtcgaaggctggcagtagtcgcaagtcactagtacaagttgaagagaggaggaagcttcgac

SEQ ID NO: 39787 - DNA, 2848 bp, Zea Mays
cattactccccacagcgagaggtgccggctcatgtttgattctgcagctctaactgaagctgtagatcatttgctccctcactgagtgtgatgcttcagctctgggttgtcccgaaaacttgctaaggtgaatgcctcgttatcctgcaccgtatcctatggttcgtccaggttttgttccacgtccaatgccgccacctggtgttgtgacaattcaacgaccaccaataatttctgggatccgggctattcctcctttggtagccctgactgcccgtccacctcctccagctgttatgctggctgataaaccgccaaccgcagtttatgttggcaagattgccccaacagtagacaatggtttccttctttcacttctccagctttgtggacctgtcaagagttggaagcgtgccgaagatccaagtaatggaaaacctaaaggttttgggttttgtgagtttgaatctgctgaaggcatccttcgtgcgacacggcttctcaacaaattgagccttgatggtcaggaactggtgattaatataaatgatgccaccaaggagtacctgaagaaacatgttgaggaaaagaagagagcacaagtgaagtcaaaagatgcaagtggggatggaactacagctgttgctgaaaatgaatcatcaaaatctgttcctgatgaatcagataaggagacaggagatgctggagacaaggacagtgacgagagcactaagaaatttgggattgttactgatgaagactctcaagctgataaagacgtcgcagaaaaaataagcagtatgattgagcagtggttaaagactagaccgccacctccacctccaccagttcaaccatcggcggatagctctggtgtagataaggcaaaaaatgattctgctgataagactgatgctgacactgttaaaagagcagtcaatgaaactgaaagatctgaaactgcctctcctgataggaggaaggatagagagcatgataaggataaacgggacaaagatattgaaaggcatgaccgtgaacgcgaacgtgaaaggatacggagggatagggagaaggatcataagcatagagaagttgatagactatacagggatcgccttaaggagtgggaatctagggagagagagaaagaatatcagagatatagtgaaaaggagaaagaaaaagatagagaacataaccgcagaagggagatcctgaagcaggaagatgagagcgacgaagaggataataggaaaaggaagcgaaggagtagtagttcacttgaagataggaaaagaaggcggcaacgtgaaaaggaggaagatttggcagataaaataagggaggaagaggaaattgcagaagcaaggcggcgggctgtagagttgcaacagcaagcagatgaagcagctgcagcagcggctgcagctgctgaagagtctgctacacttatggaggttgatgctgacgacgaaaaagaaacagatgcacaaaacgagccgtctgttgtggaagctgataacatcccgagctttgctaatagtgttggtgctggtggacttggtaaggaaaataacagtgaggaaataagcatggtacctagtcataccaagcaaaacaacaatgtcccagtaaagaaactgggttttggtttgattggcttgggcaaaaggacatctgttccatcagtttttgctgaagaggatgatgaaaataatgttgataaaagcataagacctctagtacctatcgactacaatgaagaattacaagccgtacaggctaattcttcgactggggcaaatgtcgcagcagctgctgagtttgccaagcgcatctcagtttctaactcaaaggaagagaaggctgacacagagaaggataggaataggagatccagtgaaggtcgtcctagcgatgagcgaagagagaagctacatgatcgtgagaaggataagtccaagtcggagaacaagaagattctggatgcaaagcaattaattgatatgatcccaaggacaaaggaagaactttttgcctatgatataaactgggtgatatatgacaagaatgagttgcacgagagaatgaggccttggatttcaaaaaagattattgaatttcttggcgaggaggaatcaactttggtggactatattgtttcctgcaccaaagaccacgttcaggcagaaaagatgctagagctcctacagtcgattttggatgttgaggctgagatgtttgttctcaagatgtggcggatgctgatatttgagattaagaaagtcgaatctggactatcaggaagagcaaattcacatgcatcaacagcctactcttgttctctggtgaacgacgaagaatgtcgaaggctggcagtagtcgcaagtataaatccctaatcatgctcttcgtagttcctgctgtgcaataactctgcagttttatgaccatctaattatggctcattttgttgtgttgtcttttgaggttgtatgtaagcaattttttgttgtttttgctctaattgtggatcatgttgttgcgttgtattttgaggttagcatgtgttttggttagcagacggttggtgttgaggtggtccagcacttttcttttgaatggaaccatcttgtgttatgtttaggtcttgttcgtttgtgtcggattggtgggtcggaacgattcctagccggattgtttctctaatttatataaactttgattaggtctcgttcgtttctggctgatccagccgttccaggcctcttttcagtcagaaaaattatccagtttcgaatccggcactcagctgttcgtttcaatctgaaataaaaacaaaaac

SEQ ID NO: 39788 - DNA, 3206 bp, Zea Mays
cattactccccacagcgagaggtgccggctcatgtttgattctgcagctctaactgaagctgtagatcatttgctccctcactgagtgtggtatgccgaatgtttgaatttgaactggttttgtttacattgtctaattgatttacatgctttagctcgtctcactgcttaattaggctcagtttcattatgcacttagatgcttcagctctgggttgtcccgaaaacttgctaaggtgttgtctgtctgtctctgcaggaatgcctcgttatcctgcaccgtatcctatggttcgtccaggttttgttccacgtccaatgccgccacctggtgttgtgacaattcaacgaccaccaataatttctgggatccgggctattcctcctttggtagccctgactgcccgtccacctcctccagctgttatgctggctgataaaccgccaaccgcagtttatgttggcaagattgccccaacagtagacaatggtttccttctttcacttctccagctttgtggacctgtcaagagttggaagcgtgccgaagatccaagtaatggaaaacctaaaggttttgggttttgtgagtttgaatctgctgaaggcatccttcgtgcgacacggcttctcaacaaattgagccttgatggtcaggaactggtgattaatataaatgatgccaccaaggagtacctgaagaaacatgttgaggaaaagaagagagcacaagtgaagtcaaaagatgcaagtggggatggaactacagctgttgctgaaaatgaatcatcaaaatctgttcctgatgaatcagataaggagacaggagatgctggagacaaggacagtgacgagagcactaagaaatttgggattgttactgatgaagactctcaagctgataaagacgtcgcagaaaaaataagcagtatgattgagcagtggttaaagactagaccgccacctccacctccaccagttcaaccatcggcggatagctctggtgtagataaggcaaaaaatgattctgctgataagactgatgctgacactgttaaaagagcagtcaatgaaactgaaagatctgaaactgcctctcctgataggaggaaggatagagagcatgataaggataaacgggacaaagatattgaaaggcatgaccgtgaacgcgaacgtgaaaggatacggagggatagggagaaggatcataagcatagagaagttgatagactatacagggatcgccttaaggagtgggaatctagggagagagagaaagaatatcagagatatagtgaaaaggagaaagaaaaagatagagaacataaccgcagaagggagatcctgaagcaggaagatgagagcgacgaagaggataataggaaaaggaagcgaaggagtagtagttcacttgaagataggaaaagaaggcggcaacgtgaaaaggaggaagatttggcagataaaataagggaggaagaggaaattgcagaagcaaggcggcgggctgtagagttgcaacagcaagcagatgaagcagctgcagcagcggctgcagctgctgaagagtctgctacacttatggaggttgatgctgacgacgaaaaagaaacagatgcacaaaacgagccgtctgttgtggaagctgataacatcccgagctttgctaatagtgttggtgctggtggacttggtaaggaaaataacagtgaggaaataagcatggtacctagtcataccaagcaaaacaacaatgtcccagtaaagaaactgggttttggtttgattggcttgggcaaaaggacatctgttccatcagtttttgctgaagaggatgatgaaaataatgttgataaaagcataagacctctagtacctatcgactacaatgaagaattacaagccgtacaggctaattcttcgactggggcaaatgtcgcagcagctgctgagtttgccaagcgcatctcagtttctaactcaaaggaagagaaggctgacacagagaaggataggaataggagatccagtgaaggtcgtcctagcgatgagcgaagagagaagctacatgatcgtgagaaggataagtccaagtcggagaacaagaagattctggatgcaaagcaattaattgatatgatcccaaggacaaaggaagaactttttgcctatgatataaactgggtgatatatgacaagaatgagttgcacgagagaatgaggccttggatttcaaaaaagattattgaatttcttggcgaggaggaatcaactttggtggactatattgtttcctgcaccaaagaccacgttcaggcagaaaagatgctagagctcctacagtcgattttggatgttgaggctgagatgtttgttctcaagatgtggcggatgctgatatttgagattaagaaagtcgaatctggactatcaggaagagcaaagtaatgaagctaagcctgttaccttgtatgacctttgatttacatcactcaactgtggtcatgcttgtaaggtcatactgtactaaacaagcatcagaaaccatttttaatgatgctgagtggacggttttgattctacacttcccttgtagaaatgtatacgagaattaatgagagactgcgtaattattttgatagattgttgattgcataatgtgtttggtgcagttcacatgcatcaacagcctactcttgttctctggtgaacgacgaagaatgtcgaaggctggcagtagtcgcaagtataaatccctaatcatgctcttcgtagttcctgctgtgcaataactctgcagttttatgaccatctaattatggctcattttgttgtgttgtcttttgaggttgtatgtaagcaattttttgttgtttttgctctaattgtggatcatgttgttgcgttgtattttgaggttagcatgtgttttggttagcagacggttggtgttgaggtggtccagcacttttcttttgaatggaaccatcttgtgttatgtttaggtcttgttcgtttgtgtcggattggtgggtcggaacgattcctagccggattgtttctctaatttatataaactttgattaggtctcgttcgtttctggctgatccagccgttccaggcctcttttcagtcagaaaaattatccagtttcgaatccggcactcagctgttcgtttcaatctgaaataaaaacaaaaac

SEQ ID NO: 39789 - DNA, 1037 bp, Zea Mays
gtcacagacaacacgagctcttcgtatgcgtgtttgggctgcctgttcgtaggattgctgagcccgtgtaccgacagttttgacgggggtagggttccactcctccggcggccggttttgtgtgccccgcgatgtcctaactctggttgcatccgtcgcctccctcacacaccgtcgtcgccgccgtcaagcactgtctagccgttgccacatctctcattcatggccctaggttgcagacgctgaagaacttgcccttgaacggtgtacgacgacgacaagaagaagtggaggcgatctgtctgtatttatagattcagaggctgaaggaacaaggtataacagctaagacatcttctcaaagtctaaagataatgagttcttgggaggaggatgctagacaatttcttttagaccaggaagaagaagatgatgaactcttctttgtaattgtctctgttgttctcgcggctatgcaagaagagaaaagggcagtccatacttcttctcttactggtgctatgaagattaaggaagttctagaagggcatgaaatttggagcaaagttgagtttgggatggagccaaatattttcagagcgatactagctttccatagagccgagggtcttctacatgacacaagaggtgttactgttgaagaacagtttggcatgttcatgtacatgatctcgcataatgctactaatcaagatatgcaaaaatggtttcaacatagtggtgaaaccattcacaggaagataaatgaagtctttgatataattccagccttaacaagtaggtttgtaaagcttccaagttccgtacaaactcacatcaaaattgtaaccgactctcgtttcatgccttttttctaggtagacataagacaaaaaaagttttattggaaccacaatttgtttggagttaagaactgttctactttttccatcaatatgtatgcaggttctaatacttcttgtggatctgatacatatgtacacactctcataattcactagttcatgaaaatttag

SEQ ID NO: 39790 - DNA, 952 bp, Zea Mays
gacagttttgacgggggtagggttccactcctccggcggccggttttgtgtgccccgcgatgtcctaactctggttgcatccgtcgcctccctcacacaccgtcgtcgccgccgtcaagcactgtctagccgttgccacatctctcattcatggccctaggttgcagacgctgaagaacttgcccttgaacggtgtacgacgacgacaagaagaagtggaggcgatctgattcagaggctgaaggaacaaggtataacagctaagacatcttctcaaagtctaaagataatgagttcttgggaggaggatgctagacaatttcttttagaccaggaagaagaagatgatgaactcttctttgtaattgtctctgttgttctcgcggctatgcaagaagagaaaagggcagtccatacttcttctcttactggtgctatgaagattaaggaagttctagaagggcatgaaatttggagcaaagttgagtttgggatggagccaaatattttcagagcgatactagctttccatagagccgagggtcttctacatgacacaagaggtgttactgttgaagaacagtttggcatgttcatgtacatgatctcgcataatgctactaatcaagatatgcaaaaatggtttcaacatagtggtgaaaccattcacaggaagataaatgaagtctttgatataattccagccttaacaagtaggtttgtaaagcttccaagttccgtacaaactcacatcaaaattgtaaccgactctcgtttcatgccttttttctaggtagacataagacaaaaaaagttttattggaaccacaatttgtttggagttaagaactgttctactttttccatcaatatgtatgcaggttctaatacttcttgtggatctgatacatatgtacacactctcataattcactagttcatgaaaatttag

SEQ ID NO: 39791 - DNA, 1178 bp, Zea Mays
ctcgtcatgcctgcgtgcatctccggccatgtctaggccgtgtccacatgccgcagccccggcacctacctcccttcccccacccccgcacccgcacgcccaaccttccgtcctcggctgcggccagggtggaagccgtggaggtggacgaaatccaagccgaaaccaccagccccttacatcctaggcgctctcttaccatcctcgacagtctcttcccatcggtggcccttcaatcccccatctagccggtgctacatattaatccaaagggaacgtctccaacatcttctaggttgagctcaacgaacagtctatcaatccccccatttgggcagacattgatgacgacgacgaggattacatcgccaccactgaaccgtcgcaaccctgtctggatttggttgagctcctcgccgcttttcaggagatctgttggtgttcttcccagctgctttgtggtttgtgtgggcatacatgaaacttggagtcggtattaattgagaggagagacgggaggggtggatgtggctgctagccatggtcctgatcagtccttgcttggtattgattgatcatggccattttcagtataattgcattagccttggacttacgcttggagcaattgctggtgttttgtcgaggaatgagctcgtcgctgcagctctcttcactcttgcaatcaatcacaaacaggtggatagaattctggacaaagaaaattttatattggaagaacttcttgatgaggatgaaattaatcaggagtgcaaagcactgaactcaatactcataaacttgtaattttcttatttatttctgtgatatgagaagcatattaaatctactgatggaacttacattagtatttgtttttttgtgggttgtcttattataacttcacttgtgacttctgatacatatagtggagtggttgtggcgtcaaatgaaatgcctattagagaataaaaataatagtcaataatatgcttatatgatataaatttttatgcacttatcgttcctgcaaaggtcctcatatgcacatgaaattgtactttagtaaactctatatttgattattggtactgttctatatatagtctgtattatctgcaaagagttgcacttttttctttgggccaaaatgtgttactacctctactcacttttac

SEQ ID NO: 39792 - DNA, 1155 bp, Zea Mays
ccggcacctacctcccttcccccacccccgcacccgcacgcccaaccttccgtcctcggctgcggccagggtggaagccgtggaggtggacgaaatccaagccgaaaccaccagccccttacatcctaggcgctctcttaccatcctcgacagtctcttcccatcggtggcccttcaatcccccatctagccggtgctacatattaatccaaagggaacgtctccaacatcttctaggttgagctcaacgaacagtctatcaatccccccatttgggcagacattgatgacgacgacgaggattacatcgccaccactgaaccgtcgcaaccctgtctggatttggttgagctcctcgccgcttttcaggaggaggttgctgatgcggtggacggtgttgtcatcagatctgttggtgttcttcccagctgctttgtggtttgtgtgggcatacatgaaacttggagtcggtattaattgagaggagagacgggaggggtggatgtggctgctagccatggtcctgatcagtccttgcttggtattgattgatcatggccattttcagtataattgcattagccttggacttacgcttggagcaattgctggtgttttgtcgaggaatgagctcgtcgctgcagctctcttcactcttgcaatcaatcacaaacaggtggatagaattctggacaaagaaaattttatattggaagaacttcttgatgaggatgaaattaatcaggagtgcaaagcactgaactcaatactcataaacttgtaattttcttatttatttctgtgatatgagaagcatattaaatctactgatggaacttacattagtatttgtttttttgtgggttgtcttattataacttcacttgtgacttctgatacatatagtggagtggttgtggcgtcaaatgaaatgcctattagagaataaaaataatagtcaataatatgcttatatgatataaatttttatgcacttatcgttcctgcaaaggtcctcatatgcacatgaaattgtactttagtaaactctatatttgattattggtactgttctatatatagtctgtattatctgcaaagagttgcacttttttctttgggccaaaatgtgttactacctctactcacttttac

SEQ ID NO: 39793 - DNA, 2034 bp, Zea Mays
catttgcaccgttcgagttcgatcgattcccggacagcgccaaacgtcatccgttgcgtctgcaatattaatcttggccttagtggcgtcgtatctgtgactgtgatcgctcgtcgctttgcttgagagggtcccggtgtgcttgtatatatgtgtgccacgccacgccatgcaggatgacagcacgcataggacgaactaccgatgcaagctgcgatcgatcagtcaccgcatctccggttccgcgcaggcatggacgacaagtcctgctacgtggcaaccggcctctccctggcggccatcctcctcgtcctccaccgcctcgtggtccgtgctggcggcaaggggaacgccgccgcgcggcggctgcctcctagccctcccgccgtcccgttcctcgggcacctccacctgctagcgtcggagtgccctctccactcgtcgctggcccgcctcgcggcgcgccacggccccgtgctctcgctgcgcctgggctcccgcgccgccgtggtggtgtcgtcgccggagtgcgccgaggcgtgcttcacggagcacgacgtggcgttcgccaaccgccccaggctgacctcgcaggcgctggcctccttcggcggcgccgcgctggccgtgtccagctacgggccctactggcgcaacctccggcgcgtggccgccgtgcgcctcctctccacgcaccgcgtggcgtgcatgtgccccgtcatctcggccgaggtgcgcgccatgctgcgccgggtggggcgcgcggccgaggcggcggggcgcgtccagctcaaggccagtctgttcgagctctccctcagcgtgctcatggagaccatcgcgcagaccaagacgtcgcgcgccgacgacgcggacgacgccgtgtcgcccgaggcgcacgagttccggcggatcgtcgacgagatcctgccctacctcggcgccaccaacctgtgggactacctgccgctcctgcggcggttcgacgtgctcggggtgaggaacaagatcagggacgttgtcggcaggagggacgccttcctgcagcggctcatcgacgcggagcggcggaggctggacggcgacggcgacggcgacgagaagaagagcatgatcgccgtgatgctctcgctgcagaagtcggagccggacgtgtacacggacaccatgatcatggcactgtgcgggccggaacggagacgacgtcgtccacgatagaatgggccatgtcgctgctgctgaaccacccggaggcgctgaagaaggccgaggcagagatcgaggcggccgtgggcgcgtcccgcctcatcaccatggacgacgtgccggggctgggctacctgcagtgcgtcatcaacgagacgctgcgcctgtacccggtggccccgctgctgctgccgcacgagtcggcggcggactgcacggtcggcggctacgacgtgccccgcggcacgctgctgttcgtcaacgcgtacgccatccacagggacccggcggcgtgggaggagccggacgagttcaggccggagcggttccgcgacggcaaggccgagggccggctgatgctgccgttcgggatgggacggcgcaggtgccccggggagacgctcgctctgcggaccgccggcctcgtgctcgccacgctcatccagtgcttccactgggacagaatcgatggcgctgagatcgacatgaccgagagcggcgggctcaccatgccccgggccgtcccgttggaggccacctgcaagcctcgcgaagccatgcgtcatgttcttcagcagctctgattggtctatgtgctaaacattctcatccctattctctcttgtgtgtgtggcagtacgaacagcacgtgctagctaaataagctgcgagcaatagctatccgcgtaacagtatggttcgtctaagttgttatctttcaaaagttatctagtactataaacaaattgttcgtgtcttgttcattcgtctgtctcttatgttattttgtcacacaccctgtccgccttctatcccagtcattgtctc

SEQ ID NO: 39794 - DNA, 1546 bp, Zea Mays
gagttaatttcgcagttaatggtgcgaccctgacgggggccgtcttatccccttcctattctgctttcccctcgctccagagtccagtccccagacgagcggttggagcttcgacgtgcggtttccatttcctgccctgctctgatggccgtcgccgaagtggcgatcgagattctcccgcagcagcagcagcagcagccgccgccgccgccgcgggaaccggcggtagtgcctccgaacctctccgtgccgagagtgctccagtatctgtacctcttgagcgcgtgggtcgcctgcgcgggcgtggctgccgggaccgtggcgcgccgggccttgggcgactcttccccgttggtctacgggttcctcaaagtctcgatcggagccctcgttttccccgcgctgctcatcctcgtcttcgccctgcgggtcttgcgcgccatgcttgccgtggggttcagacggtcactccgcactcacgccagggagattcagatccaagccacgaaggtattggattgagttttagttttacgagatatatatactagtagtttggtaggttctagttctctgtgtgttgatgtggaatcatatactgtatacacacgcagtttcagttgggaaatagcttgcgttatttcttcgaaaggagaattgatctgaatctgtccaatttcagaaaataatcatacacatcctatcaatacggtcgtgtgagctcaaaattaaacgctttttagtttgctccaagtcgtcctcatcaggtctatggtgtgtggatgccggagctgctttcagttatgctgtatcagtttctctagagaaaatttaatttgtgcactatattttcgtgattgcatttgcatctttccagttttatattcaaacataattataaatccaatccaatccctatgattatttcaatcgaggagaactgactgagtttgcttgctcttgctgacatgctctcggacatccttgtcagatatttagagcgttaacgtggaaggtgctgcaggaccctattgtgcttgcgtggctcgcatctttgcttttcatcctgcttcttgcagcaagtgttctggtgtttgtgggacttctaccaatggaggagtctcgcagagaaaggattggttatgcgctctctgatgtgggggtattgggtgcaatggcaatgtattgccttatcattatacccagttttgcgctgaagatctggaggagcaagtagggtggcgatgctgcacaaggcacaacactggcgatatctgaggcaaggacagttggagaaggtgcaaaagatggactcctagttaccgtgggtgaagccagctaattaatgttttagagaaataattctctcttggagactactactactgttctacctcagcatcaccggtgctggtgcgtgtgtaacgtggtcactgtgggtatcatcactaccctaccctaagccctatcagaacataagcaccccttggagatttgtgccgtctaaatgaatatagttggttcagcatcgcaaaaaaaaaaaaaa

SEQ ID NO: 39795 - DNA, 452 bp, Zea Mays
tatttgcagcggaaataaattatttattacaaaatggttacaagttacaacatttacaagttatagcaagattacaatatatatcatcggagttggttacaaaagaaattgattcaaaaagattacaatttgaatgtataaaacatttataagttttaaaatacatgctagcttaagtgacaatcctcaataaagaagctaaagatgggatacacctatataagaaggtcgagcccaccggcacttagcagcatccacaacagaacaaaattataacctaaaaaacaacaggaaataaaaccctgagtacgcaattactcagcaagacttacccgactaaagaaaagactctcaagggtatgctggtttattaggaatcaaggtaaagcttatcaaatttcaaagactcattttgcagaagagcttactagtagtggatccttatgccaaaa

SEQ ID NO: 39796 - DNA, 1054 bp, Zea Mays
acaccaccaccaccggcagcaagaaaaaacattctttgtcctcttctcctccgctccccatttctcttgctagggtttctacccctccatatcctcgctccacggtcatggcgaagacgaagcagggaaataaggacgtggattcgtacaccatcggcggcaccaacaaggtcgtctatgtgggagactgcgtgctgatgcgggcgtcggactcggacaaccagccgtatgtggcgcgggtggagaagatggagggcgacgggcgtggcagcgtgcgggtgcaggtgcggtggtactaccgccccgaggagtccaagggcggccgccggcagttccacggcgccaaggagctattcctctccgaccatttcgacctgcagagcgcccacacaattgaggggaagtgtgttgtccactctttcaagaactataccaggcttgacaatgttgggcctgaggacttcttctgccgattcgagtacaaggcggccaccggttccatccatcttgtgtggctatgaccattgaacaggccaaaaagctagatcactttgtttgctcagactgtttcaaagaaaatggttcaaagagactttcaaatgcatatgccacttcaccaaattttgagcctaaggctgaaccaaaaaggcagaggaggtaacaaactgtgagtggtaacatccatatgggtaaggggagatgtgctgcttctgtggtgaatcagcccttgccctttgctgtggtgagagcagaggtgtacagtgtactagaccagtgtttgctgttaggggaacgggttttgttcgatgtgtagaccgtgtggcatggcatgcagttgttggtagaggtcaaaagaacagtcgttgtgttcacttggtcagcttagcgccttagcccttgttaatgtgttaatgcactgtgttaactcagcgagccccccttgtggctgataatgcaagtcatgcagttgttgatacaaatgttgctgcggccatttcatcgactgtcattgttcagtggtactggagtttcggttttgccagctcagtgcagg

SEQ ID NO: 39797 - DNA, 621 bp, Zea Mays
ctcagcctgctgctggcagtgttccgacgggtgttctgcgaggaacagcaagtctcaacaatgttccatccatcttgtgtggctatgaccattgaacaggccaaaaagctagatcactttgtttgctcagactgtttcaaagaaaatggttcaaagagactttcaaatgcatatgccacttcaccaaattttgagcctaaggctgaaccaaaaaggcagaggaggtaacaaactgtgagtggtaacatccatatgggtaaggggagatgtgctgcttctgtggtgaatcagcccttgccctttgctgtggtgagagcagaggtgtacagtgtactagaccagtgtttgctgttaggggaacgggttttgttcgatgtgtagaccgtgtggcatggcatgcagttgttggtagaggtcaaaagaacagtcgttgtgttcacttggtcagcttagcgccttagcccttgttaatgtgttaatgcactgtgttaactcagcgagccccccttgtggctgataatgcaagtcatgcagttgttgatacaaatgttgctgcggccatttcatcgactgtcattgttcagtggtactggagtttcggttttgccagctcagtgcagg

SEQ ID NO: 39798 - DNA, 2491 bp, Zea Mays
cggaaagagggaaggccacgtcgcatgccatccgagctcagcacttccaatagccgtgtctcattctcatcaaatccacgatgcgagtggcagcgcgcgagcgcccattcccgttcctcctcgcccatcggcttctcgcggtctcgccccggcacctcgcactcccaccgcagtccaaaatcctcggcctcacaccctatgcctccgcctgttcttcgcctgttcgcggcagctccgccccgcgctctcggtggccgcgccagggcgcatcgtggcgatggcgggttcgcgcgcctgcgcctgcgcgtcagagcagcggctggggaggccgcgccggcgccttccagaacccagatgataatggataagatctctgctggcgaaggagtcggaggcgctggaggggcttactcatatagtgcgttgaaaagattggatcaaatatggtctagtatttgtgaagctcaagcagattccaaagtccctgaagttgttactcgggttgaagggctgttggctgattctgatcttggttctggttcagagatatttgatgtaattgtatgtggcggcacattaggtatatttgtagctactgctctcagttctaaaggccttcggattggaattatcgaaagaaacataatcaaagggagggaacaggagtggaatatttcaagaaaggagcttatggaaattgtagagattggtattctttcagaagcagaacttgaacaaataatttcaagtgatttcaatcctaatagatgtggatttgaagataaaggtgaaatttgggtggagaacattcttaatcttggtgtttcgcctgctaaacttgttgagaacatgaaagaacgcttcatttcttcgggaggagcaatatttgaggagaaaagtctatcaagcatttatgtctatgatgatctcgctgtactgaaacttagtgatggtgattctttgtcttgccgacttgttgttgatgctatgggaaatttttctccaatagtacggcaggcttttcctgctggttctggtcccaatgaccgtactacatacatgttcacttatgttgatccaacatttggaggcccaaagctagaagaacttttggaagtgttttgggatcttatgcctgcttaccagttcttcacaacagtgggccctgttggctttgattttacaacaaaagtctgatgcgtccatggaagttcccttgtctattttataggatgtgcttcttcaaaatttggatataagaagagttatatttggaattttcccaacttatcgggatagccccttgccagctgcatttgaccgtatcttacaggttggcgatgctagtggaatacagtcacctgtttcttttggaggttttggaagcttgacgagacatcttggccgtttgtctagtggtatatgtgaagcagttgaaggtgatttcctggatgctcatagtttgcagctgctcaacccttacatgccaaacttaagtgcatcatggttgttccaacgagcgatgtcagtaaggccacatgtcaatgtttcaccaacctttatcaatgagcttctctttgctaattttcagtcaatgcagaaactaggggattcggtacttcggccatttctacaggatgtaatacagtttggacctcttgtgaaaactttggggctagtaatgatcactagaccacaaattttaccttccatatttaagcaggttggactgggagtcatccttgagtggtcaggccattttatgatgcttggttactacacattcctttctacctatattgatccgatcctgaggtcttgggtggaatccttgcccccacgggacaaatatcagtggaaacggtacctggaagcttggagatatggagccggtttagattaccgccaaggggaataaactgtttcactaaaaacacatgaaagtttcctcagaaacaaaattatgtatagatacatgaatatagcactgtcaggggaaagatgaatagagtacatatatgatctctgattgatttagttttccttttccagagcacaagattgaacatcaagtttagaatgtgtattatctagtttcacttgtaatttgcccactttactgaactgatggagtgaatatgtatagtactctagaatttcaaataatgctgaatggagctgagatgctcaatatttgttgatcaatgtatcaattatgtgaaataaaagtaaatgtccggtttcattcagattgcaagtgtaacaacaaaataaacagccatttacacatgttggtaaagagaattttgtgatttactttaccataagataattactaatgtaaataatagatgcctggaagttgtgaaatggtctatttagagccagttagagaaagatgtcagtgcagcaataaaccgacgctgtaagaagtgttgttatgtctcataatattccgttatcaggtccataggatgataggaggaccact

SEQ ID NO: 39799 - DNA, 2489 bp, Zea Mays
gccgtgtctcattctcatcaaatccacgatgcgagtggcagcgcgcgagcgcccattcccgttcctcctcgcccatcggcttctcgcggtctcgccccggcacctcgcactcccaccgcagtccaaaatcctcggcctcacaccctatgcctccgcctgttcttcgcctgttcgcggcagctccgccccgcgctctcggtggccgcgccagggcgcatcgtggcgatggcgggttcgcgcgcctgcgcctgcgcgtcagagcagcggctggggaggccgcgccggcgccttccagaacccagatgataatggataagatctctgctggcgaaggagtcggaggcgctggaggggcttactcatatagtgcgttgaaaagattggatcaaatatggtctagtatttgtgaagctcaagcagattccaaagtccctgaagttgttactcgggttgaagggctgttggctgattctgatcttggttctggttcagagatatttgatgtaattgtatgtggcggcacattaggtatatttgtagctactgctctcagttctaaaggccttcggattggaattatcgaaagaaacataatcaaagggagggaacaggagtggaatatttcaagaaaggagcttatggaaattgtagagattggtattctttcagaagcagaacttgaacaaataatttcaagtgatttcaatcctaatagatgtggatttgaagataaaggtgaaatttgggtggagaacattcttaatcttggtgtttcgcctgctaaacttgttgagaacatgaaagaacgcttcatttcttcgggaggagcaatatttgaggagaaaagtctatcaagcatttatgtctatgatgatctcgctgtactgaaacttagtgatggtgattctttgtcttgccgacttgttgttgatgctatgggaaatttttctccaatagtacggcagatccggtctggtagaaaaccagatggaatgtgccttgttgttggtgcttgcgctcatggattcgaaaaaaatacaacaagtgatattattttcagtagctcatcagtgaaaagagctgggaattcaggagtacagctcttttgggaggcttttcctgctggttctggtcccaatgaccgtactacatacatgttcacttatgttgatccaacatttggaggcccaaagctagaagaacttttggaagtgttttgggatcttatgcctgcttaccaggatgtgcttcttcaaaatttggatataagaagagttatatttggaattttcccaacttatcgggatagccccttgccagctgcatttgaccgtatcttacaggttggcgatgctagtggaatacagtcacctgtttcttttggaggttttggaagcttgacgagacatcttggccgtttgtctagtggtatatgtgaagcagttgaaggtgatttcctggatgctcatagtttgcagctgctcaacccttacatgccaaacttaagtgcatcatggttgttccaacgagcgatgtcagtaaggccacatgtcaatgtttcaccaacctttatcaatgagcttctctttgctaattttcagtcaatgcagaaactaggggattcggtacttcggccatttctacagtttggacctcttgtgaaaactttggggctagtaatgatcactagaccacaaattttaccttccatatttaagcaggttggactgggagtcatccttgagtggtcaggccattttatgatgcttggttactacacattcctttctacctatattgatccgatcctgaggtcttgggtggaatccttgcccccacgggacaaatatcagtggaaacggtacctggaagcttggagatatggagccggtttagattaccgccaaggggaataaactgtttcactaaaaacacatgaaagtttcctcagaaacaaaattatgtatagatacatgaatatagcactgtcaggggaaagatgaatagagtacatatatgatctctgattgatttagttttccttttccagagcacaagattgaacatcaagtttagaatgtgtattatctagtttcacttgtaatttgcccactttactgaactgatggagtgaatatgtatagtactctagaatttcaaataatgctgaatggagctgagatgctcaatatttgttgatcaatgtatcaattatgtgaaataaaagtaaatgtccggtttcattcagattgcaagtgtaacaacaaaataaacagccatttacacatgttggtaaagagaattttgtgatttactttaccataagataattactaatgtaaataatagatgcctggaagttgtgaaatggtctatttagagccagttagagaaagatgtcagtgcagcaataaaccgacgctgtaagaagtgttgttatgtctcataatattccgttatcaggtccataggatgataggaggaccact
